(19) United States
(12) Patent Application Publication
(10) Pub. No.: US 2023/0295663 A1
(43) Pub. Date: Sep. 21, 2023

(54) COMPOSITIONS AND METHODS OF TREATING AMYOTROPHIC LATERAL SCLEROSIS (ALS)

(71) Applicant: VOYAGER THERAPEUTICS, INC., CAMBRIDGE, MA (US)

(72) Inventors: Dinah Wen-Yee SAH, Hopkinton, MA (US); Qingmin CHEN, Belmont, MA (US); Jinzhao HOU, Lexington, MA (US)

(21) Appl. No.: 18/173,618

(22) Filed: Feb. 23, 2023

Related U.S. Application Data
(62) Division of application No. 16/611,054, filed on Nov. 5, 2019, now Pat. No. 11,603,542.
(60) Provisional application No. 62/566,609, filed on Oct. 2, 2017.
(60) Provisional application No. 62/507,927, filed on May 18, 2017.
(60) Provisional application No. 62/520,100, filed on Jun. 15, 2017.
(60) Provisional application No. 62/501,788, filed on May 5, 2017.

(51) Int. Cl. C12N 15/861; C12N 9/02; C12N 15/113

(52) U.S. Cl. CPC C12N 15/861; C12N 9/0089; C12N 15/113; A61K 45/06

(57) ABSTRACT

The present invention relates to adeno-associated viral (AAV) particles encoding siRNA molecules and methods for treating amyotrophic lateral sclerosis (ALS).

### CROSS REFERENCE TO RELATED APPLICATIONS

[0001] This application is a divisional of U.S. patent application Ser. No. 16/611,054, filed Nov. 5, 2019, entitled Compositions and Methods of Treating Amyotrophic Lateral Sclerosis (ALS), (now U.S. Pat. No. 11,603,542), which is a 35 U.S.C. § 371 national stage filing of International Application No. PCT/US2018/031089, filed May 4, 2018, entitled Compositions and Methods of Treating Amyotrophic Lateral Sclerosis (ALS), which claims the benefit of U.S. Provisional Patent Application No. 62/501,788, filed May 5, 2017, entitled Compositions and Methods of Treating Amyotrophic Lateral Sclerosis (ALS), U.S. Provisional Patent Application No. 62/507,927, filed May 18, 2017, entitled Compositions and Methods of Treating Amyotrophic Lateral Sclerosis (ALS), U.S. Provisional Patent Application No. 62/520,100, filed Jun. 15, 2017, entitled Compositions and Methods of Treating Amyotrophic Lateral Sclerosis (ALS), and U.S. Provisional Patent Application No. 62/566,609, filed Oct. 2, 2017, entitled Compositions and Methods of Treating Amyotrophic Lateral Sclerosis (ALS), the contents of each of which is incorporated herein by reference in its entirety.

### REFERENCE TO THE SEQUENCE LISTING

[0002] The instant application contains a Sequence Listing which has been submitted electronically in xml format and is hereby incorporated by reference in its entirety. Said xml copy, created on Feb. 23, 2023 is named VTJ_1048USDV_Sequence_Listing.xml and is 5,194,735 bytes in size.

### FIELD OF THE INVENTION

[0003] The present invention relates to compositions, methods and processes for the design, preparation, manufacture, use and/or formulation of AAV particles comprising modulatory polynucleotides, e.g., polynucleotides encoding at least one small interfering RNA (siRNA) molecules which target the superoxide dismutase 1 (SOD1) gene. Targeting of the SOD1 gene may interfere with SOD1 gene expression and the resultant SOD1 protein production. The AAV particles comprising modulatory polynucleotides encoding at least one siRNA molecules may be inserted into recombinant adeno-associated virus (AAV) vectors. Methods for using the AAV particles to inhibit the expression of the SOD1 gene in a subject with a neurodegenerative disease (e.g., amyotrophic lateral sclerosis (ALS)) are also disclosed.

### BACKGROUND OF THE INVENTION

[0004] Amyotrophic lateral sclerosis (ALS), also known as Lou Gehrig's disease, is the most fatal progressive neurodegenerative disease, characterized by the predominant loss of motor neurons (MNs) in primary motor cortex, the brainstem, and the spinal cord. The loss of motor neurons devastates basic, fundamental movements, such as breathing, and typically causes death to patients within 2-5 years after diagnosis. Progressive deterioration of motor function in patients severely disrupts their breathing ability, requiring some form of breathing aid for survival of the patients. Other symptoms also include muscle weakness in hands, arms, legs or the muscles of swallowing. Some patients (e.g., FTD-ALS) may also develop frontotemporal dementia.

[0005] According to the ALS Association, approximately 5,600 people in the United States of America are diagnosed with ALS each year. The incidence of ALS is two per 100,000 people, and it is estimated that as many as 30,000 Americans may have the disease at any given time.

[0006] Two forms of ALS have been described: one is sporadic ALS (sALS), which is the most common form of ALS in the United States of America and accounts for 90 to 95% of all cases diagnosed; the other is familial ALS (fALS), which occurs in a family lineage mainly with a dominant inheritance and only accounts for about 5 to 10% of all cases in the United States of America. sALS and fALS are clinically indistinguishable.

[0007] Pathological studies found that disturbance of some cellular processes occur after disease onset, including increased ER stress, generation of free radicals (i.e., reactive oxygen species (ROS)), mitochondrial dysfunction, protein aggregation, apoptosis, inflammation and glutamate excitotoxicity, specifically in the motor neurons (MNs).

[0008] The causes of ALS are complicated and heterogeneous. In general, ALS is considered to be a complex genetic disorder in which multiple genes in combination with environmental exposures combine to render a person susceptible. More than a dozen genes associated with ALS have been discovered, including, SOD-1 (Cu²⁺/Zn²⁺ superoxide dismutase), TDP-43 (TARDBP, TAR DNA binding protein-43), FUS (Fused in Sarcoma/Translocated in Sarcoma), ANG (Angiogenin), ATXN2 (Ataxin-2), valosin containing protein (VCP), OPTN (Optineurin) and an expansion of the noncoding GGGGCC hexanucleotide repeat in the chromosome 9, open reading frame 72 (C9ORF72). However, the exact mechanisms of motor neuron degeneration are still elusive. Currently, there is no curative treatment for ALS. The only FDA approved drug is Riluzole, which antagonizes the glutamate response to reduce the pathological development of ALS. However, only about a three-month life span expansion for ALS patients in the early stages has been reported, and no therapeutic benefit for ALS patients in the late stages has been observed, indicating a lack of therapeutic options for the patients (Bensimon G et al., J Neurol. 2002, 249, 609-615). Therefore, a new treatment strategy that can effectively prevent the disease progression is still in demand.

[0009] Many different strategies are under investigation for potential treatment of both sporadic and familial ALS. One strategy is based on the neuroprotective and/or regenerative effect of neurotrophic factors, such as Insulin-like growth factor I (IGF-I), Glial cell line-derived neurotrophic factor (GDNF), Vascular endothelial growth factor (VEGF), Colivelin and Activity dependent neurotrophic factor (ADNF) derived peptide, which can promote neuronal survival. Several studies demonstrated that neurotrophic factors can preserve motor neuron functionality, therefore improving motor performance in the SOD1 transgenic mice. However, such treatment often fails to prolong the survival of SOD1 mice, suggesting that neurotrophic factors are not sufficient to prolong neuronal survival (See a review by Yacila and Sari, Curr Med Chem., 2014, 21(31), 3583-3593).

[0010] Another strategy for ALS treatment has focused on stem cell based therapy. Stem cells have the potential to generate motor neurons, thereby replacing degenerating motor neurons in the ALS—affected CNS such as primary motor cortex, brainstem and spinal cord. Stem cells derived from multiple sources have been investigated, including induced pluripotent stem cells (iPSCs), mesenchymal stromal cells (MSCs) (e.g. bone marrow mesenchymal stromal cells (BMSCs) and adipocyte stem cells (ASCs)) and neural tissue origin neural stem cells (e.g., fetal spinal neural stem cells (NSCs), multipotent neural progenitor cells (NPCs)) (e.g., reviewed by Kim C et al., Exp. Neurobiol., 2014, 23(3), 207-214).

[0011] Mutations in the gene of superoxide dismutase type I (SOD1; Cu²⁺/Zn²⁺ superoxide dismutase type I) are the most common cause of fALS, accounting for about 20 to 30% of all fALS cases. Recent reports indicate that SOD1 mutations may also be linked to about 4% of all sALS cases (Robberecht and Philip, Nat. Rev. Neurosci., 2013, 14, 248-264). SOD1-linked fALS is most likely not caused by loss of the normal SOD1 activity, but rather by a gain of a toxic function. One of the hypotheses for mutant SOD1-linked fALS toxicity proposes that an aberrant SOD1 enzyme causes small molecules such as peroxynitrite or hydrogen peroxide to produce damaging free radicals. Other hypotheses for mutant SOD1 neurotoxicity include inhibition of the proteasome activity, mitochondrial damage, disruption of RNA processing and formation of intracellular aggregates. Abnormal accumulation of mutant SOD1 variants and/or wild-type SOD1 in ALS forms insoluble fibrillar aggregates which are identified as pathological inclusions. Aggregated SOD1 protein can induce mitochondria stress (Vehvilainen P et al., Front Cell Neurosci., 2014, 8, 126) and other toxicity to cells, particularly to motor neurons.

[0012] These findings indicate that SOD1 can be a potential therapeutic target for both familial and sporadic ALS. A therapy that can reduce the SOD1 protein produced in the central nervous system of ALS patients may ameliorate the symptoms of ALS in patients such as motor neuron degeneration and muscle weakness and atrophy. Agents and methods that aim to prevent the formation of wild type and/or mutant SOD1 protein aggregation may prevent disease progression and allow for amelioration of ALS symptoms. RNA interfering (RNAi) mediated gene silencing has drawn researchers' interest in recent years. Small double stranded RNA (small interfering RNA) molecules that target the SOD1 gene haven been taught in the art for their potential in treating ALS (See, e.g., U.S. Pat. No. 7,632,938 and U.S. Patent Publication No. 20060229268, the contents of which is herein incorporated by reference in its entirety).

[0013] The present invention develops an RNA interference based approach to inhibit or prevent the expression of SOD1 in ALS patients for treatment of the disease.

[0014] The present invention provides novel double stranded RNA (dsRNA) constructs and siRNA constructs and methods of their design. In addition, these novel siRNA constructs may be synthetic molecules or be encoded in an expression vector (one or both strands) for delivery into cells. Such vectors include, but are not limited to adeno-associated viral vectors such as vector genomes of any of the AAV serotypes or other viral delivery vehicles such as lentivirus, etc.

### SUMMARY OF THE INVENTION

[0015] Described herein are methods, processes, compositions kits and devices for the administration of AAV particles comprising modulatory polynucleotides encoding at least one siRNA molecules for the treatment, prophylaxis, palliation and/or amelioration of a disease and/or disorder (e.g., amyotrophic lateral sclerosis (ALS)).

[0016] The present invention relates to RNA molecule mediated gene specific interference with gene expression and protein production. Methods for treating motor neuron degeneration diseases such as amyotrophic lateral sclerosis are also included in the present invention. The siRNA included in the compositions featured herein encompass a dsRNA having an antisense strand (the antisense strand) having a region that is 30 nucleotides or less, generally 19-24 nucleotides in length, that is substantially complementary to at least part of an mRNA transcript of the SOD1 gene.

[0017] The present invention provides short double stranded RNA molecules such as small interfering RNA (siRNA) duplexes that target SOD1 mRNA to interfere with SOD1 gene expression and/or SOD1 protein production. The siRNA duplexes of the present invention may interfere with both alleles of the SOD1 gene irrespective of any particular mutation in the SOD1 gene, and may particularly interact with those found in ALS disease.

[0018] In some embodiments, such siRNA molecules, or a single strand of the siRNA molecules, are inserted into adeno-associated viral (AAV) vectors to be introduced into cells, specifically motor neurons and/or other surrounding cells in the central nervous system. The AAV vector may comprise sequences encoding 1, 2, 3, 4, or more than 4 siRNA duplexes.

[0019] The siRNA duplex of the present invention comprises an antisense strand and a sense strand hybridized together forming a duplex structure, wherein the antisense strand is complementary to the nucleic acid sequence of the targeted SOD1 gene, and wherein the sense strand is homologous to the nucleic acid sequence of the targeted SOD1 gene. In some aspects, the 5′end of the antisense strand has a 5′ phosphate group and the 3′end of the sense strand contains a 3′hydroxyl group. In other aspects, there are none, one or 2 nucleotides overhangs at the 3′end of each strand. According to the present invention, each strand of the siRNA duplex targeting the SOD1 gene is about 19-25 nucleotides in length, preferably about 19 nucleotides, 20 nucleotides, 21 nucleotides, 22 nucleotides, 23 nucleotides, 24 nucleotides, or 25 nucleotides in length. In some aspects, the siRNAs may be unmodified RNA molecules.

[0020] In other aspects, the siRNAs may contain at least one modified nucleotide, such as base, sugar or backbone modification.

[0021] In one embodiment, an siRNA or dsRNA includes at least two sequences that are complementary to each other. The dsRNA includes a sense strand having a first sequence and an antisense strand having a second sequence. The antisense strand includes a nucleotide sequence that is substantially complementary to at least part of an mRNA encoding SOD1, and the region of complementarity is 30 nucleotides or less, and at least 15 nucleotides in length. Generally, the dsRNA is 19 to 24, e.g., 19 to 21 nucleotides in length. In some embodiments the dsRNA is from about 15 to about 25 nucleotides in length, and in other embodiments the dsRNA is from about 25 to about 30 nucleotides in length.

[0022] The dsRNA, either upon contacting with a cell expressing SOD1 or upon transcription within a cell expressing SOD1, inhibits or suppresses the expression of a SOD1 gene by at least 10%, at least 20%, at least 25%, at least 30%, at least 35% or at least 40% or more, such as when assayed by a method as described herein.

[0023] According to the present invention, AAV vectors comprising the nucleic acids encoding the siRNA duplexes, one strand of the siRNA duplex or the dsRNA targeting SOD1 gene are produced, the AAV vector serotype may be AAV1, AAV2, AAV3, AAV4, AAV5, AAV6, AAV7, AAV8, AAV9, AAV9.47, AAV9(hu14), AAV10, AAV11, AAV12, AAVrh8, AAVrh10, AAV-DJ8 and/or AAV-DJ, and variants thereof.

[0024] The present invention also provides pharmaceutical compositions comprising at least one siRNA duplex targeting the SOD1 gene and a pharmaceutically acceptable carrier. In some aspects, a nucleic acid sequence encoding the siRNA duplex is inserted into an AAV vector.

[0025] In some embodiments, the present invention provides methods for inhibiting/silencing SOD1 gene expression in a cell. Accordingly, the siRNA duplexes or dsRNA can be used to substantially inhibit SOD1 gene expression in a cell, in particular in a motor neuron. In some aspects, the inhibition of SOD1 gene expression refers to an inhibition by at least about 20%, preferably by at least about 30%, 40%, 50%, 60%, 70%, 80%, 85%, 90%, 95% and 100%. Accordingly, the protein product of the targeted gene may be inhibited by at least about 20%, preferably by at least about 30%, 40%, 50%, 60%, 70%, 80%, 85%, 90%, 95% and 100%. The SOD1 gene can be either a wild type gene or a mutated SOD1 gene with at least one mutation. Accordingly, the SOD1 protein is either wild type protein or a mutated polypeptide with at least one mutation.

[0026] In some embodiments, the present invention provides methods for treating, or ameliorating amyotrophic lateral sclerosis associated with abnormal SOD1 gene and/or SOD1 protein in a subject in need of treatment, the method comprising administering to the subject a pharmaceutically effective amount of at least one siRNA duplex targeting the SOD1 gene, delivering said siRNA duplex into targeted cells, inhibiting SOD1 gene expression and protein production, and ameliorating symptoms of ALS in the subject.

[0027] In some embodiments, an AAV vector comprising the nucleic acid sequence encoding at least one siRNA duplex targeting the SOD1 gene is administered to the subject in need for treating and/or ameliorating ALS. The AAV vector serotype may be selected from the group consisting of AAV1, AAV2, AAV3, AAV4, AAV5, AAV6, AAV7, AAV8, AAV9, AAV9.47, AAV9(hu14), AAV10, AAV11, AAV12, AAVrh8, AAVrh10 and AAV-DJ, and variants thereof.

[0028] In some aspects, ALS is familial ALS linked to SOD1 mutations. In other aspects, ALS is sporadic ALS which is characterized by abnormal aggregation of SOD1 protein or disruption of SOD1 protein function or localization, though not necessarily as a result of genetic mutation. The symptoms of ALS ameliorated by the present method may include motor neuron degeneration, muscle weakness, stiffness of muscles, slurred speech and/or difficulty in breathing.

[0029] In some embodiments, the siRNA duplexes or dsRNA targeting SOD1 gene or the AAV vectors comprising such siRNA-encoding molecules may be introduced directly into the central nervous system of the subject, for example, by intracranial injection.

[0030] In some embodiments, the pharmaceutical composition of the present invention is used as a solo therapy. In other embodiments, the pharmaceutical composition of the present invention is used in combination therapy. The combination therapy may be in combination with one or more neuroprotective agents such as small molecule compounds, growth factors and hormones which have been tested for their neuroprotective effect on motor neuron degeneration.

[0031] In some embodiments, the present invention provides methods for treating, or ameliorating amyotrophic lateral sclerosis by administering to a subject in need thereof a therapeutically effective amount of a plasmid or AAV vector described herein. The ALS may be familial ALS or sporadic ALS.

[0032] The details of various embodiments of the invention are set forth in the description below. Other features, objects, and advantages of the invention will be apparent from the description and the drawings, and from the claims.

### BRIEF DESCRIPTION OF THE DRAWINGS

[0033] The foregoing and other objects, features and advantages will be apparent from the following description of particular embodiments of the invention, as illustrated in the accompanying drawings. The drawings are not necessarily to scale, emphasis instead being placed upon illustrating the principles of various embodiments of the invention.

[0034] FIG. 1 is a schematic of a viral genome of the invention.

[0035] FIG. 2 is a schematic of a viral genome of the invention.

[0036] FIG. 3 is a schematic of a viral genome of the invention.

[0037] FIG. 4 is a schematic of a viral genome of the invention.

[0038] FIG. 5 is a schematic of a viral genome of the invention.

[0039] FIG. 6 is a schematic of a viral genome of the invention.

[0040] FIG. 7 is a schematic of a viral genome of the invention.

[0041] FIG. 8 is a schematic of a viral genome of the invention.

[0042] FIG. 9 is a schematic of a viral genome of the invention.

[0043] The details of one or more embodiments of the invention are set forth in the accompanying description below. Although any materials and methods similar or equivalent to those described herein can be used in the practice or testing of the present invention, the preferred materials and methods are now described. Other features, objects and advantages of the invention will be apparent from the description. In the description, the singular forms also include the plural unless the context clearly dictates otherwise. Unless defined otherwise, all technical and scientific terms used herein have the same meaning as commonly understood by one of ordinary skill in the art to which this invention belongs. In the case of conflict, the present description will control.

### DETAILED DESCRIPTION OF THE INVENTION

### I. Compositions of the Invention

[0044] According to the present invention, compositions for delivering modulatory polynucleotides and/or modulatory polynucleotide-based compositions by adeno-associated viruses (AAVs) are provided. AAV particles of the invention may be provided via any of several routes of administration, to a cell, tissue, organ, or organism, in vivo, ex vivo or in vitro.

[0045] As used herein, an “AAV particle” is a virus which comprises a viral genome with at least one payload region and at least one inverted terminal repeat (ITR) region.

[0046] As used herein, “viral genome” or “vector genome” or “viral vector” refers to the nucleic acid sequence(s) encapsulated in an AAV particle. Viral genomes comprise at least one payload region encoding polypeptides or fragments thereof.

[0047] As used herein, a “payload” or “payload region” is any nucleic acid molecule which encodes one or more polypeptides of the invention. At a minimum, a payload region comprises nucleic acid sequences that encode a sense and antisense sequence, an siRNA-based composition, or a fragment thereof, but may also optionally comprise one or more functional or regulatory elements to facilitate transcriptional expression and/or polypeptide translation.

[0048] The nucleic acid sequences and polypeptides disclosed herein may be engineered to contain modular elements and/or sequence motifs assembled to enable expression of the modulatory polynucleotides and/or modulatory polynucleotide-based compositions of the invention. In some embodiments, the nucleic acid sequence comprising the payload region may comprise one or more of a promoter region, an intron, a Kozak sequence, an enhancer or a polyadenylation sequence. Payload regions of the invention typically encode at least one sense and antisense sequence, an siRNA-based compositions, or fragments of the foregoing in combination with each other or in combination with other polypeptide moieties.

[0049] The payload regions of the invention may be delivered to one or more target cells, tissues, organs or organisms within the viral genome of an AAV particle.

[0050] Adeno-Associated Viruses (AAVs) and AAV Particles

[0051] Viruses of the Parvoviridae family are small non-enveloped icosahedral capsid viruses characterized by a single stranded DNA genome. Parvoviridae family viruses consist of two subfamilies: Parvovirinae, which infect vertebrates, and Densovirinae, which infect invertebrates. Due to its relatively simple structure, and due to the fact that it is easily manipulated using standard molecular biology techniques, this virus family is useful as a biological tool. The genome of the virus may be modified to contain a minimum of components for the assembly of a functional recombinant virus, or viral particle, which is loaded with or engineered to express or deliver a desired payload, which may be delivered to a target cell, tissue, organ, or organism.

[0052] The parvoviruses and other members of the Parvoviridae family are generally described in Kenneth I. Berns, “Parvoviridae: The Viruses and Their Replication,” Chapter 69 in FIELDS VIROLOGY (3d Ed. 1996), the contents of which are incorporated by reference in their entirety.

[0053] The Parvoviridae family comprises the Dependovirus genus which includes adeno-associated viruses (AAV) capable of replication in vertebrate hosts including, but not limited to, human, primate, bovine, canine, equine, and ovine species.

[0054] The AAV viral genome is a linear, single-stranded DNA (ssDNA) molecule approximately 5,000 nucleotides (nt) in length. The AAV viral genome can comprise a payload region and at least one inverted terminal repeat (ITR) or ITR region. ITRs traditionally flank the coding nucleotide sequences for the non-structural proteins (encoded by Rep genes) and the structural proteins (encoded by capsid genes or Cap genes). While not wishing to be bound by theory, an AAV viral genome typically comprises two ITR sequences. The AAV viral genome comprises a characteristic T-shaped hairpin structure defined by the self-complementary terminal 145 nt of the 5′ and 3′ ends of the ssDNA which form an energetically stable double stranded region. The double stranded hairpin structures comprise multiple functions including, but not limited to, acting as an origin for DNA replication by functioning as primers for the endogenous DNA polymerase complex of the host viral replication cell.

[0055] In addition to the encoded heterologous payload, AAV vectors may comprise the viral genome, in whole or in part, of any naturally occurring and/or recombinant AAV serotype nucleotide sequence or variant. AAV variants may have sequences of significant homology at the nucleic acid (genome or capsid) and amino acid levels (capsids), to produce constructs which are generally physical and functional equivalents, replicate by similar mechanisms, and assemble by similar mechanisms. Chiorini et al., J. Vir. 71: 6823-33(1997); Srivastava et al., J. Vir. 45:555-64 (1983); Chiorini et al., J. Vir. 73:1309-1319 (1999); Rutledge et al., J. Vir. 72:309-319 (1998); and Wu et al., J. Vir. 74: 8635-47 (2000), the contents of each of which are incorporated herein by reference in their entirety.

[0056] In one embodiment, AAV particles of the present invention are recombinant AAV vectors which are replication defective, lacking sequences encoding functional Rep and Cap proteins within their viral genome. These defective AAV vectors may lack most or all parental coding sequences and essentially carry only one or two AAV ITR sequences and the nucleic acid of interest for delivery to a cell, a tissue, an organ or an organism.

[0057] In one embodiment, the viral genome of the AAV particles of the present invention comprise at least one control element which provides for the replication, transcription and translation of a coding sequence encoded therein. Not all of the control elements need always be present as long as the coding sequence is capable of being replicated, transcribed and/or translated in an appropriate host cell. Non-limiting examples of expression control elements include sequences for transcription initiation and/or termination, promoter and/or enhancer sequences, efficient RNA processing signals such as splicing and polyadenylation signals, sequences that stabilize cytoplasmic mRNA, sequences that enhance translation efficacy (e.g., Kozak consensus sequence), sequences that enhance protein stability, and/or sequences that enhance protein processing and/or secretion. According to the present invention, AAV particles for use in therapeutics and/or diagnostics comprise a virus that has been distilled or reduced to the minimum components necessary for transduction of a nucleic acid payload or cargo of interest. In this manner, AAV particles are engineered as vehicles for specific delivery while lacking the deleterious replication and/or integration features found in wild-type viruses.

[0058] AAV vectors of the present invention may be produced recombinantly and may be based on adeno-associated virus (AAV) parent or reference sequences. As used herein, a “vector” is any molecule or moiety which transports, transduces or otherwise acts as a carrier of a heterologous molecule such as the nucleic acids described herein.

[0059] In addition to single stranded AAV viral genomes (e.g., ssAAVs), the present invention also provides for self-complementary AAV (scAAVs) viral genomes. scAAV viral genomes contain DNA strands which anneal together to form double stranded DNA. By skipping second strand synthesis, scAAVs allow for rapid expression in the cell.

[0060] In one embodiment, the AAV particle of the present invention is an scAAV.

[0061] In one embodiment, the AAV particle of the present invention is an ssAAV.

[0062] Methods for producing and/or modifying AAV particles are disclosed in the art such as pseudotyped AAV vectors (PCT Patent Publication Nos. WO200028004; WO200123001; WO2004112727; WO 2005005610 and WO 2005072364, the content of each of which is incorporated herein by reference in its entirety).

[0063] AAV particles may be modified to enhance the efficiency of delivery. Such modified AAV particles can be packaged efficiently and be used to successfully infect the target cells at high frequency and with minimal toxicity. In some embodiments the capsids of the AAV particles are engineered according to the methods described in US Publication Number US 20130195801, the contents of which are incorporated herein by reference in their entirety.

[0064] In one embodiment, the AAV particles comprising a payload region encoding the polypeptides of the invention may be introduced into mammalian cells.

[0065] AAV Serotypes

[0066] AAV particles of the present invention may comprise or be derived from any natural or recombinant AAV serotype. According to the present invention, the AAV particles may utilize or be based on a serotype selected from any of the following AAV1, AAV2, AAV2G9, AAV3, AAV3a, AAV3b, AAV3-3, AAV4, AAV4-4, AAV5, AAV6, AAV6.1, AAV6.2, AAV6.1.2, AAV7, AAV7.2, AAV8, AAV9, AAV9.11, AAV9.13, AAV9.16, AAV9.24, AAV9.45, AAV9.47, AAV9.61, AAV9.68, AAV9.84, AAV9.9, AAV10, AAV11, AAV12, AAV16.3, AAV24.1, AAV27.3, AAV42.12, AAV42-1b, AAV42-2, AAV42-3a, AAV42-3b, AAV42-4, AAV42-5a, AAV42-5b, AAV42-6b, AAV42-8, AAV42-10, AAV42-11, AAV42-12, AAV42-13, AAV42-15, AAV42-aa, AAV43-1, AAV43-12, AAV43-20, AAV43-21, AAV43-23, AAV43-25, AAV43-5, AAV44.1, AAV44.2, AAV44.5, AAV223.1, AAV223.2, AAV223.4, AAV223.5, AAV223.6, AAV223.7, AAV1-7/rh.48, AAV1-8/rh.49, AAV2-15/rh.62, AAV2-3/rh.61, AAV2-4/rh.50, AAV2-5/rh.51, AAV3.1/hu.6, AAV3.1/hu.9, AAV3-9/rh.52, AAV3-11/rh.53, AAV4-8/r11.64, AAV4-9/rh.54, AAV4-19/rh.55, AAV5-3/rh.57, AAV5-22/rh.58, AAV7.3/hu.7, AAV16.8/hu.10, AAV16.12/hu.11, AAV29.3/bb.1, AAV29.5/bb.2, AAV106.1/hu.37, AAV114.3/hu.40, AAV127.2/hu.41, AAV127.5/hu.42, AAV128.3/hu.44, AAV130.4/hu.48, AAV145.1/hu.53, AAV145.5/hu.54, AAV145.6/hu.55, AAV161.10/hu.60, AAV161.6/hu.61, AAV33.12/hu.17, AAV33.4/hu.15, AAV33.8/hu.16, AAV52/hu.19, AAV52.1/hu.20, AAV58.2/hu.25, AAVA3.3, AAVA3.4, AAVA3.5, AAVA3.7, AAVC1, AAVC2, AAVC5, AAV-DJ, AAV-DJ8, AAVF3, AAVF5, AAVH2, AAVrh.72, AAVhu.8, AAVrh.68, AAVrh.70, AAVpi.1, AAVpi.3, AAVpi.2, AAVrh.60, AAVrh.44, AAVrh.65, AAVrh.55, AAVrh.47, AAVrh.69, AAVrh.45, AAVrh.59, AAVhu.12, AAVH6, AAVLK03, AAVH-1/hu.1, AAVH-5/hu.3, AAVLG-10/rh.40, AAVLG-4/rh.38, AAVLG-9/hu.39, AAVN721-8/rh.43, AAVCh.5, AAVCh.5R1, AAVcy.2, AAVcy.3, AAVcy.4, AAVcy.5, AAVCy.5R1, AAVCy.5R2, AAVCy.5R3, AAVCy.5R4, AAVcy.6, AAVhu.1, AAVhu.2, AAVhu.3, AAVhu.4, AAVhu.5, AAVhu.6, AAVhu.7, AAVhu.9, AAVhu.10, AAVhu.11, AAVhu.13, AAVhu.15, AAVhu.16, AAVhu.17, AAVhu.18, AAVhu.20, AAVhu.21, AAVhu.22, AAVhu.23.2, AAVhu.24, AAVhu.25, AAVhu.27, AAVhu.28, AAVhu.29, AAVhu.29R, AAVhu.31, AAVhu.32, AAVhu.34, AAVhu.35, AAVhu.37, AAVhu.39, AAVhu.40, AAVhu.41, AAVhu.42, AAVhu.43, AAVhu.44, AAVhu.44R1, AAVhu.44R2, AAVhu.44R3, AAVhu.45, AAVhu.46, AAVhu.47, AAVhu.48, AAVhu.48R1, AAVhu.48R2, AAVhu.48R3, AAVhu.49, AAVhu.51, AAVhu.52, AAVhu.54, AAVhu.55, AAVhu.56, AAVhu.57, AAVhu.58, AAVhu.60, AAVhu.61, AAVhu.63, AAVhu.64, AAVhu.66, AAVhu.67, AAVhu.14/9, AAVhu.t 19, AAVrh.2, AAVrh.2R, AAVrh.8, AAVrh.8R, AAVrh.10, AAVrh.12, AAVrh.13, AAVrh.13R, AAVrh.14, AAVrh.17, AAVrh.18, AAVrh.19, AAVrh.20, AAVrh.21, AAVrh.22, AAVrh.23, AAVrh.24, AAVrh.25, AAVrh.31, AAVrh.32, AAVrh.33, AAVrh.34, AAVrh.35, AAVrh.36, AAVrh.37, AAVrh.37R2, AAVrh.38, AAVrh.39, AAVrh.40, AAVrh.46, AAVrh.48, AAVrh.48.1, AAVrh.48.1.2, AAVrh.48.2, AAVrh.49, AAVrh.51, AAVrh.52, AAVrh.53, AAVrh.54, AAVrh.56, AAVrh.57, AAVrh.58, AAVrh.61, AAVrh.64, AAVrh.64R1, AAVrh.64R2, AAVrh.67, AAVrh.73, AAVrh.74, AAVrh8R, AAVrh8R A586R mutant, AAVrh8R R533A mutant, AAAV, BAAV, caprine AAV, bovine AAV, AAVhE1.1, AAVhEr1.5, AAVhER1.14, AAVhEr1.8, AAVhEr1.16, AAVhEr1.18, AAVhEr1.35, AAVhEr1.7, AAVhEr1.36, AAVhEr2.29, AAVhEr2.4, AAVhEr2.16, AAVhEr2.30, AAVhEr2.31, AAVhEr2.36, AAVhER1.23, AAVhEr3.1, AAV2.5T, AAV-PAEC, AAV-LK01, AAV-LK02, AAV-LK03, AAV-LK04, AAV-LK05, AAV-LK06, AAV-LK07, AAV-LK08, AAV-LK09, AAV-LK10, AAV-LK11, AAV-LK12, AAV-LK13, AAV-LK14, AAV-LK15, AAV-LK16, AAV-LK17, AAV-LK18, AAV-LK19, AAV-PAEC2, AAV-PAEC4, AAV-PAEC6, AAV-PAEC7, AAV-PAEC8, AAV-PAEC11, AAV-PAEC12, AAV-2-pre-miRNA-101, AAV-8h, AAV-8b, AAV-h, AAV-b, AAV SM 10-2, AAV Shuffle 100-1, AAV Shuffle 100-3, AAV Shuffle 100-7, AAV Shuffle 10-2, AAV Shuffle 10-6, AAV Shuffle 10-8, AAV Shuffle 100-2, AAV SM 10-1, AAV SM 10-8, AAV SM 100-3, AAV SM 100-10, BNP61 AAV, BNP62 AAV, BNP63 AAV, AAVrh.50, AAVrh.43, AAVrh.62, AAVrh.48, AAVhu.19, AAVhu.11, AAVhu.53, AAV4-8/rh.64, AAVLG-9/hu.39, AAV54.5/hu.23, AAV54.2/hu.22, AAV54.7/hu.24, AAV54.1/hu.21, AAV54.4R/hu.27, AAV46.2/hu.28, AAV46.6/hu.29, AAV128.1/hu.43, true type AAV (ttAAV), UPENN AAV 10, Japanese AAV 10 serotypes, AAV CBr-7.1, AAV CBr-7.10, AAV CBr-7.2, AAV CBr-7.3, AAV CBr-7.4, AAV CBr-7.5, AAV CBr-7.7, AAV CBr-7.8, AAV CBr-B7.3, AAV CBr-B7.4, AAV CBr-E1, AAV CBr-E2, AAV CBr-E3, AAV CBr-E4, AAV CBr-E5, AAV CBr-e5, AAV CBr-E6, AAV CBr-E7, AAV CBr-E8, AAV CHt-1, AAV CHt-2, AAV CHt-3, AAV CHt-6.1, AAV CHt-6.10, AAV CHt-6.5, AAV CHt-6.6, AAV CHt-6.7, AAV CHt-6.8, AAV CHt-P1, AAV CHt-P2, AAV CHt-P5, AAV CHt-P6, AAV CHt-P8, AAV CHt-P9, AAV CKd-1, AAV CKd-10, AAV CKd-2, AAV CKd-3, AAV CKd-4, AAV CKd-6, AAV CKd-7, AAV CKd-8, AAV CKd-B1, AAV CKd-B2, AAV CKd-B3, AAV CKd-B4, AAV CKd-B5, AAV CKd-B6, AAV CKd-B7, AAV CKd-B8, AAV CKd-H1, AAV CKd-H2, AAV CKd-H3, AAV CKd-H4, AAV CKd-H5, AAV CKd-H6, AAV CKd-N3, AAV CKd-N4, AAV CKd-N9, AAV CLg-F1, AAV CLg-F2, AAV CLg-F3, AAV CLg-F4, AAV CLg-F5, AAV CLg-F6, AAV CLg-F7, AAV CLg-F8, AAV CLv-1, AAV CLv1-1, AAV Clv1-10, AAV CLv1-2, AAV CLv-12, AAV CLv1-3, AAV CLv-13, AAV CLv1-4, AAV Clv1-7, AAV Clv1-8, AAV Clv1-9, AAV CLv-2, AAV CLv-3, AAV CLv-4, AAV CLv-6, AAV CLv-8, AAV CLv-D1, AAV CLv-D2, AAV CLv-D3, AAV CLv-D4, AAV CLv-D5, AAV CLv-D6, AAV CLv-D7, AAV CLv-D8, AAV CLv-E1, AAV CLv-K1, AAV CLv-K3, AAV CLv-K6, AAV CLv-L4, AAV CLv-L5, AAV CLv-L6, AAV CLv-M1, AAV CLv-M11, AAV CLv-M2, AAV CLv-M5, AAV CLv-M6, AAV CLv-M7, AAV CLv-M8, AAV CLv-M9, AAV CLv-R1, AAV CLv-R2, AAV CLv-R3, AAV CLv-R4, AAV CLv-R5, AAV CLv-R6, AAV CLv-R7, AAV CLv-R8, AAV CLv-R9, AAV CSp-1, AAV CSp-10, AAV CSp-11, AAV CSp-2, AAV CSp-3, AAV CSp-4, AAV CSp-6, AAV CSp-7, AAV CSp-8, AAV CSp-8.10, AAV CSp-8.2, AAV CSp-8.4, AAV CSp-8.5, AAV CSp-8.6, AAV CSp-8.7, AAV CSp-8.8, AAV CSp-8.9, AAV CSp-9, AAV.hu.48R3, AAV.VR-355, AAV3B, AAV4, AAV5, AAVF1/HSC1, AAVF11/HSC11, AAVF12/HSC12, AAVF13/HSC13, AAVF14/HSC14, AAVF15/HSC15, AAVF16/HSC16, AAVF17/HSC17, AAVF2/HSC2, AAVF3/HSC3, AAVF4/HSC4, AAVF5/HSC5, AAVF6/HSC6, AAVF7/HSC7, AAVF8/HSC8, AAVF9/HSC9, AAV-PHP.B (PHP.B), AAV-PHP.A (PHP.A), G2B-26, G2B-13, TH1.1-32, TH1.1-35, AAVPHP.B2, AAVPHP.B3, AAVPHP.N/PHP.B-DGT, AAVPHP.B-EST, AAVPHP.B-GGT, AAVPHP.B-ATP, AAVPHP.B-ATT-T, AAVPHP.B-DGT-T, AAVPHP.B-GGT-T, AAVPHP.B-SGS, AAVPHP.B-AQP, AAVPHP.B-QQP, AAVPHP.B-SNP(3), AAVPHP.B-SNP, AAVPHP.B-QGT, AAVPHP.B-NQT, AAVPHP.B-EGS, AAVPHP.B-SGN, AAVPHP.B-EGT, AAVPHP.B-DST, AAVPHP.B-DST, AAVPHP.B-STP, AAVPHP.B-PQP, AAVPHP.B-SQP, AAVPHP.B-QLP, AAVPHP.B-TMP, AAVPHP.B-TTP, AAVPHP.S/G2A12, AAVG2A15/G2A3, AAVG2B4, AAVG2B5 and variants thereof.

[0067] In some embodiments, the AAV serotype may be, or have, a sequence as described in United States Publication No. US20030138772, the contents of which are herein incorporated by reference in their entirety, such as, but not limited to, AAV1 (SEQ ID NO: 6 and 64 of US20030138772), AAV2 (SEQ ID NO: 7 and 70 of US20030138772), AAV3 (SEQ ID NO: 8 and 71 of US20030138772), AAV4 (SEQ ID NO: 63 of US20030138772), AAV5 (SEQ ID NO: 114 of US20030138772), AAV6 (SEQ ID NO: 65 of US20030138772), AAV7 (SEQ ID NO: 1-3 of US20030138772), AAV8 (SEQ ID NO: 4 and 95 of US20030138772), AAV9 (SEQ ID NO: 5 and 100 of US20030138772), AAV10 (SEQ ID NO: 117 of US20030138772), AAV11 (SEQ ID NO: 118 of US20030138772), AAV12 (SEQ ID NO: 119 of US20030138772), AAVrh10 (amino acids 1 to 738 of SEQ ID NO: 81 of US20030138772), AAV16.3 (US20030138772 SEQ ID NO: 10), AAV29.3/bb.1 (US20030138772 SEQ ID NO: 11), AAV29.4 (US20030138772 SEQ ID NO: 12), AAV29.5/bb.2 (US20030138772 SEQ ID NO: 13), AAV1.3 (US20030138772 SEQ ID NO: 14), AAV13.3 (US20030138772 SEQ ID NO: 15), AAV24.1 (US20030138772 SEQ ID NO: 16), AAV27.3 (US20030138772 SEQ ID NO: 17), AAV7.2 (US20030138772 SEQ ID NO: 18), AAVC1 (US20030138772 SEQ ID NO: 19), AAVC3 (US20030138772 SEQ ID NO: 20), AAVC5 (US20030138772 SEQ ID NO: 21), AAVF1 (US20030138772 SEQ ID NO: 22), AAVF3 (US20030138772 SEQ ID NO: 23), AAVF5 (US20030138772 SEQ ID NO: 24), AAVH6 (US20030138772 SEQ ID NO: 25), AAVH2 (US20030138772 SEQ ID NO: 26), AAV42-8 (US20030138772 SEQ ID NO: 27), AAV42-15 (US20030138772 SEQ ID NO: 28), AAV42-5b (US20030138772 SEQ ID NO: 29), AAV42-1b (US20030138772 SEQ ID NO: 30), AAV42-13 (US20030138772 SEQ ID NO: 31), AAV42-3a (US20030138772 SEQ ID NO: 32), AAV42-4 (US20030138772 SEQ ID NO: 33), AAV42-5a (US20030138772 SEQ ID NO: 34), AAV42-10 (US20030138772 SEQ ID NO: 35), AAV42-3b (US20030138772 SEQ ID NO: 36), AAV42-11 (US20030138772 SEQ ID NO: 37), AAV42-6b (US20030138772 SEQ ID NO: 38), AAV43-1 (US20030138772 SEQ ID NO: 39), AAV43-5 (US20030138772 SEQ ID NO: 40), AAV43-12 (US20030138772 SEQ ID NO: 41), AAV43-20 (US20030138772 SEQ ID NO: 42), AAV43-21 (US20030138772 SEQ ID NO: 43), AAV43-23 (US20030138772 SEQ ID NO: 44), AAV43-25 (US20030138772 SEQ ID NO: 45), AAV44.1 (US20030138772 SEQ ID NO: 46), AAV44.5 (US20030138772 SEQ ID NO: 47), AAV223.1 (US20030138772 SEQ ID NO: 48), AAV223.2 (US20030138772 SEQ ID NO: 49), AAV223.4 (US20030138772 SEQ ID NO: 50), AAV223.5 (US20030138772 SEQ ID NO: 51), AAV223.6 (US20030138772 SEQ ID NO: 52), AAV223.7 (US20030138772 SEQ ID NO: 53), AAVA3.4 (US20030138772 SEQ ID NO: 54), AAVA3.5 (US20030138772 SEQ ID NO: 55), AAVA3.7 (US20030138772 SEQ ID NO: 56), AAVA3.3 (US20030138772 SEQ ID NO: 57), AAV42.12 (US20030138772 SEQ ID NO: 58), AAV44.2 (US20030138772 SEQ ID NO: 59), AAV42-2 (US20030138772 SEQ ID NO: 9), or variants thereof.

[0068] In some embodiments, the AAV serotype may be, or have, a sequence as described in United States Publication No. US20150159173, the contents of which are herein incorporated by reference in their entirety, such as, but not limited to, AAV2 (SEQ ID NO: 7 and 23 of US20150159173), rh20 (SEQ ID NO: 1 of US20150159173), rh32/33 (SEQ ID NO: 2 of US20150159173), rh39 (SEQ ID NO: 3, 20 and 36 of US20150159173), rh46 (SEQ ID NO: 4 and 22 of US20150159173), rh73 (SEQ ID NO: 5 of US20150159173), rh74 (SEQ ID NO: 6 of US20150159173), AAV6.1 (SEQ ID NO: 29 of US20150159173), rh.8 (SEQ ID NO: 41 of US20150159173), rh.48.1 (SEQ ID NO: 44 of US20150159173), hu.44 (SEQ ID NO: 45 of US20150159173), hu.29 (SEQ ID NO: 42 of US20150159173), hu.48 (SEQ ID NO: 38 of US20150159173), rh54 (SEQ ID NO: 49 of US20150159173), AAV2 (SEQ ID NO: 7 of US20150159173), cy.5 (SEQ ID NO: 8 and 24 of US20150159173), rh.10 (SEQ ID NO: 9 and 25 of US20150159173), rh.13 (SEQ ID NO: 10 and 26 of US20150159173), AAV1 (SEQ ID NO: 11 and 27 of US20150159173), AAV3 (SEQ ID NO: 12 and 28 of US20150159173), AAV6 (SEQ ID NO: 13 and 29 of US20150159173), AAV7 (SEQ ID NO: 14 and 30 of US20150159173), AAV8 (SEQ ID NO: 15 and 31 of US20150159173), hu.13 (SEQ ID NO: 16 and 32 of US20150159173), hu.26 (SEQ ID NO: 17 and 33 of US20150159173), hu.37 (SEQ ID NO: 18 and 34 of US20150159173), hu.53 (SEQ ID NO: 19 and 35 of US20150159173), rh.43 (SEQ ID NO: 21 and 37 of US20150159173), rh2 (SEQ ID NO: 39 of US20150159173), rh.37 (SEQ ID NO: 40 of US20150159173), rh.64 (SEQ ID NO: 43 of US20150159173), rh.48 (SEQ ID NO: 44 of US20150159173), ch.5 (SEQ ID NO 46 of US20150159173), rh.67 (SEQ ID NO: 47 of US20150159173), rh.58 (SEQ ID NO: 48 of US20150159173), or variants thereof including, but not limited to Cy5R1, Cy5R2, Cy5R3, Cy5R4, rh.13R, rh.37R2, rh.2R, rh.8R, rh.48.1, rh.48.2, rh.48.1.2, hu.44R1, hu.44R2, hu.44R3, hu.29R, ch.5R1, rh64R1, rh64R2, AAV6.2, AAV6.1, AAV6.12, hu.48R1, hu.48R2, and hu.48R3.

[0069] In some embodiments, the AAV serotype may be, or have, a sequence as described in U.S. Pat. No. 7,198,951, the contents of which are herein incorporated by reference in their entirety, such as, but not limited to, AAV9 (SEQ ID NO: 1-3 of U.S. Pat. No. 7,198,951), AAV2 (SEQ ID NO: 4 of U.S. Pat. No. 7,198,951), AAV1 (SEQ ID NO: 5 of U.S. Pat. No. 7,198,951), AAV3 (SEQ ID NO: 6 of U.S. Pat. No. 7,198,951), and AAV8 (SEQ ID NO: 7 of U.S. Pat. No. 7,198,951).

[0070] In some embodiments, the AAV serotype may be, or have, a mutation in the AAV9 sequence as described by N Pulicherla et al. (Molecular Therapy 19(6):1070-1078 (2011), herein incorporated by reference in its entirety), such as but not limited to, AAV9.9, AAV9.11, AAV9.13, AAV9.16, AAV9.24, AAV9.45, AAV9.47, AAV9.61, AAV9.68, AAV9.84.

[0071] In some embodiments, the AAV serotype may be, or have, a sequence as described in U.S. Pat. No. 6,156,303, the contents of which are herein incorporated by reference in their entirety, such as, but not limited to, AAV3B (SEQ ID NO: 1 and 10 of U.S. Pat. No. 6,156,303), AAV6 (SEQ ID NO: 2, 7 and 11 of U.S. Pat. No. 6,156,303), AAV2 (SEQ ID NO: 3 and 8 of U.S. Pat. No. 6,156,303), AAV3A (SEQ ID NO: 4 and 9, of U.S. Pat. No. 6,156,303), or derivatives thereof.

[0072] In some embodiments, the AAV serotype may be, or have, a sequence as described in United States Publication No. US20140359799, the contents of which are herein incorporated by reference in their entirety, such as, but not limited to, AAV8 (SEQ ID NO: 1 of US20140359799), AAVDJ (SEQ ID NO: 2 and 3 of US20140359799), or variants thereof.

[0073] In some embodiments, the serotype may be AAVDJ (or AAV-DJ) or a variant thereof, such as AAVDJ8 (or AAV-DJ8), as described by Grimm et al. (Journal of Virology 82(12): 5887-5911 (2008), herein incorporated by reference in its entirety). The amino acid sequence of AAVDJ8 may comprise two or more mutations in order to remove the heparin binding domain (HBD). As a non-limiting example, the AAV-DJ sequence described as SEQ ID NO: 1 in U.S. Pat. No. 7,588,772, the contents of which are herein incorporated by reference in their entirety, may comprise two mutations: (1) R587Q where arginine (R; Arg) at amino acid 587 is changed to glutamine (Q; Gln) and (2) R590T where arginine (R; Arg) at amino acid 590 is changed to threonine (T; Thr). As another non-limiting example, may comprise three mutations: (1) K406R where lysine (K; Lys) at amino acid 406 is changed to arginine (R; Arg), (2) R587Q where arginine (R; Arg) at amino acid 587 is changed to glutamine (Q; Gln) and (3) R590T where arginine (R; Arg) at amino acid 590 is changed to threonine (T; Thr).

[0074] In some embodiments, the AAV serotype may be, or have, a sequence of AAV4 as described in International Publication No. WO1998011244, the contents of which are herein incorporated by reference in their entirety, such as, but not limited to AAV4 (SEQ ID NO: 1-20 of WO1998011244).

[0075] In some embodiments, the AAV serotype may be, or have, a mutation in the AAV2 sequence to generate AAV2G9 as described in International Publication No. WO2014144229 and herein incorporated by reference in its entirety.

[0076] In some embodiments, the AAV serotype may be, or have, a sequence as described in International Publication No. WO2005033321, the contents of which are herein incorporated by reference in their entirety, such as, but not limited to AAV3-3 (SEQ ID NO: 217 of WO2005033321), AAV1 (SEQ ID NO: 219 and 202 of WO2005033321), AAV106.1/hu.37 (SEQ ID No: 10 of WO2005033321), AAV114.3/hu.40 (SEQ ID No: 11 of WO2005033321), AAV127.2/hu.41 (SEQ ID NO:6 and 8 of WO2005033321), AAV128.3/hu.44 (SEQ ID No: 81 of WO2005033321), AAV130.4/hu.48 (SEQ ID NO: 78 of WO2005033321), AAV145.1/hu.53 (SEQ ID No: 176 and 177 of WO2005033321), AAV145.6/hu.56 (SEQ ID NO: 168 and 192 of WO2005033321), AAV16.12/hu.11 (SEQ ID NO: 153 and 57 of WO2005033321), AAV16.8/hu.10 (SEQ ID NO: 156 and 56 of WO2005033321), AAV161.10/hu.60 (SEQ ID No: 170 of WO2005033321), AAV161.6/hu.61 (SEQ ID No: 174 of WO2005033321), AAV1-7/rh.48 (SEQ ID NO: 32 of WO2005033321), AAV1-8/rh.49 (SEQ ID NOs: 103 and 25 of WO2005033321), AAV2 (SEQ ID NO: 211 and 221 of WO2005033321), AAV2-15/rh.62 (SEQ ID No: 33 and 114 of WO2005033321), AAV2-3/rh.61 (SEQ ID NO: 21 of WO2005033321), AAV2-4/rh.50 (SEQ ID No: 23 and 108 of WO2005033321), AAV2-5/rh.51 (SEQ ID NO: 104 and 22 of WO2005033321), AAV3.1/hu.6 (SEQ ID NO: 5 and 84 of WO2005033321), AAV3.1/hu.9 (SEQ ID NO: 155 and 58 of WO2005033321), AAV3-11/rh.53 (SEQ ID NO: 186 and 176 of WO2005033321), AAV3-3 (SEQ ID NO: 200 of WO2005033321), AAV33.12/hu.17 (SEQ ID NO:4 of WO2005033321), AAV33.4/hu.15 (SEQ ID No: 50 of WO2005033321), AAV33.8/hu.16 (SEQ ID No: 51 of WO2005033321), AAV3-9/rh.52 (SEQ ID NO: 96 and 18 of WO2005033321), AAV4-19/rh.55 (SEQ ID NO: 117 of WO2005033321), AAV4-4 (SEQ ID NO: 201 and 218 of WO2005033321), AAV4-9/rh.54 (SEQ ID NO: 116 of WO2005033321), AAV5 (SEQ ID NO: 199 and 216 of WO2005033321), AAV52.1/hu.20 (SEQ ID NO: 63 of WO2005033321), AAV52/hu.19 (SEQ ID NO: 133 of WO2005033321), AAV5-22/rh.58 (SEQ ID No: 27 of WO2005033321), AAV5-3/rh.57 (SEQ ID NO: 105 of WO2005033321), AAV5-3/rh.57 (SEQ ID No: 26 of WO2005033321), AAV58.2/hu.25 (SEQ ID No: 49 of WO2005033321), AAV6 (SEQ ID NO: 203 and 220 of WO2005033321), AAV7 (SEQ ID NO: 222 and 213 of WO2005033321), AAV7.3/hu.7 (SEQ ID No: 55 of WO2005033321), AAV8 (SEQ ID NO: 223 and 214 of WO2005033321), AAVH-1/hu.1 (SEQ ID No: 46 of WO2005033321), AAVH-5/hu.3 (SEQ ID No: 44 of WO2005033321), AAVhu.1 (SEQ ID NO: 144 of WO2005033321), AAVhu.10 (SEQ ID NO: 156 of WO2005033321), AAVhu.11 (SEQ ID NO: 153 of WO2005033321), AAVhu.12 (WO2005033321 SEQ ID NO: 59), AAVhu.13 (SEQ ID NO: 129 of WO2005033321), AAVhu.14/AAV9 (SEQ ID NO: 123 and 3 of WO2005033321), AAVhu.15 (SEQ ID NO: 147 of WO2005033321), AAVhu.16 (SEQ ID NO: 148 of WO2005033321), AAVhu.17 (SEQ ID NO: 83 of WO2005033321), AAVhu.18 (SEQ ID NO: 149 of WO2005033321), AAVhu.19 (SEQ ID NO: 133 of WO2005033321), AAVhu.2 (SEQ ID NO: 143 of WO2005033321), AAVhu.20 (SEQ ID NO: 134 of WO2005033321), AAVhu.21 (SEQ ID NO: 135 of WO2005033321), AAVhu.22 (SEQ ID NO: 138 of WO2005033321), AAVhu.23.2 (SEQ ID NO: 137 of WO2005033321), AAVhu.24 (SEQ ID NO: 136 of WO2005033321), AAVhu.25 (SEQ ID NO: 146 of WO2005033321), AAVhu.27 (SEQ ID NO: 140 of WO2005033321), AAVhu.29 (SEQ ID NO: 132 of WO2005033321), AAVhu.3 (SEQ ID NO: 145 of WO2005033321), AAVhu.31 (SEQ ID NO: 121 of WO2005033321), AAVhu.32 (SEQ ID NO: 122 of WO2005033321), AAVhu.34 (SEQ ID NO: 125 of WO2005033321), AAVhu.35 (SEQ ID NO: 164 of WO2005033321), AAVhu.37 (SEQ ID NO: 88 of WO2005033321), AAVhu.39 (SEQ ID NO: 102 of WO2005033321), AAVhu.4 (SEQ ID NO: 141 of WO2005033321), AAVhu.40 (SEQ ID NO: 87 of WO2005033321), AAVhu.41 (SEQ ID NO: 91 of WO2005033321), AAVhu.42 (SEQ ID NO: 85 of WO2005033321), AAVhu.43 (SEQ ID NO: 160 of WO2005033321), AAVhu.44 (SEQ ID NO: 144 of WO2005033321), AAVhu.45 (SEQ ID NO: 127 of WO2005033321), AAVhu.46 (SEQ ID NO: 159 of WO2005033321), AAVhu.47 (SEQ ID NO: 128 of WO2005033321), AAVhu.48 (SEQ ID NO: 157 of WO2005033321), AAVhu.49 (SEQ ID NO: 189 of WO2005033321), AAVhu.51 (SEQ ID NO: 190 of WO2005033321), AAVhu.52 (SEQ ID NO: 191 of WO2005033321), AAVhu.53 (SEQ ID NO: 186 of WO2005033321), AAVhu.54 (SEQ ID NO: 188 of WO2005033321), AAVhu.55 (SEQ ID NO: 187 of WO2005033321), AAVhu.56 (SEQ ID NO: 192 of WO2005033321), AAVhu.57 (SEQ ID NO: 193 of WO2005033321), AAVhu.58 (SEQ ID NO: 194 of WO2005033321), AAVhu.6 (SEQ ID NO: 84 of WO2005033321), AAVhu.60 (SEQ ID NO: 184 of WO2005033321), AAVhu.61 (SEQ ID NO: 185 of WO2005033321), AAVhu.63 (SEQ ID NO: 195 of WO2005033321), AAVhu.64 (SEQ ID NO: 196 of WO2005033321), AAVhu.66 (SEQ ID NO: 197 of WO2005033321), AAVhu.67 (SEQ ID NO: 198 of WO2005033321), AAVhu.7 (SEQ ID NO: 150 of WO2005033321), AAVhu.8 (WO2005033321 SEQ ID NO: 12), AAVhu.9 (SEQ ID NO: 155 of WO2005033321), AAVLG-10/rh.40 (SEQ ID No: 14 of WO2005033321), AAVLG-4/rh.38 (SEQ ID NO: 86 of WO2005033321), AAVLG-4/rh.38 (SEQ ID No: 7 of WO2005033321), AAVN721-8/rh.43 (SEQ ID NO: 163 of WO2005033321), AAVN721-8/rh.43 (SEQ ID No: 43 of WO2005033321), AAVpi.1 (WO2005033321 SEQ ID NO: 28), AAVpi.2 (WO2005033321 SEQ ID NO: 30), AAVpi.3 (WO2005033321 SEQ ID NO: 29), AAVrh.38 (SEQ ID NO: 86 of WO2005033321), AAVrh.40 (SEQ ID NO: 92 of WO2005033321), AAVrh.43 (SEQ ID NO: 163 of WO2005033321), AAVrh.44 (WO2005033321 SEQ ID NO: 34), AAVrh.45 (WO2005033321 SEQ ID NO: 41), AAVrh.47 (WO2005033321 SEQ ID NO: 38), AAVrh.48 (SEQ ID NO: 115 of WO2005033321), AAVrh.49 (SEQ ID NO: 103 of WO2005033321), AAVrh.50 (SEQ ID NO: 108 of WO2005033321), AAVrh.51 (SEQ ID NO: 104 of WO2005033321), AAVrh.52 (SEQ ID NO: 96 of WO2005033321), AAVrh.53 (SEQ ID NO: 97 of WO2005033321), AAVrh.55 (WO2005033321 SEQ ID NO: 37), AAVrh.56 (SEQ ID NO: 152 of WO2005033321), AAVrh.57 (SEQ ID NO: 105 of WO2005033321), AAVrh.58 (SEQ ID NO: 106 of WO2005033321), AAVrh.59 (WO2005033321 SEQ ID NO: 42), AAVrh.60 (WO2005033321 SEQ ID NO: 31), AAVrh.61 (SEQ ID NO: 107 of WO2005033321), AAVrh.62 (SEQ ID NO: 114 of WO2005033321), AAVrh.64 (SEQ ID NO: 99 of WO2005033321), AAVrh.65 (WO2005033321 SEQ ID NO: 35), AAVrh.68 (WO2005033321 SEQ ID NO: 16), AAVrh.69 (WO2005033321 SEQ ID NO: 39), AAVrh.70 (WO2005033321 SEQ ID NO: 20), AAVrh.72 (WO2005033321 SEQ ID NO: 9), or variants thereof including, but not limited to, AAVcy.2, AAVcy.3, AAVcy.4, AAVcy.5, AAVcy.6, AAVrh.12, AAVrh.17, AAVrh.18, AAVrh.19, AAVrh.21, AAVrh.22, AAVrh.23, AAVrh.24, AAVrh.25, AAVrh.25/42 15, AAVrh.31, AAVrh.32, AAVrh.33, AAVrh.34, AAVrh.35, AAVrh.36, AAVrh.37, AAVrh14. Non limiting examples of variants include SEQ ID NO: 13, 15, 17, 19, 24, 36, 40, 45, 47, 48, 51-54, 60-62, 64-77, 79, 80, 82, 89, 90, 93-95, 98, 100, 101, 109-113, 118-120, 124, 126, 131, 139, 142, 151,154, 158, 161, 162, 165-183, 202, 204-212, 215, 219, 224-236, of WO2005033321, the contents of which are herein incorporated by reference in their entirety.

[0077] In some embodiments, the AAV serotype may be, or have, a sequence as described in International Publication No. WO2015168666, the contents of which are herein incorporated by reference in their entirety, such as, but not limited to, AAVrh8R (SEQ ID NO: 9 of WO2015168666), AAVrh8R A586R mutant (SEQ ID NO: 10 of WO2015168666), AAVrh8R R533A mutant (SEQ ID NO: 11 of WO2015168666), or variants thereof.

[0078] In some embodiments, the AAV serotype may be, or have, a sequence as described in U.S. Pat. No. 9,233,131, the contents of which are herein incorporated by reference in their entirety, such as, but not limited to, AAVhE1.1 (SEQ ID NO:44 of U.S. Pat. No. 9,233,131), AAVhEr1.5 (SEQ ID NO:45 of U.S. Pat. No. 9,233,131), AAVhER1.14 (SEQ ID NO:46 of U.S. Pat. No. 9,233,131), AAVhEr1.8 (SEQ ID NO:47 of U.S. Pat. No. 9,233,131), AAVhEr1.16 (SEQ ID NO:48 of U.S. Pat. No. 9,233,131), AAVhEr1.18 (SEQ ID NO:49 of U.S. Pat. No. 9,233,131), AAVhEr1.35 (SEQ ID NO:50 of U.S. Pat. No. 9,233,131), AAVhEr1.7 (SEQ ID NO:51 of U.S. Pat. No. 9,233,131), AAVhEr1.36 (SEQ ID NO:52 of U.S. Pat. No. 9,233,131), AAVhEr2.29 (SEQ ID NO:53 of U.S. Pat. No. 9,233,131), AAVhEr2.4 (SEQ ID NO:54 of U.S. Pat. No. 9,233,131), AAVhEr2.16 (SEQ ID NO:55 of U.S. Pat. No. 9,233,131), AAVhEr2.30 (SEQ ID NO:56 of U.S. Pat. No. 9,233,131), AAVhEr2.31 (SEQ ID NO:58 of U.S. Pat. No. 9,233,131), AAVhEr2.36 (SEQ ID NO:57 of U.S. Pat. No. 9,233,131), AAVhER1.23 (SEQ ID NO:53 of U.S. Pat. No. 9,233,131), AAVhEr3.1 (SEQ ID NO:59 of U.S. Pat. No. 9,233,131), AAV2.5T (SEQ ID NO:42 of U.S. Pat. No. 9,233,131), or variants thereof.

[0079] In some embodiments, the AAV serotype may be, or have, a sequence as described in United States Patent Publication No. US20150376607, the contents of which are herein incorporated by reference in their entirety, such as, but not limited to, AAV-PAEC (SEQ ID NO:1 of US20150376607), AAV-LK01 (SEQ ID NO:2 of US20150376607), AAV-LK02 (SEQ ID NO:3 of US20150376607), AAV-LK03 (SEQ ID NO:4 of US20150376607), AAV-LK04 (SEQ ID NO:5 of US20150376607), AAV-LK05 (SEQ ID NO:6 of US20150376607), AAV-LK06 (SEQ ID NO:7 of US20150376607), AAV-LK07 (SEQ ID NO:8 of US20150376607), AAV-LK08 (SEQ ID NO:9 of US20150376607), AAV-LK09 (SEQ ID NO:10 of US20150376607), AAV-LK10 (SEQ ID NO:11 of US20150376607), AAV-LK11 (SEQ ID NO:12 of US20150376607), AAV-LK12 (SEQ ID NO:13 of US20150376607), AAV-LK13 (SEQ ID NO:14 of US20150376607), AAV-LK14 (SEQ ID NO:15 of US20150376607), AAV-LK15 (SEQ ID NO:16 of US20150376607), AAV-LK16 (SEQ ID NO:17 of US20150376607), AAV-LK17 (SEQ ID NO:18 of US20150376607), AAV-LK18 (SEQ ID NO:19 of US20150376607), AAV-LK19 (SEQ ID NO:20 of US20150376607), AAV-PAEC2 (SEQ ID NO:21 of US20150376607), AAV-PAEC4 (SEQ ID NO:22 of US20150376607), AAV-PAEC6 (SEQ ID NO:23 of US20150376607), AAV-PAEC7 (SEQ ID NO:24 of US20150376607), AAV-PAEC8 (SEQ ID NO:25 of US20150376607), AAV-PAEC11 (SEQ ID NO:26 of US20150376607), AAV-PAEC12 (SEQ ID NO:27, of US20150376607), or variants thereof.

[0080] In some embodiments, the AAV serotype may be, or have, a sequence as described in U.S. Pat. No. 9,163,261, the contents of which are herein incorporated by reference in their entirety, such as, but not limited to, AAV-2-pre-miRNA-101 (SEQ ID NO: 1 U.S. Pat. No. 9,163,261), or variants thereof.

[0081] In some embodiments, the AAV serotype may be, or have, a sequence as described in United States Patent Publication No. US20150376240, the contents of which are herein incorporated by reference in their entirety, such as, but not limited to, AAV-8h (SEQ ID NO: 6 of US20150376240), AAV-8b (SEQ ID NO: 5 of US20150376240), AAV-h (SEQ ID NO: 2 of US20150376240), AAV-b (SEQ ID NO: 1 of US20150376240), or variants thereof.

[0082] In some embodiments, the AAV serotype may be, or have, a sequence as described in United States Patent Publication No. US20160017295, the contents of which are herein incorporated by reference in their entirety, such as, but not limited to, AAV SM 10-2 (SEQ ID NO: 22 of US20160017295), AAV Shuffle 100-1 (SEQ ID NO: 23 of US20160017295), AAV Shuffle 100-3 (SEQ ID NO: 24 of US20160017295), AAV Shuffle 100-7 (SEQ ID NO: 25 of US20160017295), AAV Shuffle 10-2 (SEQ ID NO: 34 of US20160017295), AAV Shuffle 10-6 (SEQ ID NO: 35 of US20160017295), AAV Shuffle 10-8 (SEQ ID NO: 36 of US20160017295), AAV Shuffle 100-2 (SEQ ID NO: 37 of US20160017295), AAV SM 10-1 (SEQ ID NO: 38 of US20160017295), AAV SM 10-8 (SEQ ID NO: 39 of US20160017295), AAV SM 100-3 (SEQ ID NO: 40 of US20160017295), AAV SM 100-10 (SEQ ID NO: 41 of US20160017295), or variants thereof.

[0083] In some embodiments, the AAV serotype may be, or have, a sequence as described in United States Patent Publication No. US20150238550, the contents of which are herein incorporated by reference in their entirety, such as, but not limited to, BNP61 AAV (SEQ ID NO: 1 of US20150238550), BNP62 AAV (SEQ ID NO: 3 of US20150238550), BNP63 AAV (SEQ ID NO: 4 of US20150238550), or variants thereof.

[0084] In some embodiments, the AAV serotype may be or may have a sequence as described in United States Patent Publication No. US20150315612, the contents of which are herein incorporated by reference in their entirety, such as, but not limited to, AAVrh.50 (SEQ ID NO: 108 of US20150315612), AAVrh.43 (SEQ ID NO: 163 of US20150315612), AAVrh.62 (SEQ ID NO: 114 of US20150315612), AAVrh.48 (SEQ ID NO: 115 of US20150315612), AAVhu.19 (SEQ ID NO: 133 of US20150315612), AAVhu.11 (SEQ ID NO: 153 of US20150315612), AAVhu.53 (SEQ ID NO: 186 of US20150315612), AAV4-8/rh.64 (SEQ ID No: 15 of US20150315612), AAVLG-9/hu.39 (SEQ ID No: 24 of US20150315612), AAV54.5/hu.23 (SEQ ID No: 60 of US20150315612), AAV54.2/hu.22 (SEQ ID No: 67 of US20150315612), AAV54.7/hu.24 (SEQ ID No: 66 of US20150315612), AAV54.1/hu.21 (SEQ ID No: 65 of US20150315612), AAV54.4R/hu.27 (SEQ ID No: 64 of US20150315612), AAV46.2/hu.28 (SEQ ID No: 68 of US20150315612), AAV46.6/hu.29 (SEQ ID No: 69 of US20150315612), AAV128.1/hu.43 (SEQ ID No: 80 of US20150315612), or variants thereof.

[0085] In some embodiments, the AAV serotype may be, or have, a sequence as described in International Publication No. WO2015121501, the contents of which are herein incorporated by reference in their entirety, such as, but not limited to, true type AAV (ttAAV) (SEQ ID NO: 2 of WO2015121501), “UPenn AAV10” (SEQ ID NO: 8 of WO2015121501), “Japanese AAV10” (SEQ ID NO: 9 of WO2015121501), or variants thereof.

[0086] According to the present invention, AAV capsid serotype selection or use may be from a variety of species. In one embodiment, the AAV may be an avian AAV (AAAV). The AAAV serotype may be, or have, a sequence as described in U.S. Pat. No. 9,238,800, the contents of which are herein incorporated by reference in their entirety, such as, but not limited to, AAAV (SEQ ID NO: 1, 2, 4, 6, 8, 10, 12, and 14 of U.S. Pat. No. 9,238,800), or variants thereof.

[0087] In one embodiment, the AAV may be a bovine AAV (BAAV). The BAAV serotype may be, or have, a sequence as described in U.S. Pat. No. 9,193,769, the contents of which are herein incorporated by reference in their entirety, such as, but not limited to, BAAV (SEQ ID NO: 1 and 6 of U.S. Pat. No. 9,193,769), or variants thereof. The BAAV serotype may be or have a sequence as described in U.S. Pat. No. 7,427,396, the contents of which are herein incorporated by reference in their entirety, such as, but not limited to, BAAV (SEQ ID NO: 5 and 6 of U.S. Pat. No. 7,427,396), or variants thereof.

[0088] In one embodiment, the AAV may be a caprine AAV. The caprine AAV serotype may be, or have, a sequence as described in U.S. Pat. No. 7,427,396, the contents of which are herein incorporated by reference in their entirety, such as, but not limited to, caprine AAV (SEQ ID NO: 3 of U.S. Pat. No. 7,427,396), or variants thereof.

[0089] In other embodiments the AAV may be engineered as a hybrid AAV from two or more parental serotypes. In one embodiment, the AAV may be AAV2G9 which comprises sequences from AAV2 and AAV9. The AAV2G9 AAV serotype may be, or have, a sequence as described in United States Patent Publication No. US20160017005, the contents of which are herein incorporated by reference in its entirety.

[0090] In one embodiment, the AAV may be a serotype generated by the AAV9 capsid library with mutations in amino acids 390-627 (VP1 numbering) as described by Pulicherla et al. (Molecular Therapy 19(6):1070-1078 (2011), the contents of which are herein incorporated by reference in their entirety. The serotype and corresponding nucleotide and amino acid substitutions may be, but is not limited to, AAV9.1 (G1594C; D532H), AAV6.2 (T1418A and T1436X; V473D and I479K), AAV9.3 (T1238A; F413Y), AAV9.4 (T1250C and A1617T; F417S), AAV9.5 (A1235G, A1314T, A1642G, C1760T; Q412R, T548A, A587V), AAV9.6 (T1231A; F411I), AAV9.9 (G1203A, G1785T; W595C), AAV9.10 (A1500G, T1676C; M559T), AAV9.11 (A1425T, A1702C, A1769T; T568P, Q590L), AAV9.13 (A1369C, A1720T; N457H, T574S), AAV9.14 (T1340A, T1362C, T1560C, G1713A; L447H), AAV9.16 (A1775T; Q592L), AAV9.24 (T1507C, T1521G; W503R), AAV9.26 (A1337G, A1769C; Y446C, Q590P), AAV9.33 (A1667C; D556A), AAV9.34 (A1534G, C1794T; N512D), AAV9.35 (A1289T, T1450A, C1494T, A1515T, C1794A, G1816A; Q430L, Y484N, N98K, V606I), AAV9.40 (A1694T, E565V), AAV9.41 (A1348T, T1362C; T450S), AAV9.44 (A1684C, A1701T, A1737G; N562H, K567N), AAV9.45 (A1492T, C1804T; N498Y, L602F), AAV9.46 (G1441C, T1525C, T1549G; G481R, W509R, L517V), 9.47 (G1241A, G1358A, A1669G, C1745T; S414N, G453D, K557E, T5821), AAV9.48 (C1445T, A1736T; P482L, Q579L), AAV9.50 (A1638T, C1683T, T1805A; Q546H, L602H), AAV9.53 (G1301A, A1405C, C1664T, G1811T; R134Q, S469R, A555V, G604V), AAV9.54 (C1531A, T1609A; L511I, L537M), AAV9.55 (T1605A; F535L), AAV9.58 (C1475T, C1579A; T492I, H527N), AAV.59 (T1336C; Y446H), AAV9.61 (A1493T; N498I), AAV9.64 (C1531A, A1617T; L511I), AAV9.65 (C1335T, T1530C, C1568A; A523D), AAV9.68 (C1510A; P504T), AAV9.80 (G1441A; G481R), AAV9.83 (C1402A, A1500T; P468T, E500D), AAV9.87 (T1464C, T1468C; S490P), AAV9.90 (A1196T; Y399F), AAV9.91 (T1316G, A1583T, C1782G, T1806C; L439R, K528I), AAV9.93 (A1273G, A1421G, A1638C, C1712T, G1732A, A1744T, A1832T; S425G, Q474R, Q546H, P571L, G578R, T582S, D611V), AAV9.94 (A1675T; M559L) and AAV9.95 (T1605A; F535L).

[0091] In some embodiments, the AAV serotype may be, or have, a sequence as described in International Publication No. WO2016049230, the contents of which are herein incorporated by reference in their entirety, such as, but not limited to AAVF1/HSC1 (SEQ ID NO: 2 and 20 of WO2016049230), AAVF2/HSC2 (SEQ ID NO: 3 and 21 of WO2016049230), AAVF3/HSC3 (SEQ ID NO: 5 and 22 of WO2016049230), AAVF4/HSC4 (SEQ ID NO: 6 and 23 of WO2016049230), AAVF5/HSC5 (SEQ ID NO: 11 and 25 of WO2016049230), AAVF6/HSC6 (SEQ ID NO: 7 and 24 of WO2016049230), AAVF7/HSC7 (SEQ ID NO: 8 and 27 of WO2016049230), AAVF8/HSC8 (SEQ ID NO: 9 and 28 of WO2016049230), AAVF9/HSC9 (SEQ ID NO: 10 and 29 of WO2016049230), AAVF11/HSC11 (SEQ ID NO: 4 and 26 of WO2016049230), AAVF12/HSC12 (SEQ ID NO: 12 and 30 of WO2016049230), AAVF13/HSC13 (SEQ ID NO: 14 and 31 of WO2016049230), AAVF14/HSC14 (SEQ ID NO: 15 and 32 of WO2016049230), AAVF15/HSC15 (SEQ ID NO: 16 and 33 of WO2016049230), AAVF16/HSC16 (SEQ ID NO: 17 and 34 of WO2016049230), AAVF17/HSC17 (SEQ ID NO: 13 and 35 of WO2016049230), or variants or derivatives thereof.

[0092] In some embodiments, the AAV serotype may be, or have, a sequence as described in U.S. Pat. No. 8,734,809, the contents of which are herein incorporated by reference in their entirety, such as, but not limited to, AAV CBr-E1 (SEQ ID NO: 13 and 87 of U.S. Pat. No. 8,734,809), AAV CBr-E2 (SEQ ID NO: 14 and 88 of U.S. Pat. No. 8,734,809), AAV CBr-E3 (SEQ ID NO: 15 and 89 of U.S. Pat. No. 8,734,809), AAV CBr-E4 (SEQ ID NO: 16 and 90 of U.S. Pat. No. 8,734,809), AAV CBr-E5 (SEQ ID NO: 17 and 91 of U.S. Pat. No. 8,734,809), AAV CBr-e5 (SEQ ID NO: 18 and 92 of U.S. Pat. No. 8,734,809), AAV CBr-E6 (SEQ ID NO: 19 and 93 of U.S. Pat. No. 8,734,809), AAV CBr-E7 (SEQ ID NO: 20 and 94 of U.S. Pat. No. 8,734,809), AAV CBr-E8 (SEQ ID NO: 21 and 95 of U.S. Pat. No. 8,734,809), AAV CLv-D1 (SEQ ID NO: 22 and 96 of U.S. Pat. No. 8,734,809), AAV CLv-D2 (SEQ ID NO: 23 and 97 of U.S. Pat. No. 8,734,809), AAV CLv-D3 (SEQ ID NO: 24 and 98 of U.S. Pat. No. 8,734,809), AAV CLv-D4 (SEQ ID NO: 25 and 99 of U.S. Pat. No. 8,734,809), AAV CLv-D5 (SEQ ID NO: 26 and 100 of U.S. Pat. No. 8,734,809), AAV CLv-D6 (SEQ ID NO: 27 and 101 of U.S. Pat. No. 8,734,809), AAV CLv-D7 (SEQ ID NO: 28 and 102 of U.S. Pat. No. 8,734,809), AAV CLv-D8 (SEQ ID NO: 29 and 103 of U.S. Pat. No. 8,734,809), AAV CLv-E1 (SEQ ID NO: 13 and 87 of U.S. Pat. No. 8,734,809), AAV CLv-R1 (SEQ ID NO: 30 and 104 of U.S. Pat. No. 8,734,809), AAV CLv-R2 (SEQ ID NO: 31 and 105 of U.S. Pat. No. 8,734,809), AAV CLv-R3 (SEQ ID NO: 32 and 106 of U.S. Pat. No. 8,734,809), AAV CLv-R4 (SEQ ID NO: 33 and 107 of U.S. Pat. No. 8,734,809), AAV CLv-R5 (SEQ ID NO: 34 and 108 of U.S. Pat. No. 8,734,809), AAV CLv-R6 (SEQ ID NO: 35 and 109 of U.S. Pat. No. 8,734,809), AAV CLv-R7 (SEQ ID NO: 36 and 110 of U.S. Pat. No. 8,734,809), AAV CLv-R8 (SEQ ID NO: 37 and 111 of U.S. Pat. No. 8,734,809), AAV CLv-R9 (SEQ ID NO: 38 and 112 of U.S. Pat. No. 8,734,809), AAV CLg-F1 (SEQ ID NO: 39 and 113 of U.S. Pat. No. 8,734,809), AAV CLg-F2 (SEQ ID NO: 40 and 114 of U.S. Pat. No. 8,734,809), AAV CLg-F3 (SEQ ID NO: 41 and 115 of U.S. Pat. No. 8,734,809), AAV CLg-F4 (SEQ ID NO: 42 and 116 of U.S. Pat. No. 8,734,809), AAV CLg-F5 (SEQ ID NO: 43 and 117 of U.S. Pat. No. 8,734,809), AAV CLg-F6 (SEQ ID NO: 43 and 117 of U.S. Pat. No. 8,734,809), AAV CLg-F7 (SEQ ID NO: 44 and 118 of U.S. Pat. No. 8,734,809), AAV CLg-F8 (SEQ ID NO: 43 and 117 of U.S. Pat. No. 8,734,809), AAV CSp-1 (SEQ ID NO: 45 and 119 of U.S. Pat. No. 8,734,809), AAV CSp-10 (SEQ ID NO: 46 and 120 of U.S. Pat. No. 8,734,809), AAV CSp-11 (SEQ ID NO: 47 and 121 of U.S. Pat. No. 8,734,809), AAV CSp-2 (SEQ ID NO: 48 and 122 of U.S. Pat. No. 8,734,809), AAV CSp-3 (SEQ ID NO: 49 and 123 of U.S. Pat. No. 8,734,809), AAV CSp-4 (SEQ ID NO: 50 and 124 of U.S. Pat. No. 8,734,809), AAV CSp-6 (SEQ ID NO: 51 and 125 of U.S. Pat. No. 8,734,809), AAV CSp-7 (SEQ ID NO: 52 and 126 of U.S. Pat. No. 8,734,809), AAV CSp-8 (SEQ ID NO: 53 and 127 of U.S. Pat. No. 8,734,809), AAV CSp-9 (SEQ ID NO: 54 and 128 of U.S. Pat. No. 8,734,809), AAV CHt-2 (SEQ ID NO: 55 and 129 of U.S. Pat. No. 8,734,809), AAV CHt-3 (SEQ ID NO: 56 and 130 of U.S. Pat. No. 8,734,809), AAV CKd-1 (SEQ ID NO: 57 and 131 of U.S. Pat. No. 8,734,809), AAV CKd-10 (SEQ ID NO: 58 and 132 of U.S. Pat. No. 8,734,809), AAV CKd-2 (SEQ ID NO: 59 and 133 of U.S. Pat. No. 8,734,809), AAV CKd-3 (SEQ ID NO: 60 and 134 of U.S. Pat. No. 8,734,809), AAV CKd-4 (SEQ ID NO: 61 and 135 of U.S. Pat. No. 8,734,809), AAV CKd-6 (SEQ ID NO: 62 and 136 of U.S. Pat. No. 8,734,809), AAV CKd-7 (SEQ ID NO: 63 and 137 of U.S. Pat. No. 8,734,809), AAV CKd-8 (SEQ ID NO: 64 and 138 of U.S. Pat. No. 8,734,809), AAV CLv-1 (SEQ ID NO: 35 and 139 of U.S. Pat. No. 8,734,809), AAV CLv-12 (SEQ ID NO: 66 and 140 of U.S. Pat. No. 8,734,809), AAV CLv-13 (SEQ ID NO: 67 and 141 of U.S. Pat. No. 8,734,809), AAV CLv-2 (SEQ ID NO: 68 and 142 of U.S. Pat. No. 8,734,809), AAV CLv-3 (SEQ ID NO: 69 and 143 of U.S. Pat. No. 8,734,809), AAV CLv-4 (SEQ ID NO: 70 and 144 of U.S. Pat. No. 8,734,809), AAV CLv-6 (SEQ ID NO: 71 and 145 of U.S. Pat. No. 8,734,809), AAV CLv-8 (SEQ ID NO: 72 and 146 of U.S. Pat. No. 8,734,809), AAV CKd-B1 (SEQ ID NO: 73 and 147 of U.S. Pat. No. 8,734,809), AAV CKd-B2 (SEQ ID NO: 74 and 148 of U.S. Pat. No. 8,734,809), AAV CKd-B3 (SEQ ID NO: 75 and 149 of U.S. Pat. No. 8,734,809), AAV CKd-B4 (SEQ ID NO: 76 and 150 of U.S. Pat. No. 8,734,809), AAV CKd-B5 (SEQ ID NO: 77 and 151 of U.S. Pat. No. 8,734,809), AAV CKd-B6 (SEQ ID NO: 78 and 152 of U.S. Pat. No. 8,734,809), AAV CKd-B7 (SEQ ID NO: 79 and 153 of U.S. Pat. No. 8,734,809), AAV CKd-B8 (SEQ ID NO: 80 and 154 of U.S. Pat. No. 8,734,809), AAV CKd-H1 (SEQ ID NO: 81 and 155 of U.S. Pat. No. 8,734,809), AAV CKd-H2 (SEQ ID NO: 82 and 156 of U.S. Pat. No. 8,734,809), AAV CKd-H3 (SEQ ID NO: 83 and 157 of U.S. Pat. No. 8,734,809), AAV CKd-H4 (SEQ ID NO: 84 and 158 of U.S. Pat. No. 8,734,809), AAV CKd-H5 (SEQ ID NO: 85 and 159 of U.S. Pat. No. 8,734,809), AAV CKd-H6 (SEQ ID NO: 77 and 151 of U.S. Pat. No. 8,734,809), AAV CHt-1 (SEQ ID NO: 86 and 160 of U.S. Pat. No. 8,734,809), AAV CLv1-1 (SEQ ID NO: 171 of U.S. Pat. No. 8,734,809), AAV CLv1-2 (SEQ ID NO: 172 of U.S. Pat. No. 8,734,809), AAV CLv1-3 (SEQ ID NO: 173 of U.S. Pat. No. 8,734,809), AAV CLv1-4 (SEQ ID NO: 174 of U.S. Pat. No. 8,734,809), AAV Clv1-7 (SEQ ID NO: 175 of U.S. Pat. No. 8,734,809), AAV Clv1-8 (SEQ ID NO: 176 of U.S. Pat. No. 8,734,809), AAV Clv1-9 (SEQ ID NO: 177 of U.S. Pat. No. 8,734,809), AAV Clv1-10 (SEQ ID NO: 178 of U.S. Pat. No. 8,734,809), AAV.VR-355 (SEQ ID NO: 181 of U.S. Pat. No. 8,734,809), AAV.hu.48R3 (SEQ ID NO: 183 of U.S. Pat. No. 8,734,809), or variants or derivatives thereof.

[0093] In some embodiments, the AAV serotype may be, or have, a sequence as described in International Publication No. WO2016065001, the contents of which are herein incorporated by reference in their entirety, such as, but not limited to AAV CHt-P2 (SEQ ID NO: 1 and 51 of WO2016065001), AAV CHt-P5 (SEQ ID NO: 2 and 52 of WO2016065001), AAV CHt-P9 (SEQ ID NO: 3 and 53 of WO2016065001), AAV CBr-7.1 (SEQ ID NO: 4 and 54 of WO2016065001), AAV CBr-7.2 (SEQ ID NO: 5 and 55 of WO2016065001), AAV CBr-7.3 (SEQ ID NO: 6 and 56 of WO2016065001), AAV CBr-7.4 (SEQ ID NO: 7 and 57 of WO2016065001), AAV CBr-7.5 (SEQ ID NO: 8 and 58 of WO2016065001), AAV CBr-7.7 (SEQ ID NO: 9 and 59 of WO2016065001), AAV CBr-7.8 (SEQ ID NO: 10 and 60 of WO2016065001), AAV CBr-7.10 (SEQ ID NO: 11 and 61 of WO2016065001), AAV CKd-N3 (SEQ ID NO: 12 and 62 of WO2016065001), AAV CKd-N4 (SEQ ID NO: 13 and 63 of WO2016065001), AAV CKd-N9 (SEQ ID NO: 14 and 64 of WO2016065001), AAV CLv-L4 (SEQ ID NO: 15 and 65 of WO2016065001), AAV CLv-L5 (SEQ ID NO: 16 and 66 of WO2016065001), AAV CLv-L6 (SEQ ID NO: 17 and 67 of WO2016065001), AAV CLv-K1 (SEQ ID NO: 18 and 68 of WO2016065001), AAV CLv-K3 (SEQ ID NO: 19 and 69 of WO2016065001), AAV CLv-K6 (SEQ ID NO: 20 and 70 of WO2016065001), AAV CLv-M1 (SEQ ID NO: 21 and 71 of WO2016065001), AAV CLv-M11 (SEQ ID NO: 22 and 72 of WO2016065001), AAV CLv-M2 (SEQ ID NO: 23 and 73 of WO2016065001), AAV CLv-M5 (SEQ ID NO: 24 and 74 of WO2016065001), AAV CLv-M6 (SEQ ID NO: 25 and 75 of WO2016065001), AAV CLv-M7 (SEQ ID NO: 26 and 76 of WO2016065001), AAV CLv-M8 (SEQ ID NO: 27 and 77 of WO2016065001), AAV CLv-M9 (SEQ ID NO: 28 and 78 of WO2016065001), AAV CHt-P1 (SEQ ID NO: 29 and 79 of WO2016065001), AAV CHt-P6 (SEQ ID NO: 30 and 80 of WO2016065001), AAV CHt-P8 (SEQ ID NO: 31 and 81 of WO2016065001), AAV CHt-6.1 (SEQ ID NO: 32 and 82 of WO2016065001), AAV CHt-6.10 (SEQ ID NO: 33 and 83 of WO2016065001), AAV CHt-6.5 (SEQ ID NO: 34 and 84 of WO2016065001), AAV CHt-6.6 (SEQ ID NO: 35 and 85 of WO2016065001), AAV CHt-6.7 (SEQ ID NO: 36 and 86 of WO2016065001), AAV CHt-6.8 (SEQ ID NO: 37 and 87 of WO2016065001), AAV CSp-8.10 (SEQ ID NO: 38 and 88 of WO2016065001), AAV CSp-8.2 (SEQ ID NO: 39 and 89 of WO2016065001), AAV CSp-8.4 (SEQ ID NO: 40 and 90 of WO2016065001), AAV CSp-8.5 (SEQ ID NO: 41 and 91 of WO2016065001), AAV CSp-8.6 (SEQ ID NO: 42 and 92 of WO2016065001), AAV CSp-8.7 (SEQ ID NO: 43 and 93 of WO2016065001), AAV CSp-8.8 (SEQ ID NO: 44 and 94 of WO2016065001), AAV CSp-8.9 (SEQ ID NO: 45 and 95 of WO2016065001), AAV CBr-B7.3 (SEQ ID NO: 46 and 96 of WO2016065001), AAV CBr-B7.4 (SEQ ID NO: 47 and 97 of WO2016065001), AAV3B (SEQ ID NO: 48 and 98 of WO2016065001), AAV4 (SEQ ID NO: 49 and 99 of WO2016065001), AAV5 (SEQ ID NO: 50 and 100 of WO2016065001), or variants or derivatives thereof.

[0094] In one embodiment, the AAV may be a serotype selected from any of those found in Table 1.

[0095] In one embodiment, the AAV may comprise a sequence, fragment or variant thereof, of the sequences in Table 1.

[0096] In one embodiment, the AAV may be encoded by a sequence, fragment or variant as described in Table 1.

TABLE 1
AAV Serotypes

| | SEQ | |
|---|---|---|
| | ID | |
| Serotype | NO | Reference Information |
| AAV1 | 1 | US20150159173 SEQ ID NO: 11, US20150315612 SEQ ID NO: 202 |
| AAV1 | 2 | US20160017295 SEQ ID NO: 1US20030138772 SEQ ID NO: 64, US20150159173 |
| | | SEQ ID NO: 27, US2015035612 SEQ ID NO: 219, US7198951 SEQ ID NO: 5 |
| AAV1 | 3 | US20030138772 SEQ ID NO: 6 |
| AAV1.3 | 4 | US20030138772 SEQ ID NO: 14 |
| AAV10 | 5 | US20030138772 SEQ ID NO: 117 |
| AAV10 | 6 | W02015121501 SEQ ID NO: 9 |
| AAV10 | 7 | W02015121501 SEQ ID NO: 8 |
| AAV11 | 8 | US20030138772 SEQ ID NO: 118 |
| AAV12 | 9 | US20030138772 SEQ ID NO: 119 |
| AAV2 | 10 | US2050159173 SEQ ID NO: 7, US20150315612 SEQ ID NO: 211 |
| AAV2 | 11 | US20030138772 SEQ ID NO: 70, US20150159173 SEQ ID NO: 23, US2015035612 |
| | | SEQ ID NO: 221, US20160017295 SEQ ID NO: 2, US6156303 SEQ ID NO: 4, |
| | | US7198951 SEQ ID NO: 4, W02015121501 SEQ ID NO: 1 |
| AAV2 | 12 | US6156303 SEQ ID NO: 8 |
| AAV2 | 13 | US20030138772 SEQ ID NO: 7 |
| AAV2 | 14 | US6156303 SEQ ID NO: 3 |
| AAV2.5T | 15 | US9233131 SEQ ID NO: 42 |
| AAV223.10 | 16 | US20030138772 SEQ ID NO: 75 |
| AAV223.2 | 17 | US20030138772 SEQ ID NO: 49 |
| AAV223.2 | 18 | US20030138772 SEQ ID NO: 76 |
| AAV223.4 | 19 | US20030138772 SEQ ID NO: 50 |
| AAV223.4 | 20 | US20030138772 SEQ ID NO: 73 |
| AAV223.5 | 21 | US20030138772 SEQ ID NO: 51 |
| AAV223.5 | 22 | US20030138772 SEQ ID NO: 74 |
| AAV223.6 | 23 | US20030138772 SEQ ID NO: 52 |
| AAV22306 | 24 | US20030138772 SEQ ID NO: 78 |
| AAV723.7 | 25 | US20030138772 SEQ ID NO: 53 |
| AAV223.7 | 26 | US20030138772 SEQ ID NO: 77 |
| AAV29.3 | 27 | US20030138772 SEQ ID NO: 82 |
| AAV29,4 | 28 | US20030138772 SEQ ID NO: 12 |
| AAV29.5 | 29 | US20030138772 SEQ ID NO: 83 |
| AAV29.5 | 30 | US20030138772 SEQ ID NO: 13 |
| (AAVbb.2) | | |
| AAV3 | 31 | US20150159173 SEQ ID NO: 12 |
| AAV3 | 32 | US20030138772 SEQ ID NO: 71, US20150591.73 SEQ ID NO: 28, US20160017295 |
| | | SEQ ID NO: :3, US7198951 SEQ ID NO: 6 |
| AAV3 | 33 | US20030138772 SEQ ID NO: 8 |
| AAV3.3b | 34 | US21030138772 SEQ ID NO: 72 |
| AAV3-3 | 35 | US20150315612 SEQ ID NO: 200 |
| AAV3-3 | 36 | US20150315612 SEQ ID NO: 217 |
| AAV3a | 37 | US6156303 SEQ ID NO: 5 |
| AAV3a | 38 | US6156303 SEQ ID NO: 9 |
| AAV3b | 39 | US6156303 SEQ ID NO: 6 |
| AAV3b | 40 | US6156303 SEQ ID NO: 10 |
| AAV3b | 41 | US6156303 SEQ ID NO: 1 |
| AAV4 | 42 | US20140348794 SEQ ID NO: 17 |
| AAV4 | 43 | US20140348794 SEQ ID NO: 5 |
| AAV4 | 44 | US20140348794 SEQ ID NO: 3 |
| AAV4 | 45 | US20140348794 SEQ ID NO: 14 |
| AAV4 | 46 | US20140348794 SEQ ID NO: 15 |
| AAV4 | 47 | US20140348794 SEQ ID NO: 19 |
| AAV4 | 48 | US20140348794 SEQ ID NO: 12 |
| AAV4 | 49 | US20140348794 SEQ ID NO: 13 |
| AAV4 | 50 | US20140348794 SEQ ID NO: 7 |
| AAV4 | 51 | US20140348794 SEQ ID NO: 8 |
| AAV4 | 52 | US20140348794 SEQ ID NO: 9 |
| AAV4 | 53 | US20140348794 SEQ ID NO: 2 |
| AAV4 | 54 | US20140348794 SEQ ID NO: 10 |
| AAV4 | 55 | US20140348794 SEQ ID NO: 11 |
| AAV4 | 56 | US20140348794 SEQ ID NO: 18 |
| AAV4 | 57 | US20030138772 SEQ ID NO: 63, US20160017295 SEQ ID NO: 4, US20140348794 |
| | | SEQ ID NO: 4 |
| AAV4 | 58 | US20140348794 SEQ ID NO: 16 |
| AAV4 | 59 | US201140348794 SEQ ID NO: 20 |
| AAV4 | 60 | US20140348794 SEQ ID NO: 6 |
| AAV4 | 61 | US20140348794 SEQ ID NO: 1 |
| AAV42.2 | 62 | US20030138772 SEQ ID NO: 9 |
| AAV42.2 | 63 | US20030138772 SEQ ID NO: 102 |
| AAV42.3b | 64 | US20030138772 SEQ ID NO: 36 |
| AAV42.3B | 65 | US20030138772 SEQ ID NO: 107 |
| AAV42.4 | 66 | US20030138772 SEQ ID NO: 33 |
| AAV42.4 | 67 | US20030138772 SEQ ID NO: 88 |
| AAV42.8 | 68 | US20030138772 SEQ ID NO: 27 |
| AAV42.8 | 69 | US20030138772 SEQ ID NO: 85 |
| AAV43.1 | 70 | US20030138772 SEQ ID NO: 39 |
| AAV43.1 | 71 | US20030138772 SEQ ID NO: 92 |
| AAV43.12 | 72 | US20030138772 SEQ ID NO: 41 |
| AAV43.12 | 73 | US20030138772 SEQ ID NO: 93 |
| AAV43.20 | 74 | US20030138772 SEQ ID NO: 42 |
| AAV43.20 | 75 | US20030138772 SEQ ID NO: 99 |
| AAV43.21 | 76 | US20030138772 SEQ ID NO: 43 |
| AAV43.21 | 77 | US20030138772 SEQ ID NO: 96 |
| AAV43.23 | 78 | US20030138772 SEQ ID NO: 44 |
| AAV43.23 | 79 | US20030138772 SEQ ID NO: 98 |
| AAV43.25 | 80 | US20030138772 SEQ ID NO: 45 |
| AAV43.25 | 81 | US20030138772 SEQ ID NO: 97 |
| AAV43.5 | 82 | US20030138772 SEQ ID NO: 40 |
| AAV43.5 | 83 | US20030138772 SEQ ID NO: 94 |
| AAV4-4 | 84 | US20150315612 SEQ ID NO: 201 |
| AAV4-4 | 85 | US20150315612 SEQ ID NO: 218 |
| AAV44.1 | 86 | US20030138772 SEQ ID NO: 46 |
| AAV44.1 | 87 | US20030138772 SEQ ID NO: 79 |
| AAV44.5 | 88 | US20030138772 SEQ ID NO: 47 |
| AAV44.5 | 89 | US20030138772 SEQ ID NO: 80 |
| AAV4407 | 90 | US20150315612 SEQ ID NO: 90 |
| AAV5 | 91 | US7427396 SEQ ID NO: 1 |
| AAV5 | 92 | US20030138772 SEQ ID NO: 114 |
| AAV5 | 93 | US20160017295 SEQ ID NO: 5, US7427396 SEQ ID NO: 2, US20150315612 SEQ |
| | | ID NO: 216 |
| AAV5 | 94 | US20150315612 SEQ ID NO: 199 |
| AAV6 | 95 | US20150159173 SEQ ID NO: 13 |
| AAV6 | 96 | US0030138772 SEQ ID NO: 65, US20150159173 SEQ ID NO: 29, US520160017295 |
| | | SEQ ID NO: 6, US6156303 SEQ ID NO: 7 |
| AAV6 | 97 | US6156303 SEQ ID NO: 11 |
| AAV6 | 98 | US6156303 SEQ ID NO: 2 |
| AAV6 | 99 | US20150315612 SEQ ID NO: 203 |
| AAV6 | 100 | US20150315612 SEQ ID NO: 220 |
| AAV6.1 | 101 | US20150159173 |
| AAV6.12 | 102 | US20150159173 |
| AAV6.2 | 103 | US20150159173 |
| AAV7 | 104 | US20150159173 SEQ ID NO: 14 |
| AAV7 | 105 | US20150315612 SEQ ID NO: 183 |
| AAV7 | 106 | US20030138772 SEQ ID NO: 2, US20150159173 SEQ ID NO: 30, US20150315612 |
| | | SEQ. ID NO: 181, US20160017295 SEQ ID NO: 7 |
| AAV7 | 107 | US20030138772 SEQ ID NO: 3 |
| AAV7 | 108 | US20030138772 SEQ ID NO: 1, US20150315612 SEQ ID NO: 180 |
| AAV7 | 109 | US20150315612 SEQ ID NO: 213 |
| AAV7 | 110 | US20150315612 SEQ ID NO: 222 |
| AAV8 | 111 | US20150159173 SEQ ID NO: 15 |
| AAV8 | 112 | US20150376240 SEQ ID NO: 7 |
| AAV8 | 113 | US20030138772 SEQ ID NO: 4, US20150315612 SEQ ID NO: 182 |
| AAV8 | 114 | US20030138772 SEQ ID NO: 95, US20140359799 SEQ ID NO: 1, US20150159173 |
| | | SEQ ID NO: 31, US0160017295 SEQ ID NO: 8, US7198951 SEQ ID NO: 7, |
| | | US20150315612 SEQ ID NO: 223 |
| AAV8 | 115 | US20150376240 SEQ ID NO: 8 |
| AAV8 | 116 | US20150315612 SEQ ID NO: 214 |
| AAV-8b | 117 | US20150376240 SEQ ID NO: 5 |
| AAV-8b | 118 | US20150376240 SEQ ID NO: 3 |
| AAV-8h | 119 | US20150376240 SEQ ID NO: 6 |
| AAV-8h | 120 | US20150376240 SEQ ID NO: 4 |
| AAV9 | 121 | US20030138772 SEQ ID NO: 5 |
| AAV9 | 122 | US7198951 SEQ ID NO: 1 |
| AAV9 | 123 | US20160017295 SEQ ID NO: 9 |
| AAV9 | 124 | US20030138772 SEQ ID NO: 100, US7198951 SEQ ID NO. 2 |
| AAV9 | 125 | US7198951 SEQ ID NO: 3 |
| AAV9 | 126 | US7906111 SEQ ID NO: 3; W02015038958 SEQ ID NO: 11 |
| (AAVhu.14) | | |
| AAV9 | 127 | US7906111 SEQ ID NO: 123; W02015038958 SEQ ID NO: 2 |
| (AAVhu.14) | | |
| AAVA3.1 | 128 | US20030138772 SEQ ID NO: 120 |
| AAVA3.3 | 129 | US20030138772 SEQ ID NO: 57 |
| AAVA3.3 | 130 | US20030138772 SEQ ID NO: 66 |
| AAVA3.4 | 131 | US20030138772 SEQ ID NO: 54 |
| AAVA3.4 | 132 | US20030138772 SEQ ID NO: 68 |
| AAVA3.5 | 133 | US20030138772 SEQ ID NO: 55 |
| AAVA3.5 | 134 | US20030138772 SEQ ID NO: 69 |
| AAVA3.7 | 135 | US20030138772 SEQ ID NO: 56 |
| AAVA3.7 | 136 | US20030138772 SEQ ID NO: 67 |
| AAV29.3 | 137 | US20030138772 SEQ ID NO: 11 |
| (AAVbb.1) | | |
| AAVC2 | 138 | US20030138772 SEQ ID NO: 61 |
| AAVC11.5 | 139 | US201150159173 SEQ ID NO: 46, US20150315612 SEQ ID NO: 234 |
| AAVcy.2 | 140 | US20030138772 SEQ ID NO: 15 |
| (AAV 13.3) | | |
| AAV24.1 | 141 | US20030138772 SEQ ID NO: 101 |
| AAVcy.3 | 142 | US20030138772 SEQ ID NO: 16 |
| (AAV24,1) | | |
| AAV27.3 | 143 | US20030138772 SEQ ID NO: 104 |
| AAVcy.4 | 144 | US20030138772 SEQ ID NO: 17 |
| (AAV27.3) | | |
| AAVcy.5 | 145 | US20150315612 SEQ ID NO: 227 |
| AAV7.2 | 146 | US20030138772 SEQ ID NO: 103 |
| AAVey.5 | 147 | US20030138772 SEQ ID NO: 18 |
| (AAV7.2) | | |
| AAV16.3 | 148 | US20030138772 SEQ ID NO: 105 |
| AAVcy.6 | 149 | US20030138772 SEQ ID NO: 10 |
| (AAV16.3) | | |
| AAVcy.5 | 150 | US20150159173 SEQ ID NO: 8 |
| AAVcy.5 | 151 | US20150159173 SEQ ID NO: 24 |
| AAVCy.5R1 | 152 | US20150159173 |
| AAVCy.5R2 | 153 | US20150159173 |
| AAVCy.51-23 | 154 | US20150159173 |
| AAVCy.5R4 | 155 | US20150159173 |
| AAVDJ | 156 | US20140359799 SEQ ID NO: 3, US7588772 SEQ ID NO: 2 |
| AAVDJ | 157 | US201140359799 SEQ ID NO: 2, US7588772 SEQ ID NO: 1 |
| AAVDJ-8 | 158 | US7588772, Grimm et al 2008 |
| AAVDJ-8 | 159 | US7588772; Grimm et al 2008 |
| AAVF5 | 160 | US20030138772 SEQ ID NO: 110 |
| AAVH2 | 161 | US20030138772 SEQ ID NO: 26 |
| AAVH6 | 162 | US20030138772 SEQ ID NO: 25 |
| AAVhE1.1 | 163 | US9233131 SEQ ID NO: 44 |
| AAVhEr1.14 | 164 | US9233131 SEQ ID NO: 46 |
| AAVhEr1.16 | 165 | US9233131 SEQ ID NO: 48 |
| AAVhEr1.18 | 166 | US9233131 SEQ ID NO: 49 |
| AAVhEr1.23 | 167 | US9233131 SEQ ID NO: 53 |
| (AAVhEr2.29) | | |
| AAVhEr1.35 | 168 | US9233131 SEQ ID NO: 50 |
| AAVhEr1.36 | 169 | US9233131 SEQ ID NO: 52 |
| AAVhEr1.5 | 170 | US9233131 SEQ ID NO: 45 |
| AAVhEr1.7 | 171 | US9233131 SEQ ID NO: 51 |
| AAVhErt.8 | 172 | US9233131 SEQ ID NO: 47 |
| AAVhEr2.16 | 173 | US9233131 SEQ ID NO: 55 |
| AAVhEr2.30 | 174 | US9233131 SEQ ID NO: 56 |
| AAVhEr2.31 | 175 | US9233131 SEQ ID NO: 58 |
| AAVhEr2.36 | 176 | US9233131 SEQ ID NO: 57 |
| AAVhEr2.4 | 177 | US9233131 SEQ ID NO: 54 |
| AAVhEr3.1 | 178 | US9233131 SEQ ID NO: 59 |
| AAVhu.1 | 179 | US20150315612 SEQ ID NO: 46 |
| AAVhu.1 | 180 | US20150315612 SEQ ID NO: 144 |
| AAVhu.10 | 181 | US20150315612 SEQ ID NO: 56 |
| (AAV16.8) | | |
| AAVElu.10 | 182 | US20150315612 SEQ ID NO: 156 |
| (AAV16.8) | | |
| AAVhu.11 | 183 | US20150315612 SEQ ID NO: 57 |
| (AAV16.12) | | |
| AAVhu.11 | 184 | US20150315612 SEQ ID NO: 153 |
| (AAV16.12) | | |
| AAVhu.12 | 185 | US20150315612 SEQ ID NO: 59 |
| AAVhu.12 | 186 | US20150315612 SEQ ID NO: 154 |
| AAVhu.13 | 187 | US20150159173 SEQ ID NO: 16, US20150315612 SEQ ID NO: 71 |
| AAVhu.13 | 188 | US20150159173 SEQ ID NO: 32, US20150315612 SEQ ID NO: 129 |
| AAVhu.136.1 | 189 | US20150315612 SEQ ID NO: 165 |
| AAVhu.140.1 | 190 | US20150315612 SEQ ID NO: 166 |
| AAVhu.140.2 | 191 | US20150315612 SEQ ID NO: 167 |
| AAVhu.145.6 | 192 | US20150315612 SEQ ID No: 178 |
| AAVhu.15 | 193 | US20150315612 SEQ ID NO: 147 |
| AAVhu.15 | 194 | US20150315612 SEQ ID NO: 50 |
| (AAV33.4) | | |
| AAVhu.156.1 | 195 | US20150315612 SEQ ID No: 179 |
| AAVhu.16 | 196 | US20150315612 SEQ ID NO: 148 |
| AAVhu.16 | 197 | US20150315612 SEQ ID NO: 51 |
| (AAV33.8) | | |
| AAVhu.17 | 198 | US20150315612 SEQ ID NO: 83 |
| AAVhu.17 | 199 | US20150315612 SEQ ID NO: 4 |
| (AAV33.12) | | |
| AAVhu.172.1 | 200 | US20150315612 SEQ ID NO: 171 |
| AAVhu.172.2 | 201 | US20150315612 SEQ ID NO: 172 |
| AAVhu.173.4 | 202 | US20150315612 SEQ ID NO: 173 |
| AAVhu.173.8 | 203 | US20150315612 SEQ ID NO: 175 |
| AAVhu.18 | 204 | US20150315612 SEQ ID NO: 52 |
| AAVhu.18 | 205 | US20150315612 SEQ ID NO: 149 |
| AAVhu.19 | 206 | US20150315612 SEQ ID NO: 62 |
| AAVhu.19 | 207 | US20150315612 SEQ ID NO: 133 |
| AAVhu.2 | 208 | US20150315612 SEQ ID NO: 48 |
| AAVhu.2 | 209 | US20150315612 SEQ ID NO: 143 |
| AAVhu.20 | 210 | US20150315612 SEQ ID NO: 63 |
| AAVhu.20 | 211 | US20150315612 SEQ ID NO: 134 |
| AAVhu.21 | 212 | US20150315612 SEQ ID NO: 65 |
| AAVhu.21 | 213 | US20150315612 SEQ ID NO: 135 |
| AAVhu.22 | 214 | US20150315612 SEQ ID NO: 67 |
| AAVhu.22 | 215 | US20150315612 SEQ ID NO: 138 |
| AAVhu.23 | 216 | US20150315612 SEQ ID NO: 60 |
| AAVhu.23.2 | 217 | US20150315612 SEQ ID NO: 137 |
| AAVhu.24 | 218 | US20150315612 SEQ ID NO: 66 |
| AAVhu.24 | 219 | US20150315612 SEQ ID NO: 136 |
| AAVhu.25 | 220 | US20150315612 SEQ ID NO: 49 |
| AAVhu.25 | 221 | US20150315612 SEQ ID NO: 146 |
| AAVhu.26 | 222 | US20150159173 SEQ ID NO: 17, US20150315612 SEQ ID NO: 61 |
| AAVhu.26 | 223 | US20150159173 SEQ ID NO: 33, US20150315612 SEQ ID NO: 139 |
| AAVhu.27 | 224 | US20150315612 SEQ ID NO: 64 |
| AAVhu.27 | 225 | US20150315612 SEQ ID NO: 140 |
| AAVhu.28 | 226 | US20150315612 SEQ ID NO: 68 |
| AAVhu.28 | 227 | US20150315612 SEQ ID NO: 130 |
| AAVhu.29 | 228 | US20150315612 SEQ ID NO: 69 |
| AAVhu.29 | 229 | US20150159173 SEQ ID NO: 42, US20150315612 SEQ ID NO: 132 |
| AAVhu.29 | 230 | US20150315612 SEQ ID NO: 225 |
| AAVhu.29R | 231 | US20150159173 |
| AAVhu.3 | 232 | US20150315612 SEQ ID NO: 44 |
| AAVhu.3 | 233 | US20150315612 SEQ ID NO: 145 |
| AAVhu.30 | 234 | US20150315612 SEQ ID NO: 70 |
| AAVhu.30 | 235 | US20150315612 SEQ ID NO: 131 |
| AAVhu.31 | 236 | US20150315612 SEQ ID NO: 1 |
| AAVhu.31 | 237 | US20150315612 SEQ ID NO: 121 |
| AAVhu.32 | 238 | US20150315612 SEQ ID NO: 2 |
| AAVhu.32 | 239 | US20150315612 SEQ ID NO: 122 |
| AAVhu.33 | 240 | US20150315612 SEQ ID NO: 75 |
| AAVhu.33 | 241 | US20150315612 SEQ ID NO: 124 |
| AAVhu.34 | 242 | US20150315612 SEQ ID NO: 72 |
| AAVhu.34 | 243 | US20150315612 SEQ ID NO: 125 |
| AAVhu.35 | 244 | US20150315612 SEQ ID NO: 73 |
| AAVhu.35 | 245 | US20150315612 SEQ ID NO: 164 |
| AAVhu.36 | 246 | US20150315612 SEQ ID NO: 74 |
| AAVhu.36 | 247 | US20150315612 SEQ ID NO: 126 |
| AAVhu.37 | 248 | US20150159173 SEQ ID NO: 34, US20150315612 SEQ ID NO: 88 |
| AAVhu.37 | 249 | US20150315612 SEQ ID NO: 10, US20150159173 SEQ ID NO: 18 |
| (AAV106.1) | | |
| AAVhu.38 | 250 | US20150315612 SEQ ID NO: 161 |
| AAVhu.39 | 251 | US20150315612 SEQ ID NO: 102 |
| AAVhu.39 | 252 | US20150315612 SEQ ID NO: 24 |
| (AAVLG-9) | | |
| AAVhu.4 | 253 | US20150315612 SEQ ID NO: 47 |
| AAVhu.4 | 254 | US20150315612 SEQ ID NO: 141 |
| AAVhu.40 | 255 | US20150315612 SEQ ID NO: 87 |
| AAVhu.40 | 256 | US20150315612 SEQ ID No: 11 |
| (AAV114.3) | | |
| AAVhu.41 | 257 | US20150315612 SEQ ID NO: 91 |
| AAVhu.41 | 258 | US20150315612 SEQ ID NO: 6 |
| (AAV127.2) | | |
| AAVhu.42 | 259 | US20150315612 SEQ ID NO: 85 |
| AAVhu.42 | 260 | US20150315612 SEQ ID NO: 8 |
| (AAV127.5) | | |
| AAVhu.43 | 261 | US20150315612 SEQ ID NO: 160 |
| AAVhu.43 | 262 | US20150315612 SEQ ID NO: 236 |
| AAVhu.43 | 263 | US20150315612 SEQ ID NO: 80 |
| (AAV128.1) | | |
| AAVhu.44 | 264 | US20150159173 SEQ ID NO: 45, US20150315612 SEQ ID NO: 158 |
| AAVhu.44 | 265 | US20150315612 SEQ ID NO: 81 |
| (AAV128.3) | | |
| AAVhu.44R1 | 266 | US20150159173 |
| AAVhu.44R2 | 267 | US20150159173 |
| AAVhu.44R3 | 268 | US20150159173 |
| AAVhu.45 | 269 | US20150315612 SEQ ID NO: 76 |
| AAVhu.45 | 270 | US20150315612 SEQ ID NO: 127 |
| AAVhu.46 | 271 | US20150315612 SEQ ID NO: 82 |
| AAVhu.46 | 272 | US20150315612 SEQ ID NO: 159 |
| AAVhu.46 | 273 | US20150315612 SEQ ID NO: 224 |
| AAVhu.47 | 274 | US20150315612 SEQ ID NO: 77 |
| AAVhu.47 | 275 | US20150315612 SEQ ID NO: 128 |
| AAVhu.48 | 276 | US20150159173 SEQ ID NO: 38 |
| AAVhu.48 | 277 | US20150315612 SEQ ID NO: 157 |
| AAVhu.48 | 278 | US20150315612 SEQ ID NO: 78 |
| (AAV130.4) | | |
| AAVhu.48R1 | 279 | US20150159173 |
| AAVhu.48R2 | 280 | US20150159173 |
| AAVIlu.48R3 | 281 | US20150159173 |
| AAVhu.49 | 282 | US20150315612 SEQ ID NO: 209 |
| AAVhu.49 | 283 | US20150315612 SEQ ID NO: 189 |
| AAVhu.5 | 284 | US20150315612 SEQ ID NO: 45 |
| AAVhu.5 | 285 | US20150315612 SEQ ID NO: 142 |
| AAVhu.51 | 286 | US20150315612 SEQ ID NO: 208 |
| AAVhu.51 | 287 | US20150315612 SEQ ID NO: 190 |
| AAVhu.52 | 288 | US20150315612 SEQ ID NO: 210 |
| AAVhu.52 | 289 | US20150315612 SEQ ID NO: 191 |
| AAVhu.53 | 290 | US20150159173 SEQ ID NO: 19 |
| AAVhu.53 | 291 | US20150159173 SEQ ID NO: 35 |
| AAVhu.53 | 292 | US20150315612 SEQ ID NO: 176 |
| (AAV145.1) | | |
| AAVhu.54 | 293 | US20150315612 SEQ ID NO: 188 |
| AAVhu.54 | 294 | US20150315612 SEQ ID No: 177 |
| (AAV145.5) | | |
| AAVhu.55 | 295 | US20150315612 SEQ ID NO: 187 |
| AAVhu.56 | 296 | US20150315612 SEQ ID NO: 205 |
| AAVhu.56 | 297 | US20150315612 SEQ ID NO: 168 |
| (AAV145.6) | | |
| AAVhu.56 | 298 | US20150315612 SEQ ID NO: 192 |
| (AAV145.6) | | |
| AAVhu.57 | 299 | US20150315612 SEQ ID NO: 206 |
| AAVhu.57 | 300 | US20150315612 SEQ ID NO: 169 |
| AAVhu.57 | 301 | US20150315612 SEQ ID NO: 193 |
| AAVhu.58 | 302 | US20150315612 SEQ ID NO: 207 |
| AAVhu.58 | 303 | US20150315612 SEQ ID NO: 194 |
| AAVhu.6 | 304 | US20150315612 SEQ ID NO: 5 |
| (AAV3.1) | | |
| AAVhu.6 | 305 | US20150315612 SEQ ID NO: 84 |
| (AAV3.1) | | |
| AAVhu.60 | 306 | US20150315612 SEQ ID NO: 184 |
| AAVhu.60 | 307 | US20150315612 SEQ ID NO: 170 |
| (AAV161.10) | | |
| AAVhu.61 | 308 | US20150315612 SEQ ID NO: 185 |
| AAVhu.61 | 309 | US20150315612 SEQ ID NO: 174 |
| (AAV161.6) | | |
| AAVhu.63 | 310 | US20150315612 SEQ ID NO: 204 |
| AAVhu.63 | 311 | US20150315612 SEQ ID NO: 195 |
| AAVhu.64 | 312 | US20150315612 SEQ ID NO: 212 |
| AAVhu.64 | 313 | US20150315612 SEQ ID NO: 196 |
| AAVhu.66 | 314 | US20150315612 SEQ ID NO: 197 |
| AAVhu.67 | 315 | US20150315612 SEQ ID NO: 215 |
| AAVhu.67 | 316 | US20150315612 SEQ ID NO: 198 |
| AAVhu.7 | 317 | US20150315612 SEQ ID NO: 226 |
| AAVhu.7 | 318 | US20150315612 SEQ ID NO: 150 |
| AAVhu.7 | 319 | US20150315612 SEQ ID NO: 55 |
| (AAV7.3) | | |
| AAVhu.71 | 320 | US20150315612 SEQ ID NO: 79 |
| AAVhu.8 | 321 | US20150315612 SEQ ID NO: 53 |
| AAVhu.8 | 322 | US20150315612 SEQ ID NO: 12 |
| AAVhu.8 | 323 | US20150315612 SEQ ID NO: 151 |
| AAVhu.9 | 324 | US20150315612 SEQ ID NO: 58 |
| (AAV3.1) | | |
| AAVhu.9 | 325 | US20150315612 SEQ ID NO: 155 |
| (AAV3.1) | | |
| AAV-LK01 | 326 | US20150376607 SEQ ID NO: 2 |
| AAV-LK01 | 327 | US20150376607 SEQ ID NO: 29 |
| AAV-1K02 | 328 | US20150376607 SEQ ID NO: 3 |
| AAV-1K02 | 329 | US20150376607 SEQ ID NO: 30 |
| AAV-LK03 | 330 | US20150376607 SEQ ID NO: 4 |
| AAV-LK03 | 331 | WO2015121501 SEQ ID NO: 12, US20150376607 SEQ ID NO: 31 |
| AAV-LK04 | 332 | US20150376607 SEQ ID NO: 5 |
| AAV-LK04 | 333 | US20150376607 SEQ ID NO: 32 |
| AAV-LK05 | 334 | US20150376607 SEQ ID NO: 6 |
| AAV-LK05 | 335 | US20150376607 SEQ ID NO: 33 |
| AAV-LK06 | 336 | US20150376607 SEQ ID NO: 7 |
| AAV-LK06 | 337 | US20150376607 SEQ ID NO: 34 |
| AAV-LK07 | 338 | US20150376607 SEQ ID NO: 8 |
| AAV-LK07 | 339 | US20150376607 SEQ ID NO: 35 |
| AAV-LK08 | 340 | US20150376607 SEQ ID NO: 9 |
| AAV-LK08 | 341 | US20150376607 SEQ ID NO: 36 |
| AAV-LK09 | 342 | US20150376607 SEQ ID NO: 10 |
| AAV-LK09 | 343 | US20150376607 SEQ ID NO: 37 |
| AAV-LK10 | 344 | US20150376607 SEQ ID NO: 11 |
| AAV-LK10 | 345 | US20150376607 SEQ ID NO: 38 |
| AAV-LK11 | 346 | US20150376607 SEQ ID NO: 12 |
| AAV-LK11 | 347 | US20150376607 SEQ ID NO: 39 |
| AAV-LK12 | 348 | US20150376607 SEQ ID NO: 13 |
| AAV-LK12 | 349 | US20150376607 SEQ ID NO: 40 |
| AAV-LK13 | 350 | US20150376607 SEQ ID NO: 14 |
| AAV-LK13 | 351 | US20150376607 SEQ ID NO: 41 |
| AAV-LK14 | 352 | US20150376607 SEQ ID NO: 15 |
| AAV-LK14 | 353 | US20150376607 SEQ ID NO: 42 |
| AAV-LK15 | 354 | US20150376607 SEQ ID NO: 16 |
| AAV-LK15 | 355 | US20150376607 SEQ ID NO: 43 |
| AAV-LK16 | 356 | US20150376607 SEQ ID NO: 17 |
| AAV-LK16 | 357 | US20150376607 SEQ ID NO: 44 |
| AAV-LK17 | 358 | US20150376607 SEQ ID NO: 18 |
| AAV-LK17 | 359 | US20150376607 SEQ ID NO: 45 |
| AAV-LK18 | 360 | US20150376607 SEQ ID NO: 19 |
| AAV-LK18 | 361 | US20150376607 SEQ ID NO: 46 |
| AAV-LK19 | 362 | US20150376607 SEQ ID NO: 20 |
| AAV-LK19 | 363 | US20150376607 SEQ ID NO: 47 |
| AAV-PAEC | 364 | US20150376607 SEQ ID NO: 1 |
| AAV-PAEC | 365 | US20150376607 SEQ ID NO: 48 |
| AAV- | 366 | US20150376607 SEQ ID NO: 26 |
| PAEC11 | | |
| AAV- | 367 | US20150376607 SEQ ID NO: 54 |
| PAEC11 | | |
| AAV- | 368 | US20150376607 SEQ ID NO: 27 |
| PAEC12 | | |
| AAV- | 369 | US20150376607 SEQ ID NO: 51 |
| PAEC12 | | |
| AAV- | 370 | US20150376607 SEQ ID NO: 28 |
| PAEC13 | | |
| AAV- | 371 | US20150376607 SEQ ID NO: 49 |
| PAEC13 | | |
| AAV-PAEC2 | 372 | US20150376607 SEQ ID NO: 21 |
| AAV-PAEC2 | 373 | US20150376607 SEQ ID NO: 56 |
| AAV-PAEC4 | 374 | US20150376607 SEQ ID NO: 22 |
| AAV-PAEC4 | 375 | US20150376607 SEQ ID NO: 55 |
| AAV-PAEC6 | 376 | US20150376607 SEQ ID NO: 23 |
| AAV-PAEC6 | 377 | US20150376607 SEQ ID NO: 52 |
| AAV-PAEC7 | 378 | US20450376607 SEQ ID NO: 24 |
| AAV-PA1X7 | 379 | US20150376607 SEQ ID NO: 53 |
| AAV-PAEC8 | 380 | US20150376607 SEQ ID NO: 25 |
| AAV-PAEC8 | 381 | US20150376607 SEQ ID NO: 50 |
| AAVpi.1 | 382 | US20150315612 SEQ ID NO: 28 |
| AAVpi.1 | 383 | US20150315612 SEQ ID NO: 93 |
| AAVpi.2 | 384 | US20150315612 SEQ ID NO: 30 |
| AAVpi.2 | 385 | US20150315612 SEQ ID NO: 95 |
| AAVpi.3 | 386 | US20150315612 SEQ ID NO: 29 |
| AAVpi.3 | 387 | US20150315612 SEQ ID NO: 94 |
| AAVrh.10 | 388 | US20150159173 SEQ ID NO: 9 |
| AAVrh.10 | 389 | US20150159173 SEQ ID NO: 25 |
| AAV44.2 | 390 | US20030138772 SEQ ID NO: 59 |
| AAVrh.10 | 391 | US20030138772 SEQ ID NO: 81 |
| (AAV44.2) | | |
| AAV42.1B | 392 | US20030138772 SEQ ID NO: 90 |
| AAVrh.12 | 393 | US20030138772 SEQ ID NO: 30 |
| (AAV42.1b) | | |
| AAVrh.13 | 394 | US201501.591.73 SEQ ID NO: 10 |
| AAVrh.13 | 395 | US20150159173 SEQ ID NO: 26 |
| AAVrh.13 | 396 | US20150315612 SEQ ID NO: 228 |
| AAVrh.13R | 397 | US20150159173 |
| AAV42.3A | 398 | US20030138772 SEQ ID NO: 87 |
| AAVrh.14 | 399 | US20030138772 SEQ ID NO: 32 |
| (AAV42.3a) | | |
| AAV42.5A | 400 | US20030138772 SEQ ID NO: 89 |
| AAVrh.17 | 401 | US20030138772 SEQ ID NO: 34 |
| (AAV42.5a) | | |
| AAV42.5B | 402 | US20030138772 SEQ ID NO: 91 |
| AAVrh.18 | 403 | US20030138772 SEQ ID NO: 29 |
| (AAV42.5b) | | |
| AAV42.6B | 404 | US20030138772 SEQ ID NO: 112 |
| AAVrh.19 | 405 | US20030138772 SEQ ID NO: 38 |
| (AAV42.6b) | | |
| AAVrh.2 | 406 | US20150159173 SEQ ID NO: 39 |
| AAVrh.2 | 407 | US20150315612 SEQ ID NO: 231 |
| AAVrh.20 | 408 | US20150159173 SEQ ID NO: 1 |
| AAV42.10 | 409 | US20030138772 SEQ ID NO: 106 |
| AAVrh.21 | 410 | US20030138772 SEQ ID NO: 35 |
| (AAV42.10) | | |
| AAV42.11 | 411 | US20030138772 SEQ ID NO: 108 |
| AAVrh.22 | 412 | US20030138772 SEQ ID NO: 37 |
| (AAV42.10) | | |
| AAV42.12 | 413 | US20030138772 SEQ ID NO: 113 |
| AAVrh.23 | 414 | US20030138772 SEQ ID NO: 58 |
| (AAV42.12) | | |
| AAV42.13 | 415 | US20030138772 SEQ ID NO: 86 |
| AAVrh.24 | 416 | US20030138772 SEQ ID NO: 31 |
| (AAV42.13) | | |
| AAV42.15 | 417 | US20030138772 SEQ ID NO: 84 |
| AAVrh.25 | 418 | US20030138772 SEQ ID NO: 28 |
| (AAV42.15) | | |
| AAVrh.2R | 419 | US20150159173 |
| AAVrh.31 | 420 | US20030138772 SEQ ID NO: 48 |
| (AAV223.1) | | |
| AAVC1 | 421 | US20030138772 SEQ ID NO: 60 |
| AAVrh.32 | 422 | US20030138772 SEQ ID NO: 19 |
| (AAVC1) | | |
| AAVrh.32/33 | 423 | US20150159173 SEQ ID NO: 2 |
| AAVrh.33 | 424 | US20030138772 SEQ ID NO: 20 |
| (AAVC3) | | |
| AAVC5 | 425 | US20030138772 SEQ ID NO: 62 |
| AAVrh.34 | 426 | US20030138772 SEQ ID NO: 21 |
| (AAVC5) | | |
| AAVF1 | 427 | US20030138772 SEQ ID NO: 109 |
| AAVrh.35 | 428 | US20030138772 SEQ ID NO: 22 |
| (AAVF1) | | |
| AANT3 | 429 | US20030138772 SEQ ID NO: 111 |
| AAVrh.36 | 430 | US20030138772 SEQ ID NO: 23 |
| (AAVF3) | | |
| AAVrh.37 | 431 | US20030138772 SEQ ID NO: 24 |
| AAVrh.37 | 432 | US20150159173 SEQ ID NO: 40 |
| AAVrh.37 | 433 | US20150315612 SEQ ID NO: 229 |
| AAVrh.37R2 | 434 | US20150159173 |
| AAVrh.38 | 435 | US20150315612 SEQ ID NO: 7 |
| (AAVLG-4) | | |
| AAVrh.38 | 436 | US20150315612 SEQ ID NO: 86 |
| (AAVLG-4) | | |
| AAVrh.39 | 437 | US20450159173 SEQ ID NO: 20, US20150345612 SEQ ID NO: 13 |
| AAVrh.39 | 438 | US20150159173 SEQ ID NO: 3, US20150159173 SEQ ID NO: 36, US20150315612 |
| | | SEQ ID NO: 89 |
| AAVrh.40 | 439 | US20150315612 SEQ ID NO: 92 |
| AAVrh.40 | 440 | US20150315612 SEQ ID No: 14 |
| (AAVLG-10) | | |
| AAVrh.43 | 441 | US20150315612 SEQ ID NO: 43, US20150159173 SEQ ID NO: 21 |
| (AAVN721- | | |
| 8) | | |
| AAVrh.43 | 442 | US20150315612 SEQ ID NO: 163, US20150159173 SEQ ID NO: 37 |
| (AAVN721- | | |
| 8) | | |
| AAVrh.44 | 443 | US20150315612 SEQ ID NO: 34 |
| AAVrh.44 | 444 | US20150315612 SEQ ID NO: 111 |
| AAVrh.45 | 445 | US20150315612 SEQ ID NO: 41 |
| AAVrh.45 | 446 | US20150315612 SEQ ID NO: 109 |
| AAVrh.46 | 447 | US20150159173 SEQ ID NO: 22, US20150315612 SEQ ID NO: 19 |
| AAVrh.46 | 448 | US20150159173 SEQ ID NO: 4, US20150315612 SEQ ID NO: 101 |
| AAVrh.47 | 449 | US20150315612 SEQ ID NO: 38 |
| AAVrh.47 | 450 | US20150315612 SEQ ID NO: 118 |
| AAVrh.48 | 451 | US20150159173 SEQ ID NO: 44, US20150315612 SEQ ID NO: 115 |
| AAVrh.48.1 | 452 | US20150159173 |
| AAVrh.48.1.2 | 453 | US20150159173 |
| AAVrh.48.2 | 454 | US20150159173 |
| AAVrh.48 | 455 | US20150315612 SEQ ID NO: 32 |
| (AAV1-7) | | |
| AAVrh.49 | 456 | US20150315612 SEQ ID NO: 25 |
| (AAV1-8) | | |
| AAVrh.49 | 457 | US20150315612 SEQ ID NO: 103 |
| (AAV1-8) | | |
| AAVrh.50 | 458 | US20150315612 SEQ ID NO: 23 |
| (AAV2-4) | | |
| AAVrh.50 | 459 | US20150315612 SEQ ID NO: 108 |
| (AAV2-4) | | |
| AAVrh.51 | 460 | US20150315612 SEQ ID No: 22 |
| (AAV2-5) | | |
| AAVrh.51 | 461 | US20150315612 SEQ ID NO: 104 |
| (AAV2-5) | | |
| AAVrh.52 | 462 | US20150315612 SEQ ID NO: 18 |
| (AAV3-9) | | |
| AAVrh.52 | 463 | US20150315612 SEQ ID NO: 96 |
| (AAV3-9) | | |
| AAVrh.53 | 464 | US20150315612 SEQ ID NO: 97 |
| AAVrh.53 | 465 | US20150315612 SEQ ID NO: 17 |
| (AAV3-11) | | |
| AAVrh.53 | 466 | US20150315612 SEQ ID NO: 186 |
| (AAV3-11) | | |
| AAVrh.54 | 467 | US20150315612 SEQ ID NO: 40 |
| AAVrh.54 | 468 | US20150159173 SEQ ID NO: 49, US20150315612 SEQ ID NO: 116 |
| AAVrh.55 | 469 | US20150315612 SEQ ID NO: 37 |
| AAVrh.55 | 470 | US20150315612 SEQ ID NO: 117 |
| (AAV4-19) | | |
| AAVrh.56 | 471 | US20150315612 SEQ ID NO: 54 |
| AAVrh.56 | 472 | US20150315612 SEQ ID NO: 152 |
| AAVrh.57 | 473 | US20150315612 SEQ ID NO: 26 |
| AAVrh.57 | 474 | US20150315612 SEQ ID NO: 105 |
| AAVrh.58 | 475 | US20150315612 SEQ ID NO: 27 |
| AAVrh.58 | 476 | US20150159173 SEQ ID NO: 48, US20150315612 SEQ ID NO: 106 |
| AAVrh.58 | 477 | US20150315612 SEQ ID NO: 232 |
| AAVrh.59 | 478 | US20150315612 SEQ ID NO: 42 |
| AAVrh.59 | 479 | US20150315612 SEQ ID NO: 110 |
| AAVrh.60 | 480 | US20150315612 SEQ ID NO: 31 |
| AAVrh.60 | 481 | US20150315612 SEQ ID NO: 120 |
| AAVrh.61 | 482 | US20150315612 SEQ ID NO: 107 |
| AAVrh.61 | 483 | US20150315612 SEQ ID NO: 21 |
| (AAV2-3) | | |
| AAVrh.62 | 484 | US20150315612 SEQ ID No: 33 |
| (AAV2-15) | | |
| AAVrh.62 | 485 | US20150315612 SEQ ID NO: 114 |
| (AAV2-15) | | |
| AAVrh.64 | 486 | US20150315612 SEQ ID No: 15 |
| AAVrh.64 | 487 | US20150159173 SEQ ID NO: 43, US20150315612 SEQ ID NO: 99 |
| AAVrh.64 | 488 | US20150315612 SEQ ID NO: 233 |
| AAVRh.64R | 489 | US20150159173 |
| 1 | | |
| AAVRh.64R | 490 | US20150159173 |
| 2 | | |
| AAVrh.65 | 491 | US20150315612 SEQ ID NO: 35 |
| AAVrh.65 | 492 | US20150315612 SEQ ID NO: 112 |
| AAVrh.67 | 493 | US20150315612 SEQ ID NO: 36 |
| AAVrh.67 | 494 | US20150315612 SEQ ID NO: 230 |
| AAVrh.67 | 495 | US20150159173 SEQ ID NO: 47, US20150315612 SEQ ID NO: 113 |
| AAVrh.68 | 496 | US20150315612 SEQ ID NO: 16 |
| AAVrh.68 | 497 | US20150315612 SEQ ID NO: 100 |
| AAVrh.69 | 498 | US20150315612 SEQ ID NO: 39 |
| AAVrh.69 | 499 | US20150315612 SEQ ID NO: 119 |
| AAVrh.70 | 500 | US20150315612 SEQ ID NO: 20 |
| AAVrh.70 | 501 | US20150315612 SEQ ID NO: 98 |
| AAVrh.71 | 502 | US20150315612 SEQ ID NO: 162 |
| AAVrh.72 | 503 | US20150315612 SEQ ID NO: 9 |
| AAVrh.73 | 504 | US20150159173 SEQ ID NO: 5 |
| AAVrh.74 | 505 | US20150159173 SEQ ID NO: 6 |
| AAVrh.8 | 506 | US20150159173 SEQ ID NO: 41 |
| AAVrh.8 | 507 | US20150315612 SEQ ID NO: 235 |
| AAVrh.8R | 508 | US20150159173, WO2015168666 SEQ ID NO: 9 |
| AAVrh.8R | 509 | WO2015168666 SEQ ID NO: 10 |
| A586R | | |
| mutant | | |
| AAVrh.8R | 510 | WO2015168666 SEQ ID NO: 11 |
| R533A | | |
| mulam | | |
| BAAV | 511 | US9193769 SEQ ID NO: 8 |
| (bovine | | |
| AAV) | | |
| BAAV | 512 | US9193769 SEQ ID NO: 10 |
| (bovine | | |
| AAV) | | |
| BAAV | 513 | US9193769 SEQ ID NO: 4 |
| (bovine | | |
| AAV) | | |
| BAAV | 514 | US9193769 SEQ ID NO: 2 |
| (bovine | | |
| AAV) | | |
| BAAV | 515 | US9193769 SEQ ID NO: 6 |
| (bovine | | |
| AAV) | | |
| BAAV | 516 | US9193769 SEQ ID NO: 1 |
| (bovine | | |
| AAV) | | |
| BAAV | 517 | US9193769 SEQ ID NO: 5 |
| (bovine | | |
| AAV) | | |
| BAAV | 518 | US9193769 SEQ ID NO: 3 |
| (bovine | | |
| AAV) | | |
| BAAV | 519 | US9193769 SEQ ID NO: 11 |
| (bovine | | |
| AAV) | | |
| BAAV | 520 | US7427396 SEQ ID NO: 5 |
| (bovine | | |
| AAV) | | |
| BAAV | 521 | US7427396 SEQ ID NO: 6 |
| (bovine | | |
| AAV) | | |
| BAAV | 522 | US9193769 SEQ ID NO: 7 |
| (bovine | | |
| AAV) | | |
| BAAV | 523 | US9193769 SEQ ID NO: 9 |
| (bovine | | |
| AAV) | | |
| BNP61 AAV | 524 | US20150238550 SEQ ID NO: 1 |
| BNP61 AAV | 525 | US20150238550 SEQ ID NO: 2 |
| BNP62 AAV | 526 | US20150238550 SEQ ID NO: 3 |
| BNP63 AAV | 527 | US20150238550 SEQ ID NO: 4 |
| caprine AAV | 528 | US7427396 SEQ ID NO: 3 |
| caprine AAV | 529 | US7427396 SEQ ID NO: 4 |
| true type | 530 | WO2015121501 SEQ ID NO: 2 |
| AAV | | |
| (ttAAV) | | |
| AAAV | 531 | US9238800 SEQ ID NO: 12 |
| (Avian AAV) | | |
| AAAV | 532 | US9238800 SEQ ID NO: 2 |
| (Avian AAV) | | |
| AAAV | 533 | US9238800 SEQ ID NO: 6 |
| (Avian AAV) | | |
| AAAV | 534 | US9238800 SEQ ID NO: 4 |
| (Avian AAV) | | |
| AAAV | 535 | US9238800 SEQ ID NO: 8 |
| (Avian AAV) | | |
| AAAV | 536 | US9238800 SEQ ID NO: 14 |
| (Avian AAV) | | |
| AAAV | 537 | US9238800 SEQ ID NO: 10 |
| (Avian AAV) | | |
| AAAV | 538 | US9238800 SEQ ID NO: 15 |
| (Avian AAV) | | |
| AAAV | 539 | US9238800 SEQ ID NO: 5 |
| (Avian AAV) | | |
| AAAV | 540 | US9238800 SEQ ID NO: 9 |
| (Avian AAV) | | |
| AAAV | 541 | US9238800 SEQ ID NO: 3 |
| (Avian AAV) | | |
| AAAV | 542 | US9238800 SEQ ID NO: 7 |
| (Avian AAV) | | |
| AAAV | 543 | US9238800 SEQ ID NO: 11 |
| (Avian AAV) | | |
| AAAV | 544 | US9238800 SEQ ID NO: 13 |
| (Avian AAV) | | |
| AAAV | 545 | US9238800 SEQ ID NO: 1 |
| (Avian AAV) | | |
| AAV Shuffle | 546 | US20160017295 SEQ ID NO: 23 |
| 1004 | | |
| AAV Shuffle | 547 | US20160017295 SEQ ID NO: 11 |
| 1004 | | |
| AAV Shuffle | 548 | US20160017295 SEQ ID NO: 37 |
| 100-2 | | |
| AAV Shuffle | 549 | US20160017295 SEQ ID NO: 29 |
| 100-2 | | |
| AAV Shuffle | 550 | US20160017295 SEQ ID NO: 24 |
| 100-3 | | |
| AAV Shuffle | 551 | US20160017295 SEQ ID NO: 12 |
| 100-3 | | |
| AAV Shuffle | 552 | US20160017295 SEQ ID NO: 25 |
| 100-7 | | |
| AAV Shuffle | 553 | US20160017295 SEQ ID NO: 13 |
| 100-7 | | |
| AAV Shuffle | 554 | US20160017295 SEQ ID NO: 34 |
| 10-2 | | |
| AAV Shuffle | 555 | US20160017295 SEQ ID NO: 26 |
| 10-2 | | |
| AAV Shuffle | 556 | US20160017295 SEQ ID NO: 35 |
| 10-6 | | |
| AAV Shuffle | 557 | US20160017295 SEQ ID NO: 27 |
| 10-6 | | |
| AAV Shuffle | 558 | US20160017295 SEQ ID NO: 36 |
| 10-8 | | |
| AAV Shuffle | 559 | US20160017295 SEQ ID NO: 28 |
| 10-8 | | |
| AAV SM | 560 | US20160017295 SEQ ID NO: 41 |
| 100-10 | | |
| AAV SM | 561 | US20160017295 SEQ ID NO: 33 |
| 100-10 | | |
| AAV SM | 562 | US20160017295 SEQ ID NO: 40 |
| 100-3 | | |
| AAV SM | 563 | US20160017295 SEQ ID NO: 32 |
| 100-3 | | |
| AAV SM 10- | 564 | US20160017295 SEQ ID NO: 38 |
| 1 | | |
| AAV SM 10- | 565 | US20160017295 SEQ ID NO: 30 |
| 1 | | |
| AAV SM 10- | 566 | US20160017295 SEQ ID NO: 10 |
| 2 | | |
| AAV SM 10- | 567 | US20160017295 SEQ ID NO: 22 |
| 2 | | |
| AAV SM 10- | 568 | US20160017295 SEQ ID NO: 39 |
| 8 | | |
| AAV SM 10- | 569 | US20160017295 SEQ ID NO: 31 |
| 8 | | |
| AAV SM | 560 | US20160017295 SEQ ID NO: 41 |
| 100-10 | | |
| AAV SM | 561 | US20160017295 SEQ ID NO: 33 |
| 100-10 | | |
| AAV SM | 562 | US20160017295 SEQ ID NO: 40 |
| 100-3 | | |
| AAV SM | 563 | US20160017295 SEQ ID NO: 32 |
| 100-3 | | |
| AAV SM 10- | 564 | US20160017295 SEQ ID NO: 38 |
| 1 | | |
| AAV SM 10- | 565 | US20160017295 SEQ ID NO: 30 |
| 1 | | |
| AAV SM 10- | 566 | US20160017295 SEQ ID NO: 10 |
| 2 | | |
| AAV SM 10- | 567 | US20160017295 SEQ ID NO: 22 |
| 2 | | |
| AAV SM 10- | 568 | US20160017295 SEQ ID NO: 39 |
| 8 | | |
| AAV SM 10- | 569 | US20160017295 SEQ ID NO: 31 |
| 8 | | |
| AAVF1/HSC1 | 570 | WO2016049230 SEQ ID NO: 20 |
| AAVF2/HSC2 | 571 | WO2016049230 SEQ ID NO: 21 |
| AAVF3/HSC3 | 572 | WO2016049230 SEQ ID NO: 22 |
| AAVF4/HSC4 | 573 | WO2016049230 SEQ ID NO: 23 |
| AAVF5/HSC5 | 574 | WO2016049230 SEQ ID NO: 25 |
| AAVF6/HSC6 | 575 | WO2016049230 SEQ ID NO: 24 |
| AAVF7/HSC7 | 576 | WO2016049230 SEQ ID NO: 27 |
| AAVF8/HSC8 | 577 | WO2016049230 SEQ ID NO: 28 |
| AAVF9/HSC9 | 578 | WO2016049230 SEQ ID NO: 29 |
| AAVF11/HSC11 | 579 | WO2016049230 SEQ ID NO: 26 |
| AAVF12/HSC12 | 580 | WO2016049230 SEQ ID NO: 30 |
| AAVF13/HSC13 | 581 | WO2016049230 SEQ ID NO: 31 |
| AAVF14/HSC14 | 582 | WO2016049230 SEQ ID NO: 32 |
| AAVF15/HSC15 | 583 | WO2016049230 SEQ ID NO: 33 |
| AAVF16/HSC16 | 584 | WO2016049230 SEQ ID NO: 34 |
| AAVF17/HSC17 | 585 | WO2016049230 SEQ ID NO: 35 |
| AAVF1/HSC1 | 586 | WO2016049230 SEQ ID NO: 2 |
| AAVF2/HSC2 | 587 | WO2016049230 SEQ ID NO: 3 |
| AAVF3/HSC3 | 588 | WO2016049230 SEQ ID NO: 5 |
| AAVF4/HSC4 | 589 | WO2016049230 SEQ ID NO: 6 |
| AAVF5/HSC5 | 590 | WO2016049230 SEQ ID NO: 11 |
| AAVF6/HSC6 | 591 | WO2016049230 SEQ ID NO: 7 |
| AAVF7/HSC7 | 592 | WO2016049230 SEQ ID NO: 8 |
| AAVF8/HSC8 | 593 | WO2016049230 SEQ ID NO: 9 |
| AAVF9/HSC9 | 594 | WO2016049230 SEQ ID NO: 10 |
| AAVF11/HSC11 | 595 | WO2016049230 SEQ ID NO: 4 |
| AAVF12/HSC12 | 596 | WO2016049230 SEQ ID NO: 12 |
| AAVF13/HSC13 | 597 | WO2016049230 SEQ ID NO: 14 |
| AAVF14/HSC14 | 598 | WO2016049230 SEQ ID NO: 15 |
| AAVF15/HSC15 | 599 | WO2016049230 SEQ ID NO: 16 |
| AAVF16/HSC16 | 600 | WO2016049230 SEQ ID NO: 17 |
| AAVF17/HSC17 | 601 | WO2016049230 SEQ ID NO: 13 |
| AAV CBr-E1 | 602 | US8734809 SEQ ID NO: 13 |
| AAV CBr-E2 | 603 | US8734809 SEQ ID NO: 14 |
| AAV CBr-E3 | 604 | US8734809 SEQ ID NO: 15 |
| AAV CBr-E4 | 605 | US8734809 SEQ ID NO: 16 |
| AAV CBr-E5 | 606 | US8734809 SEQ ID NO: 17 |
| AAV CBr-e5 | 607 | US8734809 SEQ ID NO: 18 |
| AAV CBr-E6 | 608 | US8734809 SEQ ID NO: 19 |
| AAV CBr-E7 | 609 | US8734809 SEQ ID NO: 20 |
| AAV CBr-E8 | 610 | US8734809 SEQ ID NO: 21 |
| AAV CLv- | 611 | US8734809 SEQ ID NO: 22 |
| D1 | | |
| AAV CLv- | 612 | US8734809 SEQ ID NO: 23 |
| D2 | | |
| AAV CLv- | 613 | US8734809 SEQ ID NO: 24 |
| D3 | | |
| AAV CLv- | 614 | US8734809 SEQ ID NO: 25 |
| D4 | | |
| AAV CLv- | 615 | US8734809 SEQ ID NO: 26 |
| D5 | | |
| AAV CLv- | 616 | US8734809 SEQ ID NO: 27 |
| D6 | | |
| AAV CLv- | 617 | US8734809 SEQ ID NO: 28 |
| D7 | | |
| AAV Ctv- | 618 | US8734809 SEQ ID NO: 29 |
| 138 | | |
| AAV Ctv-E1 | 619 | US8734809 SEQ ID NO: 13 |
| AAV CLv- | 620 | US8734809 SEQ ID NO: 30 |
| R1 | | |
| AAV CLv- | 621 | US8734809 SEQ ID NO: 31 |
| R2 | | |
| AAV CLv- | 622 | US8734809 SEQ ID NO: 32 |
| R3 | | |
| AAV Ctv- | 623 | US8734809 SEQ ID NO: 33 |
| R4 | | |
| AAV CLv- | 624 | US8734809 SEQ ID NO: 34 |
| R5 | | |
| AAV CLv- | 625 | US8734809 SEQ ID NO: 35 |
| R6 | | |
| AAV CLv- | 626 | US8734809 SEQ ID NO: 36 |
| R7 | | |
| AAV CLv- | 627 | US8734809 SEQ ID NO: 37 |
| R8 | | |
| AAV CLv- | 628 | US8734809 SEQ ID NO: 38 |
| R9 | | |
| AAV CLg-F1 | 629 | US8734809 SEQ ID NO: 39 |
| AAV CLg-F2 | 630 | US8734809 SEQ ID NO: 40 |
| AAV CLg-F3 | 631 | US8734809 SEQ ID NO: 41 |
| AAV CLg-F4 | 632 | US8734809 SEQ ID NO: 42 |
| AAV CLg-F5 | 633 | US8734809 SEQ ID NO: 43 |
| AAV CLg-F6 | 634 | US8734809 SEQ ID NO: 43 |
| AAV CLg-F7 | 635 | US8734809 SEQ ID NO: 44 |
| AAV CLg-F8 | 636 | US8734809 SEQ ID NO: 43 |
| AAV CSp-1 | 637 | US8734809 SEQ ID NO: 45 |
| AAV CSp-10 | 638 | US8734809 SEQ ID NO: 46 |
| AAV CSp-11 | 639 | US8734809 SEQ ID NO: 47 |
| AAV CSp-2 | 640 | US8734809 SEQ ID NO: 48 |
| AAV CSp-3 | 641 | US8734809 SEQ ID NO: 49 |
| AAV CSp-4 | 642 | US8734809 SEQ ID NO: 50 |
| AAV CSp-6 | 643 | US8734809 SEQ ID NO: 51 |
| AAV CSp-7 | 644 | US8734809 SEQ ID NO: 52 |
| AAV CSp-8 | 645 | US8734809 SEQ ID NO: 53 |
| AAV CSp-9 | 646 | US8734809 SEQ ID NO: 54 |
| AAV CHt-2 | 647 | US8734809 SEQ ID NO: 55 |
| AAV CHt-3 | 648 | US8734809 SEQ ID NO: 56 |
| AAV CKd-1 | 649 | US8734809 SEQ ID NO: 57 |
| AAV CKd-10 | 650 | US8734809 SEQ ID NO: 58 |
| AAV CKd-2 | 651 | US8734809 SEQ ID NO: 59 |
| AAV CKd-3 | 652 | US8734809 SEQ ID NO: 60 |
| AAV CKd-4 | 653 | US8734809 SEQ ID NO: 61 |
| AAV CKd-6 | 654 | US8734809 SEQ ID NO: 62 |
| AAV CKd-7 | 655 | US8734809 SEQ ID NO: 63 |
| AAV CKd-8 | 656 | US8734809 SEQ ID NO: 64 |
| AAV CLv-1 | 657 | US8734809 SEQ ID NO: 65 |
| AAV CLv-12 | 658 | US8734809 SEQ ID NO: 66 |
| AAV CLv-13 | 659 | US8734809 SEQ ID NO: 67 |
| AAV CLv-2 | 660 | US8734809 SEQ ID NO: 68 |
| AAV CLv-3 | 661 | US8734809 SEQ ID NO: 69 |
| AAV CLv-4 | 662 | US8734809 SEQ ID NO: 70 |
| AAV CLv-6 | 663 | US8734809 SEQ ID NO: 71 |
| AAV CLv-8 | 664 | US8734809 SEQ ID NO: 72 |
| AAV CKd- | 665 | US8734809 SEQ ID NO: 73 |
| B1 | | |
| AAV CKd- | 666 | US8734809 SEQ ID NO: 74 |
| B2 | | |
| AAV CKd- | 667 | US8734809 SEQ ID NO: 75 |
| B3 | | |
| AAV CKd- | 668 | US8734809 SEQ ID NO: 76 |
| B4 | | |
| AAV CKd- | 669 | US8734809 SEQ ID NO: 77 |
| B5 | | |
| AAV CKd- | 670 | US8734809 SEQ ID NO: 78 |
| B6 | | |
| AAV CKd- | 671 | US8734809 SEQ ID NO: 79 |
| B7 | | |
| AAV CKd- | 672 | US8734809 SEQ ID NO: 80 |
| B8 | | |
| AAV CKd- | 673 | US8734809 SEQ ID NO: 81 |
| H1 | | |
| AAV CKd- | 674 | US8734809 SEQ ID NO: 82 |
| H2 | | |
| AAV CKd- | 675 | US8734809 SEQ ID NO: 83 |
| H3 | | |
| AAV CKd- | 676 | US8734809 SEQ ID NO: 84 |
| H4 | | |
| AAV CKd- | 677 | US8734809 SEQ ID NO: 85 |
| H5 | | |
| AAV CKd- | 678 | US8734809 SEQ ID NO: 77 |
| H6 | | |
| AAV CHt-1 | 679 | US8734809 SEQ ID NO: 86 |
| AAV CLv1-1 | 680 | US8734809 SEQ ID NO: 171 |
| AAV CLv1-2 | 681 | US8734809 SEQ ID NO: 172 |
| AAV CLv1-3 | 682 | US8734809 SEQ ID NO: 173 |
| AAV CLv1-4 | 683 | US8734809 SEQ ID NO: 174 |
| AAV Clv1-7 | 684 | US8734809 SEQ ID NO: 175 |
| AAV Clv1-8 | 685 | US8734809 SEQ ID NO: 176 |
| AAV Clv1-9 | 686 | US8734809 SEQ ID NO: 177 |
| AAV Clv1- | 687 | US8734809 SEQ ID NO: 178 |
| 10 | | |
| AAV.VR-355 | 688 | US8734809 SEQ ID NO: 181 |
| AAV.hu.48R | 689 | US8734809 SEQ ID NO: 183 |
| 3 | | |
| AAV CBr-E1 | 690 | US8734809 SEQ ID NO: 87 |
| AAV CBr-E2 | 691 | US8734809 SEQ ID NO: 88 |
| AAV CBr-E3 | 692 | US8734809 SEQ ID NO: 89 |
| AAV CBr-E4 | 693 | US8734809 SEQ ID NO: 90 |
| AAV CBr-E5 | 694 | US8734809 SEQ ID NO: 91 |
| AAV CBr-e5 | 695 | US8734809 SEQ ID NO: 92 |
| AAV CBr-E6 | 696 | US8734809 SEQ ID NO: 93 |
| AAV CBr-E7 | 697 | US8734809 SEQ ID NO: 94 |
| AAV CBr-E8 | 698 | US8734809 SEQ ID NO: 95 |
| AAV CLv- | 699 | US8734809 SEQ ID NO: 96 |
| D1 | | |
| AAV CLv- | 700 | US8734809 SEQ ID NO: 97 |
| D2 | | |
| AAV CLv- | 701 | US8734809 SEQ ID NO: 98 |
| D3 | | |
| AAV CLv- | 702 | US8734809 SEQ ID NO: 99 |
| D4 | | |
| AAV CLv- | 703 | US8734809 SEQ ID NO: 100 |
| D5 | | |
| AAV CLv- | 704 | US8734809 SEQ ID NO: 101 |
| D6 | | |
| AAV CLv- | 705 | US8734809 SEQ ID NO: 102 |
| D7 | | |
| AAV CLv- | 706 | US8734809 SEQ ID NO: 103 |
| D8 | | |
| AAV CLv-E1 | 707 | US8734809 SEQ ID NO: 87 |
| AAV CLv- | 708 | US8734809 SEQ ID NO: 104 |
| R1 | | |
| AAV CLv- | 709 | US8734809 SEQ ID NO: 105 |
| R2 | | |
| AAV CLv- | 710 | US8734809 SEQ ID NO: 106 |
| R3 | | |
| AAV CLv- | 711 | US8734809 SEQ ID NO: 107 |
| R4 | | |
| AAV CLv- | 712 | US8734809 SEQ ID NO: 108 |
| R5 | | |
| AAV CLv- | 713 | US8734809 SEQ ID NO: 109 |
| R6 | | |
| AAV CLv- | 714 | US8734809 SEQ ID NO: 110 |
| R7 | | |
| AAV CLv- | 715 | US8734809 SEQ ID NO: 111 |
| R8 | | |
| AAV CLv- | 716 | US8734809 SEQ ID NO: 112 |
| R9 | | |
| AAV CLg-F1 | 717 | US8734809 SEQ ID NO: 113 |
| AAV CLg-F2 | 718 | US8734809 SEQ ID NO: 114 |
| AAV CLg-F3 | 719 | US8734809 SEQ ID NO: 115 |
| AAV CLg-F4 | 720 | US8734809 SEQ ID NO: 116 |
| AAV CLg-F5 | 721 | US8734809 SEQ ID NO: 117 |
| AAV CLg-F6 | 722 | US8734809 SEQ ID NO: 117 |
| AAV CLg-F7 | 723 | US8734809 SEQ ID NO: 118 |
| AAV CLg-F8 | 724 | US8734809 SEQ ID NO: 117 |
| AAV CSp-1 | 725 | US8734809 SEQ ID NO: 119 |
| AAV CSp-10 | 726 | US8734809 SEQ ID NO: 120 |
| AAV CSp-11 | 727 | US8734809 SEQ ID NO: 121 |
| AAV CSp-2 | 728 | US8734809 SEQ ID NO: 122 |
| AAV CSp-3 | 729 | US8734809 SEQ ID NO: 123 |
| AAV CSp-4 | 730 | US8734809 SEQ ID NO: 124 |
| AAV CSp-6 | 731 | US8734809 SEQ ID NO: 125 |
| AAV CSp-7 | 732 | US8734809 SEQ ID NO: 126 |
| AAV CSp-8 | 733 | US8734809 SEQ ID NO: 127 |
| AAV CSp-9 | 734 | US8734809 SEQ ID NO: 128 |
| AAV CHt-2 | 735 | US8734809 SEQ ID NO: 129 |
| AAV CHt-3 | 736 | US8734809 SEQ ID NO: 130 |
| AAV CKd-1 | 737 | US8734809 SEQ ID NO: 131 |
| AAV CKd-10 | 738 | US8734809 SEQ ID NO: 132 |
| AAV CKd-2 | 739 | US8734809 SEQ ID NO: 133 |
| AAV CKd-3 | 740 | US8734809 SEQ ID NO: 134 |
| AAV CKd-4 | 741 | US8734809 SEQ ID NO: 135 |
| AAV CKd-6 | 742 | US8734809 SEQ ID NO: 136 |
| AAV CKd-7 | 743 | US8734809 SEQ ID NO: 137 |
| AAV CKd-8 | 744 | US8734809 SEQ ID NO: 138 |
| AAV CLv-1 | 745 | US8734809 SEQ ID NO: 139 |
| AAV CLv-2 | 746 | US8734809 SEQ ID NO: 140 |
| AAV CLv-3 | 747 | US8734809 SEQ ID NO: 141 |
| AAV CLv-2 | 748 | US8734809 SEQ ID NO: 142 |
| AAV CLv-3 | 749 | US8734809 SEQ ID NO: 143 |
| AAV CLv-4 | 750 | US8734809 SEQ ID NO: 144 |
| AAV CLv-6 | 751 | US8734809 SEQ ID NO: 145 |
| AAV CLy-8 | 752 | US8734809 SEQ ID NO: 146 |
| AAV CKd- | 753 | US8734809 SEQ ID NO: 147 |
| B1 | | |
| AAV CKd- | 754 | US8734809 SEQ ID NO: 148 |
| B2 | | |
| AAV CKd- | 755 | US8734809 SEQ ID NO: 149 |
| B3 | | |
| AAV CKd- | 756 | US8734809 SEQ ID NO: 150 |
| B4 | | |
| AAV CKd- | 757 | US8734809 SEQ ID NO: 151 |
| B5 | | |
| AAV CKd- | 758 | US8734809 SEQ ID NO: 152 |
| B6 | | |
| AAV CKd- | 759 | US8734809 SEQ ID NO: 153 |
| B7 | | |
| AAV CKd- | 760 | US8734809 SEQ ID NO: 154 |
| B8 | | |
| AAV CKd- | 761 | US8734809 SEQ ID NO: 155 |
| H1 | | |
| AAV CKd- | 762 | US8734809 SEQ ID NO: 156 |
| H2 | | |
| AAV CKd- | 763 | US8734809 SEQ ID NO: 157 |
| H3 | | |
| AAV CKd- | 764 | US8734809 SEQ ID NO: 158 |
| H4 | | |
| AAV CKd- | 765 | US8734809 SEQ ID NO: 159 |
| H5 | | |
| AAV CKd- | 766 | US8734809 SEQ ID NO: 151 |
| H6 | | |
| AAV CHt-1 | 767 | US8734809 SEQ ID NO: 160 |
| AAV CHt-P2 | 768 | WO2016065001 SEQ ID NO: 1 |
| AAV CHt-P5 | 769 | WO2016065001 SEQ ID NO: 2 |
| AAV CHt-P9 | 770 | WO2016065001 SEQ ID NO: 3 |
| AAV CBr- | 771 | WO2016065001 SEQ ID NO: 4 |
| 7.1 | | |
| AAV CBr- | 772 | WO2016065001 SEQ ID NO: 5 |
| 7.2 | | |
| AAV CBr- | 773 | WO2016065001 SEQ ID NO: 6 |
| 7.3 | | |
| AAV CBr- | 774 | WO2016065001 SEQ ID NO: 7 |
| 7.4 | | |
| AAV CBr- | 775 | WO2016065001 SEQ ID NO: 8 |
| 7.5 | | |
| AAV CBr- | 776 | WO2016065001 SEQ ID NO: 9 |
| 7.7 | | |
| AAV CBr- | 777 | WO2016065001 SEQ ID NO: 10 |
| 7.8 | | |
| AAV CBr- | 778 | WO2016065001 SEQ ID NO: 11 |
| 7.10 | | |
| AAV CKd- | 779 | WO2016065001 SEQ ID NO: 12 |
| N3 | | |
| AAV CKd- | 780 | WO2016065001 SEQ ID NO: 13 |
| N4 | | |
| AAV CKd- | 781 | WO2016065001 SEQ ID NO: 14 |
| N9 | | |
| AAV CLv-L4 | 782 | WO2016065001 SEQ ID NO: 15 |
| AAV CLv-L5 | 783 | WO2016065001 SEQ ID NO: 16 |
| AAV CLv-L6 | 784 | WO2016065001 SEQ ID NO: 17 |
| AAV CLv- | 785 | WO2016065001 SEQ ID NO: 18 |
| K1 | | |
| AAV CLv- | 786 | WO2016065001 SEQ ID NO: 19 |
| K3 | | |
| AAV CLv- | 787 | WO2016065001 SEQ ID NO: 20 |
| K6 | | |
| AAV CLv- | 788 | WO2016065001 SEQ ID NO: 21 |
| M1 | | |
| AAV CLv- | 789 | WO2016065001 SEQ ID NO: 22 |
| M11 | | |
| AAV CLv- | 790 | WO2016065001 SEQ ID NO: 23 |
| M2 | | |
| AAV CLv- | 791 | WO2016065001 SEQ ID NO: 24 |
| M5 | | |
| AAV CLv- | 792 | WO2016065001 SEQ ID NO: 25 |
| M6 | | |
| AAV CLv- | 793 | WO2016065001 SEQ ID NO: 26 |
| M7 | | |
| AAV CLv- | 794 | WO2016065001 SEQ ID NO: 27 |
| M8 | | |
| AAV CLv- | 795 | WO2016065001 SEQ ID NO: 28 |
| M9 | | |
| AAV CHt-P1 | 796 | WO2016065001 SEQ ID NO: 29 |
| AAV CHt-P6 | 797 | WO2016065001 SEQ ID NO: 30 |
| AAV CHt-P8 | 798 | WO2016065001 SEQ ID NO: 31 |
| AAV CHt- | 799 | WO2016065001 SEQ ID NO: 32 |
| 6.1 | | |
| AAV CHt- | 800 | WO2016065001 SEQ ID NO: 33 |
| 6.10 | | |
| AAV CHt- | 801 | WO2016065001 SEQ ID NO: 34 |
| 6.5 | | |
| AAV CHt- | 802 | WO2016065001 SEQ ID NO: 35 |
| 6.6 | | |
| AAV CHt- | 803 | WO2016065001 SEQ ID NO: 36 |
| 6.7 | | |
| AAV CHt- | 804 | WO2016065001 SEQ ID NO: 37 |
| 6.8 | | |
| AAV CSp- | 805 | WO2016065001 SEQ ID NO: 38 |
| 8.10 | | |
| AAV CSp- | 806 | WO2016065001 SEQ ID NO: 39 |
| 8.2 | | |
| AAV CSp- | 807 | WO2016065001 SEQ ID NO: 40 |
| 8.4 | | |
| AAV CSp- | 808 | WO2016065001 SEQ ID NO: 41 |
| 8.5 | | |
| AAV CSp- | 809 | WO2016065001 SEQ ID NO: 42 |
| 8.6 | | |
| AAV CSp- | 810 | WO2016065001 SEQ ID NO: 43 |
| 8.7 | | |
| AAV CSp- | 811 | WO2016065001 SEQ ID NO: 44 |
| 8.8 | | |
| AAV CSp- | 812 | WO2016065001 SEQ ID NO: 45 |
| 8.9 | | |
| AAV CBr- | 813 | WO2016065001 SEQ ID NO: 46 |
| B7.3 | | |
| AAV CBr- | 814 | WO2016065001 SEQ ID NO: 47 |
| B7.4 | | |
| AAV3B | 815 | WO2016065001 SEQ ID NO: 48 |
| AAV4 | 816 | WO2016065001 SEQ ID NO: 49 |
| AAV5 | 817 | WO2016065001 SEQ ID NO: 50 |
| AAV CHt-P2 | 818 | WO2016065001 SEQ ID NO: 51 |
| AAV CHt-P5 | 819 | WO2016065001 SEQ ID NO: 52 |
| AAV CHt-P9 | 820 | WO2016065001 SEQ ID NO: 53 |
| AAV CBr- | 821 | WO2016065001 SEQ ID NO: 54 |
| 7.1 | | |
| AAV CBr- | 822 | WO2016065001 SEQ ID NO: 55 |
| 7.2 | | |
| AAV CBr- | 823 | WO2016065001 SEQ ID NO: 56 |
| 7.3 | | |
| AAV CBr- | 824 | WO2016065001 SEQ ID NO: 57 |
| 7.4 | | |
| AAV CBr- | 825 | WO2016065001 SEQ ID NO: 58 |
| 7.5 | | |
| AAV CBr- | 826 | WO2016065001 SEQ ID NO: 59 |
| 7.7 | | |
| AAV CBr- | 827 | WO2016065001 SEQ ID NO: 60 |
| 7.8 | | |
| AAV CBr- | 828 | WO2016065001 SEQ ID NO: 61 |
| 7.10 | | |
| AAV CKd- | 829 | WO2016065001 SEQ ID NO: 62 |
| N3 | | |
| AAV CKd- | 830 | WO2016065001 SEQ ID NO: 63 |
| N4 | | |
| AAV CKd- | 831 | WO2016C65001 SEQ ID NO: 64 |
| N9 | | |
| AAV CLv-L4 | 832 | WO2016065001 SEQ ID NO: 65 |
| AAV CLv-L5 | 833 | WO2016065001 SEQ ID NO: 66 |
| AAV CLv-L6 | 834 | WO2016065001 SEQ ID NO: 67 |
| AAV CLv- | 835 | WO2016065001 SEQ ID NO: 68 |
| K1 | | |
| AAV CLv- | 836 | WO2016065001 SEQ ID NO: 69 |
| K3 | | |
| AAV CLv- | 837 | WO2016065001 SEQ ID NO: 70 |
| K6 | | |
| AAV CLv- | 838 | WO2016065001 SEQ ID NO: 71 |
| M1 | | |
| AAV CLv- | 839 | WO2016065001 SEQ ID NO: 72 |
| M11 | | |
| AAV CLv- | 840 | WO2016065001 SEQ ID NO: 73 |
| M2 | | |
| AAV CLv- | 841 | WO2016065001 SEQ ID NO: 74 |
| M5 | | |
| AAV CLv- | 842 | WO2016065001 SEQ ID NO 75 |
| M6 | | |
| AAV CLv- | 843 | WO2016065001 SEQ ID NO: 76 |
| M7 | | |
| AAV CLv- | 844 | WO2016065001 SEQ ID NO: 77 |
| M8 | | |
| AAV CLv- | 845 | WO2016065001 SEQ ID NO: 78 |
| M9 | | |
| AAV CHt-P1 | 846 | WO2016065001 SEQ ID NO: 79 |
| AAV CHt-P6 | 847 | WO2016065001 SEQ ID NO: 80 |
| AAV CHt-P8 | 848 | WO2016065001 SEQ ID NO: 81 |
| AAV CHt- | 849 | WO2016065001 SEQ ID NO: 82 |
| 6.1 | | |
| AAV CHt- | 850 | WO2016065001 SEQ ID NO: 83 |
| 6.10 | | |
| AAV CHt- | 851 | WO2016065001 SEQ ID NO: 84 |
| 6.5 | | |
| AAV CHI- | 852 | WO2016065001 SEQ ID NO: 85 |
| 6.6 | | |
| AAV CHt- | 853 | WO2016065001 SEQ ID NO: 86 |
| 6.7 | | |
| AAV CHt- | 854 | WO2016065001 SEQ ID NO: 87 |
| 6.8 | | |
| AAV CSp- | 855 | WO2016065001 SEQ ID NO: 88 |
| 8.10 | | |
| AAV CSp- | 856 | WO2016065001 SEQ ID NO: 89 |
| 8.2 | | |
| AAV CSp- | 857 | WO2016065001 SEQ ID NO: 90 |
| 8.4 | | |
| AAV CSp- | 858 | WO2016065001 SEQ ID NO: 91 |
| 8.5 | | |
| AAV CSp- | 859 | WO2016065001 SEQ ID NO: 92 |
| 8.6 | | |
| AAV CSp- | 860 | WO2016065001 SEQ ID NO: 93 |
| 8.7 | | |
| AAV CSp- | 861 | WO2016065001 SEQ ID NO: 94 |
| 8.8 | | |
| AAV CSp- | 862 | WO2016C65001 SEQ ID NO: 95 |
| 8.9 | | |
| AAV CBr- | 863 | WO2016065001 SEQ ID NO: 96 |
| B7.3 | | |
| AAV CBr- | 864 | WO2016065001 SEQ ID NO: 97 |
| B7.4 | | |
| AAV3B | 865 | WO2016065001 SEQ ID NO: 98 |
| AAV4 | 866 | WO2016065001 SEQ ID NO: 99 |
| AAV5 | 867 | WO2016065001 SEQ ID NO: 100 |
| AAVPHP.B | 868 | WO2015038958 SEQ ID NO: 8 and 13; GenBankALUS85156.1 |
| or G2B-26 | | |
| AAVPHP.B | 869 | WO2015038958 SEQ ID NO: 9 |
| AAVG2B-13 | 870 | WO2015038958 SEQ ID NO: 12 |
| AAVTH1.1- | 871 | WO2015038958 SEQ ID NO: 14 |
| 32 | | |
| AAVTH1.1- | 872 | WO2015038958 SEQ ID NO: 15 |
| 35 | | |
| PHP.N/PHP.B-DGT | 1418 | WO2017100671 SEQ ID NO: 46 |
| PHP.S/G2A12 | 1419 | WO2017100671 SEQ ID NO: 47 |
| AAV9/hu.14 | 1420 | WO2017100671 SEQ ID NO: 45 |
| K449R | | |
| GPV | 1421 | US9624274B2 SEQ ID NO: 192 |
| B19 | 1422 | US9624274B2 SEQ ID NO: 193 |
| MVM | 1423 | US9624274B2 SEQ ID NO: 194 |
| FPV | 1424 | US9624274B2 SEQ ID NO: 195 |
| CPV | 1425 | US9624274B2 SEQ ID NO: 196 |
| AAV6 | 1426 | US9546112B2 SEQ ID NO: 5 |
| AAV6 | 1427 | US9457103B2 SEQ ID NO: 1 |
| AAV2 | 1428 | US9457103B2 SEQ ID NO: 2 |
| ShH10 | 1429 | US9457103B2 SEQ ID NO: 3 |
| ShH13 | 1430 | US9457103B2 SEQ ID NO: 4 |
| ShH10 | 1431 | US9457103B2 SEQ ID NO: 5 |
| ShH10 | 1432 | US9457103B2 SEQ ID NO:6 |
| ShH10 | 1433 | US9457103B2 SEQ ID NO: 7 |
| ShH10 | 1434 | US9457103B2 SEQ ID NO: 8 |
| ShH10 | 1435 | US9457103B2 SEQ ID NO: 9 |
| rh74 | 1436 | US9434928B2 SEQ ID NO: 1, US2015023924A1 SEQ ID NO: 2 |
| rh74 | 1437 | US9434928B2 SEQ ID NO: 2, US2015023924A1 SEQ ID NO: 1 |
| AAV8 | 1438 | US9434928B2 SEQ ID NO: 4 |
| rh74 | 1439 | US9434928B2 SEQ ID NO: 5 |
| rh74 (RHM4- | 1440 | US2015023924A1 SEQ ID NO: 5, US20160375110A1 SEQ ID NO: 4 |
| 1) | | |
| rh74 | 1441 | US2015023924A1 SEQ ID NO: 6, US20160375110A1 SEQ ID NO: 5 |
| (RHM15-1) | | |
| rh74 | 1442 | US2015023924A1 SEQ ID NO: 7, US20160375110A1 SEQ ID NO: 6 |
| (RHM15-2) | | |
| rh74 | 1443 | US2015023924A1 SEQ ID NO: 8, US20160375110A1 SEQ ID NO: 7 |
| (RHM15- | | |
| 3/RhM15-5) | | |
| rh74 | 1444 | US2015023924A1 SEQ ID NO: 9, US20160375110A1 SEQ ID NO: 8 |
| (RHM15-4) | | |
| rh74 | 1445 | US2015023924A1 SEQ ID NO: 10, US20160375110A1 SEQ ID NO: 9 |
| (RHM15-6) | | |
| rh74 (RHM4- | 1446 | US2015023924A1 SEQ ID NO: 11 |
| 1) | | |
| rh74 | 1447 | US2015023924A1 SEQ ID NO: 12 |
| (RHM15-1) | | |
| rh74 | 1448 | US2015023924A1 SEQ ID NO: 13 |
| (RHM15-2) | | |
| rh74 | 1449 | US2015023924A1 SEQ ID NO: 14 |
| (RHM15- | | |
| 3/RHM15-5) | | |
| rh74 | 1450 | US2015023924A1 SEQ ID NO: 15 |
| (RHM15-4) | | |
| rh74 | 1451 | US2015023924A1 SEQ ID NO: 16 |
| (RHM15-6) | | |
| AAV2 | 1452 | US20160175389A1 SEQ ID NO: 9 |
| (comprising | | |
| lung specific | | |
| polypeptide) | | |
| AAV2 | 1453 | US20160175389A1 SEQ ID NO: 10 |
| (comprising | | |
| lung specific | | |
| polypeptide) | | |
| Anc80 | 1454 | US20170051257A1 SEQ ID NO: 1 |
| Anc80 | 1455 | US20170051257A1 SEQ ID NO: 2 |
| Anc81 | 1456 | US20170051257A1 SEQ ID NO: 3 |
| Anc80 | 1457 | US20170051257A1 SEQ ID NO: 4 |
| Anc82 | 1458 | US20170051257A1 SEQ ID NO: 5 |
| Anc82 | 1459 | US20170051257A1 SEQ ID NO: 6 |
| Anc83 | 1460 | US20170051257A1 SEQ ID NO: 7 |
| Anc83 | 1461 | US20170051257A1 SEQ ID NO: 8 |
| Anc84 | 1462 | US20170051257A1 SEQ ID NO: 9 |
| Anc84 | 1463 | US20170051257A1 SEQ ID NO: 10 |
| Anc94 | 1464 | US20170051257A1 SEQ ID NO: 11 |
| Anc94 | 1465 | US20170051257A1 SEQ ID NO: 12 |
| Anc113 | 1466 | US20170051257A1 SEQ ID NO: 13 |
| Anc113 | 1467 | US20170051257A1 SEQ ID NO: 14 |
| Anc126 | 1468 | US20170051257A1 SEQ ID NO: 15 |
| Anc126 | 1469 | US20170051257A1 SEQ ID NO: 16 |
| Anc127 | 1470 | US20170051257A1 SEQ ID NO: 17 |
| Anc127 | 1471 | US20170051257A1 SEQ ID NO: 18 |
| Anc80L27 | 1472 | US20170051257A1 SEQ ID NO: 19 |
| Anc80L59 | 1473 | US20170051257A1 SEQ ID NO: 20 |
| Anc80L60 | 1474 | US20170051257A1 SEQ ID NO: 21 |
| Anc80L62 | 1475 | US20170051257A1 SEQ ID NO: 22 |
| Anc80L65 | 1476 | US20170051257A1 SEQ ID NO: 23 |
| Anc80L33 | 1477 | US20170051257A1 SEQ ID NO: 24 |
| Anc80L36 | 1478 | US20170051257A1 SEQ ID NO: 25 |
| Anc80L44 | 1479 | US20170051257A1 SEQ ID NO: 26 |
| Anc80L1 | 1480 | US20170051257A1 SEQ ID NO: 35 |
| Anc80L1 | 1481 | US20170051257A1 SEQ ID NO: 36 |
| AAV-X1 | 1482 | US8283151B2 SEQ ID NO: 11 |
| AAV-X1b | 1483 | US8283151B2 SEQ ID NO: 12 |
| AAV-X5 | 1484 | US8283151B2 SEQ ID NO: 13 |
| AAV-X19 | 1485 | US8283151B2 SEQ ID NO: 14 |
| AAV-X21 | 1486 | US8283151B2 SEQ ID NO: 15 |
| AAV-X22 | 1487 | US8283151B2 SEQ ID NO: 16 |
| AAV-X23 | 1488 | US8283151B2 SEQ ID NO: 17 |
| AAV-X24 | 1489 | US8283151B2 SEQ ID NO: 18 |
| AAV-X75 | 1490 | US8283151B2 SEQ ID NO: 19 |
| AAV-X26 | 1491 | US8283151B2 SEQ ID NO: 20 |
| AAV-X1 | 1492 | US8283151B2 SEQ ID NO: 21 |
| AAV-X1b | 1493 | US8283151B2 SEQ ID NO: 22 |
| AAV-X5 | 1494 | US8283151B2 SEQ ID NO: 23 |
| AAV-X19 | 1495 | US8283151B2 SEQ ID NO: 24 |
| AAV-X21 | 1496 | US8283151B2 SEQ ID NO: 25 |
| AAV-X22 | 1497 | US8283151B2 SEQ ID NO: 26 |
| AAV-X23 | 1498 | US8283151B2 SEQ H) NO: 27 |
| AAV-X24 | 1499 | US8283151B2 SEQ ID NO: 28 |
| AAV-X25 | 1500 | US8283151B2 SEQ ID NO: 29 |
| AAV-X26 | 1501 | US8283151B2 SEQ ID NO: 30 |
| AAVrh8 | 1502 | WO2016054554A1 SEQ ID NO: 8 |
| AAVrh8VP2 | 1503 | WO2016054554A1 SEQ ID NO: 9 |
| FC5 | | |
| AAVrh8VP2 | 1504 | WO2016054554A1 SEQ ID NO: 10 |
| FC44 | | |
| AAVrh8VP2 | 1505 | WO2016054554A1 SEQ ID NO: 11 |
| ApoB100 | | |
| AAVrh8VP2 | 1506 | WO2016054554A1 SEQ ID NO: 12 |
| RVG | | |
| AAVrh8VP2 | 1507 | WO2016054554A1 SEQ ID NO: 13 |
| Angiopep-2 | | |
| VP2 | | |
| AAV9.47VP | 1508 | WO2016054554A1 SEQ ID NO: 14 |
| 1.3 | | |
| AAV9.47VP | 1509 | WO2016054554A1 SEQ ID NO: 15 |
| 2ICAMg3 | | |
| AAV9.47VP | 1510 | WO2016054554A1 SEQ ID NO: 16 |
| 2RVG | | |
| AAV9.47VP | 1511 | WO2016054554A1 SEQ ID NO: 17 |
| 2Angiopep-2 | | |
| AAV9,47VP | 1512 | WO2016054554A1 SEQ ID NO: 18 |
| 2A-string | | |
| AAVrh8VP2 | 1513 | WO2016054554A1 SEQ ID NO: 19 |
| FC5 VP2 | | |
| AAVrh8VP2 | 1514 | WO2016054554A1 SEQ ID NO: 20 |
| FC44 VP2 | | |
| AAVrh8VP2 | 1515 | WO2016054554A1 SEQ ID NO: 21 |
| ApoB100 | | |
| VP2 | | |
| AAVrh8VP2 | 1516 | WO2016054554A1 SEQ ID NO: 22 |
| RVG VP2 | | |
| AAVrh8VP2 | 1517 | WO2016054554A1 SEQ ID NO: 23 |
| Angiopep-2 | | |
| VP2 | | |
| AAV9.47VP | 1518 | WO2016054554A1 SEQ ID NO: 24 |
| 2ICAMg3 | | |
| VP2 | | |
| AAV9.47-VP | 1519 | WO2016054554A1 SEQ ID NO: 25 |
| 2RVG VP2 | | |
| AAV9.47VP | 1520 | WO2016054554A1 SEQ ID NO: 26 |
| 2Angiopep-2 | | |
| VP2 | | |
| AAV9.47VP | 1521 | WO2016054554A1 SEQ ID NO: 27 |
| 2A-string | | |
| VP2 | | |
| rAAV-B1 | 1522 | WO2016054557A1 SEQ ID NO: 1 |
| rAAV-B2 | 1523 | WO2016054557A1 SEQ ID NO: 2 |
| rAAV-B3 | 1524 | WO2016054557A1 SEQ ID NO: 3 |
| rAAV-B4 | 1525 | WO2016054557A1 SEQ ID NO: 4 |
| rAAV-B1 | 1526 | WO2016054557A1 SEQ ID NO: 5 |
| rAAV-B2 | 1527 | WO2016054557A1 SEQ ID NO: 6 |
| rAAV-B3 | 1528 | WO2016054557A1 SEQ ID NO: 7 |
| rAAV-B4 | 1529 | WO2016054557A1 SEQ ID NO: 8 |
| rAAV-L1 | 1530 | WO2016054557A1 SEQ ID NO: 9 |
| rAAV-L2 | 1531 | WO2016054557A1 SEQ ID NO: 10 |
| rAAV-L3 | 1532 | WO2016054557A1 SEQ ID NO: 11 |
| rAAV-L4 | 1533 | WO2016054557A1 SEQ ID NO: 12 |
| rAAV-L1 | 1534 | WO2016054557A1 SEQ ID NO: 13 |
| rAAV-L2 | 1535 | WO2016054557A1 SEQ ID NO: 14 |
| rAAV-L3 | 1536 | WO2016054557A1 SEQ ID NO: 15 |
| rAAV-L4 | 1537 | WO2016054557A1 SEQ ID NO: 16 |
| AAV9 | 1538 | WO2016073739A1 SEQ ID NO: 3 |
| rAAV | 1539 | WO2016081811A1 SEQ ID NO: 1 |
| rAAV | 1540 | WO2016081811A1 SEQ ID NO: 2 |
| rAAV | 1541 | WO2016081811A1 SEQ ID NO: 3 |
| rAAV | 1542 | WO2016081811A1 SEQ ID NO: 4 |
| rAAV | 1543 | WO2016081811A1 SEQ ID NO: 5 |
| rAAV | 1544 | WO2016081811A1 SEQ ID NO: 6 |
| rAAV | 1545 | WO2016081811A1 SEQ ID NO: 7 |
| rAAV | 1546 | WO2016081811A1 SEQ ID NO: 8 |
| rAAV | 1547 | WO2016081811A1 SEQ ID NO: 9 |
| rAAV | 1548 | WO2016081811A1 SEQ ID NO: 10 |
| rAAV | 1549 | WO2016081811A1 SEQ ID NO: 11 |
| rAAV | 1550 | WO2016081811A1 SEQ ID NO: 12 |
| rAAV | 1551 | WO2016081811A1 SEQ ID NO: 13 |
| rAAV | 1552 | WO2016081811A1 SEQ ID NO: 14 |
| rAAV | 1553 | WO2016081811A1 SEQ ID NO: 15 |
| rAAV | 1554 | WO2016081811A1 SEQ ID NO: 16 |
| rAAV | 1555 | WO2016081811A1 SEQ ID NO: 17 |
| rAAV | 1556 | WO2016081811A1 SEQ ID NO: 18 |
| rAAV | 1557 | WO2016081811A1 SEQ ID NO: 19 |
| rAAV | 1558 | WO2016081811A1 SEQ ID NO: 20 |
| rAAV | 1559 | WO2016081811A1 SEQ ID NO: 21 |
| rAAV | 1560 | WO2016081811A1 SEQ ID NO: 22 |
| rAAV | 1561 | WO2016081811A1 SEQ ID NO: 23 |
| rAAV | 1562 | WO2016081811A1 SEQ ID NO: 24 |
| rAAV | 1563 | WO2016081811A1 SEQ ID NO: 25 |
| rAAV | 1564 | WO2016081811A1 SEQ ID NO: 26 |
| rAAV | 1565 | WO2016081811A1 SEQ ID NO: 27 |
| rAAV | 1566 | WO2016081811A1 SEQ ID NO: 28 |
| rAAV | 1567 | WO2016081811A1 SEQ ID NO: 29 |
| rAAV | 1568 | WO2016081811A1 SEQ ID NO: 30 |
| rAAV | 1569 | WO2016081811A1 SEQ ID NO: 31 |
| rAAV | 1570 | WO2016081811A1 SEQ ID NO: 32 |
| rAAV | 1571 | WO2016081811A1 SEQ ID NO: 33 |
| rAAV | 1572 | WO2016081811A1 SEQ ID NO: 34 |
| rAAV | 1573 | WO2016081811A1 SEQ ID NO: 35 |
| rAAV | 1574 | WO2016081811A1 SEQ ID NO: 36 |
| rAAV | 1575 | WO2016081811A1 SEQ ID NO: 37 |
| rAAV | 1576 | WO2016081811A1 SEQ ID NO: 38 |
| rAAV | 1577 | WO2016081811A1 SEQ ID NO: 39 |
| rAAV | 1578 | WO2016081811A1 SEQ ID NO: 40 |
| rAAV | 1579 | WO2016081811A1 SEQ ID NO: 41 |
| rAAV | 1580 | WO2016081811A1 SEQ ID NO: 42 |
| rAAV | 1581 | WO2016081811A1 SEQ ID NO: 43 |
| rAAV | 1582 | WO2016081811A1 SEQ ID NO: 44 |
| rAAV | 1583 | WO2016081811A1 SEQ ID NO: 45 |
| rAAV | 1584 | WO2016081811A1 SEQ ID NO: 46 |
| rAAV | 1585 | WO2016081811A1 SEQ ID NO: 47 |
| rAAV | 1586 | WO2016081811A1 SEQ ID NO: 48 |
| rAAV | 1587 | WO2016081811A1 SEQ ID NO: 49 |
| rAAV | 1588 | WO2016081811A1 SEQ ID NO: 50 |
| rAAV | 1589 | WO2016081811A1 SEQ ID NO: 51 |
| rAAV | 1590 | WO2016081811A1 SEQ ID NO: 52 |
| rAAV | 1591 | WO2016081811A1 SEQ ID NO: 53 |
| rAAV | 1592 | WO2016081811A1 SEQ ID NO: 54 |
| rAAV | 1593 | WO2016081811A1 SEQ ID NO: 55 |
| rAAV | 1594 | WO2016081811A1 SEQ ID NO: 56 |
| rAAV | 1595 | WO2016081811A1 SEQ ID NO: 57 |
| rAAV | 1596 | WO2016081811A1 SEQ ID NO: 58 |
| rAAV | 1597 | WO2016081811A1 SEQ ID NO: 59 |
| rAAV | 1598 | WO2016081811A1 SEQ ID NO: 60 |
| rAAV | 1599 | WO2016081811A1 SEQ ID NO: 61 |
| rAAV | 1600 | WO2016081811A1 SEQ ID NO: 62 |
| rAAV | 1601 | WO2016081811A1 SEQ ID NO: 63 |
| rAAV | 1602 | WO2016081811A1 SEQ ID NO: 64 |
| rAAV | 1603 | WO2016081811A1 SEQ ID NO: 65 |
| rAAV | 1604 | WO2016081811A1 SEQ ID NO: 66 |
| rAAV | 1605 | WO2016081811A1 SEQ ID NO: 67 |
| rAAV | 1606 | WO2016081811A1 SEQ ID NO: 68 |
| rAAV | 1607 | WO2016081811A1 SEQ ID NO: 69 |
| rAAV | 1608 | WO2016081811A1 SEQ ID NO: 70 |
| rAAV | 1609 | WO2016081811A1 SEQ ID NO: 71 |
| rAAV | 1610 | WO2016081811A1 SEQ ID NO: 72 |
| rAAV | 1611 | WO2016081811A1 SEQ ID NO: 73 |
| rAAV | 1612 | WO2016081811A1 SEQ ID NO: 74 |
| rAAV | 1613 | WO2016081811A1 SEQ ID NO: 75 |
| rAAV | 1614 | WO2016081811A1 SEQ ID NO: 76 |
| rAAV | 1615 | WO2016081811A1 SEQ ID NO: 77 |
| rAAV | 1616 | WO2016081811A1 SEQ ID NO: 78 |
| rAAV | 1617 | WO2016081811A1 SEQ ID NO: 79 |
| rAAV | 1618 | WO2016081811A1 SEQ ID NO: 80 |
| rAAV | 1619 | WO2016081811A1 SEQ ID NO: 81 |
| rAAV | 1620 | WO2016081811A1 SEQ ID NO: 82 |
| rAAV | 1621 | WO2016081811A1 SEQ ID NO: 83 |
| rAAV | 1622 | WO2016081811A1 SEQ ID NO: 84 |
| rAAV | 1623 | WO2016081811A1 SEQ ID NO: 85 |
| rAAV | 1624 | WO2016081811A1 SEQ ID NO: 86 |
| rAAV | 1625 | WO2016081811A1 SEQ ID NO: 87 |
| rAAV | 1626 | WO2016081811A1 SEQ ID NO: 88 |
| rAAV | 1627 | WO2016081811A1 SEQ ID NO: 89 |
| rAAV | 1628 | WO2016081811A1 SEQ ID NO: 90 |
| rAAV | 1629 | WO2016081811A1 SEQ ID NO: 91 |
| rAAV | 1630 | WO2016081811A1 SEQ ID NO: 92 |
| rAAV | 1631 | WO2016081811A1 SEQ ID NO: 93 |
| rAAV | 1632 | WO2016081811A1 SEQ ID NO: 94 |
| rAAV | 1633 | WO2016081811A1 SEQ ID NO: 95 |
| rAAV | 1634 | WO2016081811A1 SEQ ID NO: 96 |
| rAAV | 1635 | WO2016081811A1 SEQ ID NO: 97 |
| rAAV | 1636 | WO2016081811A1 SEQ ID NO: 98 |
| rAAV | 1637 | WO2016081811A1 SEQ ID NO: 99 |
| rAAV | 1638 | WO2016081811A1 SEQ ID NO: 100 |
| rAAV | 1639 | WO2016081811A1 SEQ ID NO: 101 |
| rAAV | 1640 | WO2016081811A1 SEQ ID NO: 102 |
| rAAV | 1641 | WO2016081811A1 SEQ ID NO: 103 |
| rAAV | 1642 | WO2016081811A1 SEQ ID NO: 104 |
| rAAV | 1643 | WO2016081811A1 SEQ ID NO: 105 |
| rAAV | 1644 | WO2016081811A1 SEQ ID NO: 106 |
| rAAV | 1645 | WO2016081811A1 SEQ ID NO: 107 |
| rAAV | 1646 | WO2016081811A1 SEQ ID NO: 108 |
| rAAV | 1647 | WO2016081811A1 SEQ ID NO: 109 |
| rAAV | 1648 | WO2016081811A1 SEQ ID NO: 110 |
| rAAV | 1649 | WO2016081811A1 SEQ ID NO: 111 |
| rAAV | 1650 | WO2016081811A1 SEQ ID NO: 112 |
| rAAV | 1651 | WO2016081811A1 SEQ ID NO: 113 |
| rAAV | 1652 | WO2016081811A1 SEQ ID NO: 114 |
| rAAV | 1653 | WO2016081811A1 SEQ ID NO: 115 |
| rAAV | 1654 | WO2016081811A1 SEQ ID NO: 116 |
| rAAV | 1655 | WO2016081811A1 SEQ ID NO: 117 |
| rAAV | 1656 | WO2016081811A1 SEQ ID NO: 118 |
| rAAV | 1657 | WO2016081811A1 SEQ ID NO: 119 |
| rAAV | 1658 | WO2016081811A1 SEQ ID NO: 120 |
| rAAV | 1659 | WO2016081811A1 SEQ ID NO: 121 |
| rAAV | 1660 | WO2016081811A1 SEQ ID NO: 122 |
| rAAV | 1661 | WO2016081811A1 SEQ ID NO: 123 |
| rAAV | 1662 | WO2016081811A1 SEQ ID NO: 124 |
| rAAV | 1663 | WO2016081811A1 SEQ ID NO: 125 |
| rAAV | 1664 | WO2016081811A1 SEQ ID NO: 126 |
| rAAV | 1665 | WO2016081811A1 SEQ ID NO: 127 |
| rAAV | 1666 | WO2016081811A1 SEQ ID NO: 128 |
| AAV8 | 1667 | WO2016081811A1 SEQ ID NO: 133 |
| E532K | | |
| AAV8 | 1668 | WO2016081811A1 SEQ ID NO: 134 |
| E532K | | |
| rAAV4 | 1669 | WO2016115382A1 SEQ ID NO: 2 |
| rAAV4 | 1670 | WO2016115382A1 SEQ ID NO: 3 |
| rAAV4 | 1671 | WO2016115382A1 SEQ ID NO: 4 |
| rAAV4 | 1672 | WO2016115382A1 SEQ ID NO: 5 |
| rAAV4 | 1673 | WO2016115382A1 SEQ ID NO: 6 |
| rAAV4 | 1674 | WO2016115382A1 SEQ ID NO: 7 |
| rAAV4 | 1675 | WO2016115382A1 SEQ ID NO: 8 |
| rAAV4 | 1676 | WO2016115382A1 SEQ ID NO: 9 |
| rAAV4 | 1677 | WO2016115382A1 SEQ ID NO: 10 |
| rAAV4 | 1678 | WO2016115382A1 SEQ ID NO: 11 |
| rAAV4 | 1679 | WO2016115382A1 SEQ ID NO: 12 |
| rAAV4 | 1680 | WO2016145382A1 SEQ ID NO: 13 |
| rAAV4 | 1681 | WO2016115382A1 SEQ ID NO: 14 |
| rAAV4 | 1682 | WO2016115382A1 SEQ ID NO: 15 |
| rAAV4 | 1683 | WO2016115382A1 SEQ ID NO: 16 |
| rAAV4 | 1684 | WO2016115382A1 SEQ ID NO: 17 |
| rAAV4 | 1685 | WO2016145382A1 SEQ ID NO: 18 |
| rAAV4 | 1686 | WO2016115382A1 SEQ ID NO: 19 |
| rAAV4 | 1687 | WO2016115382A1 SEQ ID NO: 20 |
| rAAV4 | 1688 | WO2016115382A1 SEQ ID NO: 21 |
| AAV11 | 1689 | WO2016115382A1 SEQ ID NO: 22 |
| AAV12 | 1690 | WO2016115382A1 SEQ ID NO: 23 |
| rh32 | 1691 | WO2016115382A1 SEQ ID NO: 25 |
| rh33 | 1692 | WO2016115382A1 SEQ ID NO: 26 |
| rh34 | 1693 | WO2016145382A1 SEQ ID NO: 27 |
| rAAV4 | 1694 | WO2016115382A1 SEQ ID NO: 28 |
| rAAV4 | 1695 | WO2016115382A1 SEQ ID NO: 29 |
| rAAV4 | 1696 | WO2016115382A1 SEQ ID NO: 30 |
| rAAV4 | 1697 | WO2016115382A1 SEQ ID NO: 31 |
| rAAV4 | 1698 | WO2016145382A1 SEQ ID NO: 32 |
| rAAV4 | 1699 | WO2016115382A1 SEQ ID NO: 33 |
| AAV2/8 | 1700 | WO2016131981A1 SEQ ID NO: 47 |
| AAV2/8 | 1701 | WO2016131981A1 SEQ ID NO: 48 |
| ancestral | 1702 | WO2016154344A1 SEQ ID NO: 7 |
| AAV | | |
| ancestral | 1703 | WO2016154344A1 SEQ ID NO: 13 |
| AAV variant | | |
| C4 | | |
| ancestral | 1704 | WO2016154344A1 SEQ ID NO: 14 |
| AAV variant | | |
| C7 | | |
| ancestral | 1705 | WO2016154344A1 SEQ ID NO: 15 |
| AAV variant | | |
| G4 | | |
| consensus | 1706 | WO2016154344A1 SEQ ID NO: 16 |
| amino acid | | |
| sequence of | | |
| ancestral | | |
| AAV | | |
| variants, C4. | | |
| C7 and G4 | | |
| consensus | 1707 | WO2016154344A1 SEQ ID NO: 17 |
| amino acid | | |
| sequence of | | |
| ancesiral | | |
| AAV | | |
| variants, C4 | | |
| and C7 | | |
| AAV8 (with | 1708 | WO2016150403A1 SEQ ID NO: 13 |
| a AAV2 | | |
| phospholipase | | |
| domain) | | |
| AAV VR- | 1709 | US20160289275A1 SEQ ID NO: 10 |
| 942n | | |
| AAV5-A | 1710 | US20160289275A1 SEQ ID NO: 13 |
| (M569V) | | |
| AAV5-A | 1711 | US20160289275A1 SEQ ID NO: 14 |
| (M569V) | | |
| AAV5-A | 1712 | US20160289275A1 SEQ ID NO: 16 |
| (Y585V) | | |
| AAV5-A | 1713 | US20160289275A1 SEQ ID NO: 17 |
| (Y585V) | | |
| AAV5-A | 1714 | US20160289275A1 SEQ ID NO: 19 |
| (L587T) | | |
| AAV5-A | 1715 | US20160289275A1 SEQ ID NO: 20 |
| (L587T) | | |
| AAV5-A | 1716 | US20160289275A1 SEQ ID NO: 22 |
| (Y585V/L587T) | | |
| AAV5-A | 1717 | US20160289275A1 SEQ ID NO: 23 |
| (Y585V/L1587T) | | |
| AAV5-B | 1718 | US20160289275A1 SEQ ID NO: 25 |
| (D652A) | | |
| AAV5-B | 1719 | US20160289275A1 SEQ ID NO: 26 |
| (D652A) | | |
| AAV5-B | 1720 | US20160289275A1 SEQ ID NO: 28 |
| (T362M) | | |
| AAV5-B | 1721 | US20160289275A1 SEQ ID NO: 29 |
| (T362M) | | |
| AAV5-B | 1722 | US20160289275A1 SEQ ID NO: 31 |
| (Q359D) | | |
| AAV5-B | 1723 | US20160289275A1 SEQ ID NO: 32 |
| (Q359D) | | |
| AAV5-B | 1724 | US20160289275A1 SEQ ID NO: 34 |
| (E350Q) | | |
| AAV5-B | 1725 | US20160289275A1 SEQ ID NO: 35 |
| (E350Q) | | |
| AAV5-B | 1726 | US20160289275A1 SEQ ID NO: 37 |
| (P533S) | | |
| AAV5-B | 1727 | US20160289275A1 SEQ ID NO: 38 |
| (P5335) | | |
| AAV5-B | 1728 | US20160289275A1 SEQ ID NO: 40 |
| (P533G) | | |
| AAV5-13 | 1729 | US20160289275A1 SEQ ID NO: 41 |
| (P533G) | | |
| AAV5- | 1730 | US20160289275A1 SEQ ID NO: 43 |
| mutation in | | |
| loop VII | | |
| AAV5- | 1731 | US20160289275A1 SEQ ID NO: 44 |
| muiation in | | |
| loop VII | | |
| AAV8 | 1732 | US20160289275A1 SEQ ID NO: 47 |
| Mut A | 1733 | WO2016181123A1 SEQ ID NO: 1 |
| (LK03/AAV8) | | |
| Mut B | 1734 | WO2016181123A1 SEQ ID NO: 2 |
| (LK03/AAV5) | | |
| Mut C | 1735 | WO2016181123A1 SEQ ID NO: 3 |
| (AAV8/AAV3B) | | |
| Mut D | 1736 | WO2016181123A1 SEQ ID NO: 4 |
| (AAV5/AAV3B) | | |
| Mut E | 1737 | WO2016181123A1 SEQ ID NO: 5 |
| (AAV8/AAV3B) | | |
| Mut F | 1738 | WO2016181123A1 SEQ ID NO: 6 |
| (AAV3B/AAV8) | | |
| AAV44.9 | 1739 | WO2016183297A1 SEQ ID NO: 4 |
| AAV44.9 | 1740 | WO2016183297A1 SEQ ID NO: 5 |
| AAVrh8 | 1741 | WO2016183297A1 SEQ ID NO: 6 |
| AAV44.9 | 1742 | WO2016183297A1 SEQ ID NO: 9 |
| (S470N) | | |
| rh74 VP1 | 1743 | US20160375110A1 SEQ ID NO: 1 |
| AAV-LK03 | 1744 | WO2017015102A1 SEQ ID NO: 5 |
| (L125I) | | |
| AAV3B | 1745 | WO2017015102A1 SEQ ID NO: 6 |
| (S663V + T492V) | | |
| Anc80 | 1746 | WO2017019994A2 SEQ ID NO: 1 |
| Anc80 | 1747 | WO2017019994A2 SEQ ID NO: 2 |
| Anc81 | 1748 | WO2017019994A2 SEQ ID NO: 3 |
| Anc81 | 1749 | WO2017019994A2 SEQ ID NO: 4 |
| Anc82 | 1750 | WO2017019994A2 SEQ ID NO: 5 |
| Anc82 | 1751 | WO2017019994A2 SEQ ID NO: 6 |
| Anc83 | 1752 | WO2017019994A2 SEQ ID NO: 7 |
| Anc83 | 1753 | WO2017019994A2 SEQ ID NO: 8 |
| Anc84 | 1754 | WO2017019994A2 SEQ ID NO: 9 |
| Anc84 | 1755 | WO2017019994A2 SEQ ID NO: 10 |
| Anc94 | 1756 | WO2017019994A2 SEQ ID NO: 11 |
| Anc94 | 1757 | WO2017019994A2 SEQ ID NO: 12 |
| Anc113 | 1758 | WO2017019994A2 SEQ ID NO: 13 |
| Anc113 | 1759 | WO2017019994A2 SEQ ID NO: 14 |
| Anc126 | 1760 | WO2017019994A2 SEQ ID NO: 15 |
| Anc126 | 1761 | WO2017019994A2 SEQ ID NO: 16 |
| Anc127 | 1762 | WO2017019994A2 SEQ ID NO: 17 |
| Anc127 | 1763 | WO2017019994A2 SEQ ID NO: 18 |
| Anc80L27 | 1764 | WO2017019994A2 SEQ ID NO: 19 |
| Anc80L59 | 1765 | WO2017019994A2 SEQ ID NO: 20 |
| Anc80L60 | 1766 | WO2017019994A2 SEQ ID NO: 21 |
| Anc80L62 | 1767 | WO2017019994A2 SEQ ID NO: 22 |
| Anc80L65 | 1768 | WO2017019994A2 SEQ ID NO: 23 |
| Anc80L33 | 1769 | WO2017019994A2 SEQ ID NO: 24 |
| Anc80L36 | 1770 | WO2017019994A2 SEQ ID NO: 25 |
| Anc80L44 | 1771 | WO2017019994A2 SEQ ID NO: 26 |
| Anc80L1 | 1772 | WO2017019994A2 SEQ ID NO: 35 |
| Anc80L1 | 1773 | WO2017019994A2 SEQ ID NO: 36 |
| AAVrh10 | 1774 | WO2017019994A2 SEQ ID NO: 41 |
| Anc110 | 1775 | WO2017019994A2 SEQ ID NO: 42 |
| Anc110 | 1776 | WO2017019994A2 SEQ ID NO: 43 |
| AAVrh32.33 | 1777 | WO2017019994A2 SEQ ID NO: 45 |
| AAVrh74 | 1778 | WO2017049031A1 SEQ ID NO: 1 |
| AAV2 | 1779 | WO2017053629A2 SEQ ID NO: 49 |
| AAV2 | 1780 | WO2017053629A2 SEQ ID NO: 50 |
| AAV2 | 1781 | WO2017053629A2 SEQ ID NO: 82 |
| Parvo-like | 1782 | WO2017070476A2 SEQ ID NO: 1 |
| virus | | |
| Parvo-like | 1783 | WO2017070476A2 SEQ ID NO: 2 |
| virus | | |
| Parvo-like | 1784 | WO2017070476A2 SEQ ID NO: 3 |
| virus | | |
| Parvo-like | 1785 | WO2017070476A2 SEQ ID NO: 4 |
| virus | | |
| Parvo-like | 1786 | WO2017070476A2 SEQ ID NO: 5 |
| virus | | |
| Parvo-like | 1787 | WO2017070476A2 SEQ ID NO: 6 |
| virus | | |
| AAVrh.10 | 1788 | WO2017070516A1 SEQ ID NO: 7 |
| AAVrh.10 | 1789 | WO2017070516A1 SEQ ID NO: 14 |
| AAV2tYF | 1790 | WO2017070491A1 SEQ ID NO: 1 |
| AAV-SPK | 1791 | WO2017075619A1 SEQ ID NO:28 |
| AAV2.5 | 1792 | US20170128528A1 SEQ ID NO: 13 |
| AAV1.1 | 1793 | US20170128528A1 SEQ ID NO: 15 |
| AAV6.1 | 1794 | US20170128528A1 SEQ ID NO: 17 |
| AAV6.3.1 | 1795 | US20170128528A1 SEQ ID NO: 18 |
| AAV2i8 | 1796 | US20170128528A1 SEQ ID NO: 28 |
| AAV2i8 | 1797 | US20170128528A1 SEQ ID NO: 29 |
| ttAAV | 1798 | US20170128528A1 SEQ ID NO: 30 |
| ttAAV- | 1799 | US20170128528A1 SEQ ID NO: 32 |
| S312N | | |
| ttAAV- | 1800 | US20170128528A1 SEQ ID NO: 33 |
| S312N | | |
| AAV6 | 1801 | WO2016134337A1 SEQ ID NO: 24 |
| (Y705, Y731, | | |
| and T492) | | |
| AAV2 | 1802 | WO2016134375A1 SEQ ID NO: 9 |
| AAV2 | 1803 | WO2016134375A1 SEQ ID NO: 10 |

[0097] Each of the patents, applications and/or publications listed in Table 1 are hereby incorporated b) reference in their entirety.

[0098] In one embodiment, the AAV serotype may be, or may have a sequence as described in International Patent Publication WO2015038958, the contents of which are herein incorporated by reference in their entirety, such as, but not limited to, AAV9 (SEQ ID NO: 2 and 11 of WO2015038958 or SEQ ID NO: 127 and 126 respectively herein), PHP.B (SEQ ID NO: 8 and 9 of WO2015038958, herein SEQ ID NO: 868 and 869), G2B-13 (SEQ ID NO: 12 of WO2015038958, herein SEQ ID NO: 870), G2B-26 (SEQ ID NO: 13 of WO2015038958, herein SEQ ID NO: 868 and 869), TH1.1-32 (SEQ ID NO: 14 of WO2015038958, herein SEQ ID NO: 871), TH1.1-35 (SEQ ID NO: 15 of WO2015038958, herein SEQ ID NO: 872) or variants thereof. Further, any of the targeting peptides or amino acid inserts described in WO2015038958, may be inserted into any parent AAV serotype, such as, but not limited to, AAV9 (SEQ ID NO: 126 for the DNA sequence and SEQ ID NO: 127 for the amino acid sequence). In one embodiment, the amino acid insert is inserted between amino acids 586-592 of the parent AAV (e.g., AAV9). In another embodiment, the amino acid insert is inserted between amino acids 588-589 of the parent AAV sequence. The amino acid insert may be, but is not limited to, any of the following amino acid sequences, TLAVPFK (SEQ ID NO: 1 of WO2015038958; herein SEQ ID NO: 873), KFPVALT (SEQ ID NO: 3 of WO2015038958; herein SEQ ID NO: 874), LAVPFK (SEQ ID NO: 31 of WO2015038958; herein SEQ ID NO: 875), AVPFK (SEQ ID NO: 32 of WO2015038958; herein SEQ ID NO: 876), VPFK (SEQ ID NO: 33 of WO2015038958; herein SEQ ID NO: 877), TLAVPF (SEQ ID NO: 34 of WO2015038958; herein SEQ ID NO: 878), TLAVP (SEQ ID NO: 35 of WO2015038958; herein SEQ ID NO: 879), TLAV (SEQ ID NO: 36 of WO2015038958; herein SEQ ID NO: 880), SVSKPFL (SEQ ID NO: 28 of WO2015038958; herein SEQ ID NO: 881), FTLTTPK (SEQ ID NO: 29 of WO2015038958; herein SEQ ID NO: 882), MNATKNV (SEQ ID NO: 30 of WO2015038958; herein SEQ ID NO: 883), QSSQTPR (SEQ ID NO: 54 of WO2015038958; herein SEQ ID NO: 884), ILGTGTS (SEQ ID NO: 55 of WO2015038958; herein SEQ ID NO: 885), TRTNPEA (SEQ ID NO: 56 of WO2015038958; herein SEQ ID NO: 886), NGGTSSS (SEQ ID NO: 58 of WO2015038958; herein SEQ ID NO: 887), or YTLSQGW (SEQ ID NO: 60 of WO2015038958; herein SEQ ID NO: 888). Non-limiting examples of nucleotide sequences that may encode the amino acid inserts include the following, AAGTTTCCTGTGGCGTTGACT (for SEQ ID NO: 3 of WO2015038958; herein SEQ ID NO: 889), ACTTTGGCGGTGCCTTTTAAG (SEQ ID NO: 24 and 49 of WO2015038958; herein SEQ ID NO: 890), AGTGTGAGTAAGCCTTTTTTG (SEQ ID NO: 25 of WO2015038958; herein SEQ ID NO: 891), TTTACGTTGACGACGCCTAAG (SEQ ID NO: 26 of WO2015038958; herein SEQ ID NO: 892), ATGAATGCTACGAAGAATGTG (SEQ ID NO: 27 of WO2015038958; herein SEQ ID NO: 893), CAGTCGTCGCAGACGCCTAGG (SEQ ID NO: 48 of WO2015038958; herein SEQ ID NO: 894), ATTCTGGGGACTGGTACTTCG (SEQ ID NO: 50 and 52 of WO2015038958; herein SEQ ID NO: 895), ACGCGGACTAATCCTGAGGCT (SEQ ID NO: 51 of WO2015038958; herein SEQ ID NO: 896), AATGGGGGGACTAGTAGTTCT (SEQ ID NO: 53 of WO2015038958; herein SEQ ID NO: 897), or TATACTTTGTCGCAGGGTTGG (SEQ ID NO: 59 of WO2015038958; herein SEQ ID NO: 898).

[0099] In one embodiment, the AAV serotype may be engineered to comprise at least one AAV capsid CD8+ T-cell epitope for AAV2 such as, but not limited to, SADNNNSEY (SEQ ID NO: 899), LIDQYLYYL (SEQ ID NO: 900), VPQYGYLTL (SEQ ID NO: 901), TTSTRTWAL (SEQ ID NO: 902), YHLNGRDSL (SEQ ID NO: 903), SQAVGRSSF (SEQ ID NO: 904), VPANPSTTF (SEQ ID NO: 905), FPQSGVLIF (SEQ ID NO: 906), YFDFNRFHCHFSPRD (SEQ ID NO: 907), VGNSSGNWHCDSTWM (SEQ ID NO: 908), QFSQAGASDIRDQSR (SEQ ID NO: 909), GASDIRQSRNWLP (SEQ ID NO: 910) and GNRQAATADVNTQGV (SEQ ID NO: 911).

[0100] In one embodiment, the AAV serotype may be engineered to comprise at least one AAV capsid CD8+ T-cell epitope for AAV1 such as, but not limited to, LDRLMNPLI (SEQ ID NO: 912), TTSTRTWAL (SEQ ID NO: 902), and QPAKKRLNF (SEQ ID NO: 913)).

[0101] In one embodiment, the AAV serotype may be, or may have a sequence as described in International Patent Publication WO2017100671, the contents of which are herein incorporated by reference in their entirety, such as, but not limited to, AAV9 (SEQ ID NO: 45 of WO2017100671, herein SEQ ID NO: 1420), PHP.N (SEQ ID NO: 46 of WO2017100671, herein SEQ ID NO: 1418), PHP.S (SEQ ID NO: 47 of WO2017100671, herein SEQ ID NO: 1419), or variants thereof. Further, any of the targeting peptides or amino acid inserts described in WO2017100671 may be inserted into any parent AAV serotype, such as, but not limited to, AAV9 (SEQ ID NO: 127 or SEQ ID NO: 1420). In one embodiment, the amino acid insert is inserted between amino acids 586-592 of the parent AAV (e.g., AAV9). In another embodiment, the amino acid insert is inserted between amino acids 588-589 of the parent AAV sequence. The amino acid insert may be, but is not limited to, any of the following amino acid sequences, AQTLAVPFKAQ (SEQ ID NO: 1 of WO2017100671; herein SEQ ID NO: 1804), AQSVSKPFLAQ (SEQ ID NO: 2 of WO2017100671; herein SEQ ID NO: 1805), AQFTLTTPKAQ (SEQ ID NO: 3 in the sequence listing of WO2017100671; herein SEQ ID NO: 1806), DGTLAVPFKAQ (SEQ ID NO: 4 in the sequence listing of WO2017100671; herein SEQ ID NO: 1807), ESTLAVPFKAQ (SEQ ID NO: 5 of WO2017100671; herein SEQ ID NO: 1808), GGTLAVPFKAQ (SEQ ID NO: 6 of WO2017100671; herein SEQ ID NO: 1809), AQTLATPFKAQ (SEQ ID NO: 7 and 33 of WO2017100671; herein SEQ ID NO: 1810), ATTLATPFKAQ (SEQ ID NO: 8 of WO2017100671; herein SEQ ID NO: 1811), DGTLATPFKAQ (SEQ ID NO: 9 of WO2017100671; herein SEQ ID NO: 1812), GGTLATPFKAQ (SEQ ID NO: 10 of WO2017100671; herein SEQ ID NO: 1813), SGSLAVPFKAQ (SEQ ID NO: 11 of WO2017100671; herein SEQ ID NO: 1814), AQTLAQPFKAQ (SEQ ID NO: 12 of WO2017100671; herein SEQ ID NO: 1815), AQTLQQPFKAQ (SEQ ID NO: 13 of WO2017100671; herein SEQ ID NO: 1816), AQTLSNPFKAQ (SEQ ID NO: 14 of WO2017100671; herein SEQ ID NO: 1817), AQTLAVPFSNP (SEQ ID NO: 15 of WO2017100671; herein SEQ ID NO: 1818), QGTLAVPFKAQ (SEQ ID NO: 16 of WO2017100671; herein SEQ ID NO: 1819), NQTLAVPFKAQ (SEQ ID NO: 17 of WO2017100671; herein SEQ ID NO: 1820), EGSLAVPFKAQ (SEQ ID NO: 18 of WO2017100671; herein SEQ ID NO: 1821), SGNLAVPFKAQ (SEQ ID NO: 19 of WO2017100671; herein SEQ ID NO: 1822), EGTLAVPFKAQ (SEQ ID NO: 20 of WO2017100671; herein SEQ ID NO: 1823), DSTLAVPFKAQ (SEQ ID NO: 21 in Table 1 of WO2017100671; herein SEQ ID NO: 1824), AVTLAVPFKAQ (SEQ ID NO: 22 of WO2017100671; herein SEQ ID NO: 1825), AQTLSTPFKAQ (SEQ ID NO: 23 of WO2017100671; herein SEQ ID NO: 1826), AQTLPQPFKAQ (SEQ ID NO: 24 and 32 of WO2017100671; herein SEQ ID NO: 1827), AQTLSQPFKAQ (SEQ ID NO: 25 of WO2017100671; herein SEQ ID NO: 1828), AQTLQLPFKAQ (SEQ ID NO: 26 of WO2017100671; herein SEQ ID NO: 1829), AQTLTMPFKAQ (SEQ ID NO: 27, and 34 of WO2017100671 and SEQ ID NO: 35 in the sequence listing of WO2017100671; herein SEQ ID NO: 1830), AQTLTTPFKAQ (SEQ ID NO: 28 of WO2017100671; herein SEQ ID NO: 1831), AQYTLSQGWAQ (SEQ ID NO: 29 of WO2017100671; herein SEQ ID NO: 1832), AQMNATKNVAQ (SEQ ID NO: 30 of WO2017100671; herein SEQ ID NO: 1833), AQVSGGHHSAQ (SEQ ID NO: 31 of WO2017100671; herein SEQ ID NO: 1834), AQTLTAPFKAQ (SEQ ID NO: 35 in Table 1 of WO2017100671; herein SEQ ID NO: 1835), AQTLSKPFKAQ (SEQ ID NO: 36 of WO2017100671; herein SEQ ID NO: 1836), QAVRTSL (SEQ ID NO: 37 of WO2017100671; herein SEQ ID NO: 1837), YTLSQGW (SEQ ID NO: 38 of WO2017100671; herein SEQ ID NO: 888), LAKERLS (SEQ ID NO: 39 of WO2017100671; herein SEQ ID NO: 1838), TLAVPFK (SEQ ID NO: 40 in the sequence listing of WO2017100671; herein SEQ ID NO: 873), SVSKPFL (SEQ ID NO: 41 of WO2017100671; herein SEQ ID NO: 881), FTLTTPK (SEQ ID NO: 42 of WO2017100671; herein SEQ ID NO: 882), MNSTKNV (SEQ ID NO: 43 of WO2017100671; herein SEQ ID NO: 1839), VSGGHHS (SEQ ID NO: 44 of WO2017100671; herein SEQ ID NO: 1840), SAQTLAVPFKAQAQ (SEQ ID NO: 48 of WO2017100671; herein SEQ ID NO: 1841), SXXXLAVPFKAQAQ (SEQ ID NO: 49 of WO2017100671 wherein X may be any amino acid; herein SEQ ID NO: 1842), SAQXXXVPFKAQAQ (SEQ ID NO: 50 of WO2017100671 wherein X may be any amino acid; herein SEQ ID NO: 1843), SAQTLXXXFKAQAQ (SEQ ID NO: 51 of WO2017100671 wherein X may be any amino acid; herein SEQ ID NO: 1844), SAQTLAVXXXAQAQ (SEQ ID NO: 52 of WO2017100671 wherein X may be any amino acid; herein SEQ ID NO: 1845), SAQTLAVPFXXXAQ (SEQ ID NO: 53 of WO2017100671 wherein X may be any amino acid; herein SEQ ID NO: 1846), TNHQSAQ (SEQ ID NO: 65 of WO2017100671; herein SEQ ID NO: 1847), AQAQTGW (SEQ ID NO: 66 of WO2017100671; herein SEQ ID NO: 1848), DGTLATPFK (SEQ ID NO: 67 of WO2017100671; herein SEQ ID NO: 1849), DGTLATPFKXX (SEQ ID NO: 68 of WO2017100671 wherein X may be any amino acid; herein SEQ ID NO: 1850), LAVPFKAQ (SEQ ID NO: 80 of WO2017100671; herein SEQ ID NO: 1851), VPFKAQ (SEQ ID NO: 81 of WO2017100671; herein SEQ ID NO: 1852), FKAQ (SEQ ID NO: 82 of WO2017100671; herein SEQ ID NO: 1853), AQTLAV (SEQ ID NO: 83 of WO2017100671; herein SEQ ID NO: 1854), AQTLAVPF (SEQ ID NO: 84 of WO2017100671; herein SEQ ID NO: 1855), QAVR (SEQ ID NO: 85 of WO2017100671; herein SEQ ID NO: 1856), AVRT (SEQ ID NO: 86 of WO2017100671; herein SEQ ID NO: 1857), VRTS (SEQ ID NO: 87 of WO2017100671; herein SEQ ID NO: 1858), RTSL (SEQ ID NO: 88 of WO2017100671; herein SEQ ID NO: 1859), QAVRT (SEQ ID NO: 89 of WO2017100671; herein SEQ ID NO: 1860), AVRTS (SEQ ID NO: 90 of WO2017100671; herein SEQ ID NO: 1861), VRTSL (SEQ ID NO: 91 of WO2017100671; herein SEQ ID NO: 1862), QAVRTS (SEQ ID NO: 92 of WO2017100671; herein SEQ ID NO: 1863), or AVRTSL (SEQ ID NO: 93 of WO2017100671; herein SEQ ID NO: 1864).

[0102] Non-limiting examples of nucleotide sequences that may encode the amino acid inserts include the following, GATGGGACTTTGGCGGTGCCTTTTAAGGCACAG (SEQ ID NO: 54 of WO2017100671; herein SEQ ID NO: 1865), GATGGGACGTTGGCGGTGCCTTTTAAGGCACAG (SEQ ID NO: 55 of WO2017100671; herein SEQ ID NO: 1866), CAGGCGGTTAGGACGTCTTTG (SEQ ID NO: 56 of WO2017100671; herein SEQ ID NO: 1867), CAGGTCTTCACGGACTCAGACTATCAG (SEQ ID NO: 57 and 78 of WO2017100671; herein SEQ ID NO: 1868), CAAGTAAAACCTCTACAAATGTGGTAAAATCG (SEQ ID NO: 58 of WO2017100671; herein SEQ ID NO: 1869), ACTCATCGACCAATACTTGTACTATCTCTCTAGAAC (SEQ ID NO: 59 of WO2017100671; herein SEQ ID NO: 1870), GGAAGTATTCCTTGGTTTTGAACCCA (SEQ ID NO: 60 of WO2017100671; herein SEQ ID NO: 1871), GGTCGCGGTTCTTGTTTGTGGAT (SEQ ID NO: 61 of WO2017100671; herein SEQ ID NO: 1872), CGACCTTGAAGCGCATGAACTCCT (SEQ ID NO: 62 of WO2017100671; herein SEQ ID NO: 1873), GTATTCCTTGGTTTTGAACCCAACCGGTCTGCGCCTGTGCMNNMNNMNNMNNMNNMN NMNNTTGGGCACTCTGGTGGTTTGTC (SEQ ID NO: 63 of WO2017100671 wherein N may be A, C, T, or G; herein SEQ ID NO: 1874), GTATTCCTTGGTTTTGAACCCAACCGGTCTGCGCMNNMNNMNNAAAAGGCACCGCCA AAGTTTG (SEQ ID NO: 69 of WO2017100671 wherein N may be A, C, T, or G; herein SEQ ID NO: 1875), GTATTCCTTGGTTTTGAACCCAACCGGTCTGCGCCTGTGCMNNMNNMNNCACCGCCAA AGTTTGGGCACT (SEQ ID NO: 70 of WO2017100671 wherein N may be A, C, T, or G; herein SEQ ID NO: 1876), GTATTCCTTGGTTTTGAACCCAACCGGTCTGCGCCTGTGCCTTAAAMNNMNNMNNCAA AGTTTGGGCACTCTGGTGG (SEQ ID NO: 71 of WO2017100671 wherein N may be A, C, T, or G; herein SEQ ID NO: 1877), GTATTCCTTGGTTTTGAACCCAACCGGTCTGCGCCTGTGCCTTAAAAGGCACMNNMNN MNNTTGGGCACTCTGGTGGTTTGTG (SEQ ID NO: 72 of WO2017100671 wherein N may be A, C, T, or G; herein SEQ ID NO: 1878), ACTTTGGCGGTGCCTTTTAAG (SEQ ID NO: 74 of WO2017100671; herein SEQ ID NO: 890), AGTGTGAGTAAGCCTTTTTTG (SEQ ID NO: 75 of WO2017100671; herein SEQ ID NO: 891), TTTACGTTGACGACGCCTAAG (SEQ ID NO: 76 of WO2017100671; herein SEQ ID NO: 892), TATACTTTGTCGCAGGGTTGG (SEQ ID NO: 77 of WO2017100671; herein SEQ ID NO: 898), or CTTGCGAAGGAGCGGCTTTCG (SEQ ID NO: 79 of WO2017100671; herein SEQ ID NO: 1879).

[0103] In one embodiment, the AAV serotype may be, or may have a sequence as described in U.S. Pat. No. 9,624,274, the contents of which are herein incorporated by reference in their entirety, such as, but not limited to, AAV1 (SEQ ID NO: 181 of U.S. Pat. No. 9,624,274), AAV6 (SEQ ID NO: 182 of U.S. Pat. No. 9,624,274), AAV2 (SEQ ID NO: 183 of U.S. Pat. No. 9,624,274), AAV3b (SEQ ID NO: 184 of U.S. Pat. No. 9,624,274), AAV7 (SEQ ID NO: 185 of U.S. Pat. No. 9,624,274), AAV8 (SEQ ID NO: 186 of U.S. Pat. No. 9,624,274), AAV10 (SEQ ID NO: 187 of U.S. Pat. No. 9,624,274), AAV4 (SEQ ID NO: 188 of U.S. Pat. No. 9,624,274), AAV11 (SEQ ID NO: 189 of U.S. Pat. No. 9,624,274), bAAV (SEQ ID NO: 190 of U.S. Pat. No. 9,624,274), AAV5 (SEQ ID NO: 191 of U.S. Pat. No. 9,624,274), GPV (SEQ ID NO: 192 of U.S. Pat. No. 9,624,274; herein SEQ ID NO: 1421), B19 (SEQ ID NO: 193 of U.S. Pat. No. 9,624,274; herein SEQ ID NO: 1422), MVM (SEQ ID NO: 194 of U.S. Pat. No. 9,624,274; herein SEQ ID NO: 1423), FPV (SEQ ID NO: 195 of U.S. Pat. No. 9,624,274; herein SEQ ID NO: 1424), CPV (SEQ ID NO: 196 of U.S. Pat. No. 9,624,274; herein SEQ ID NO: 1425) or variants thereof. Further, any of the structural protein inserts described in U.S. Pat. No. 9,624,274, may be inserted into, but not limited to, I-453 and I-587 of any parent AAV serotype, such as, but not limited to, AAV2 (SEQ ID NO: 183 of U.S. Pat. No. 9,624,274). The amino acid insert may be, but is not limited to, any of the following amino acid sequences, VNLTWSRASG (SEQ ID NO: 50 of U.S. Pat. No. 9,624,274; herein SEQ ID NO: 1880), EFCINHRGYWVCGD (SEQ ID NO:55 of U.S. Pat. No. 9,624,274; herein SEQ ID NO: 1881), EDGQVMDVDLS (SEQ ID NO: 85 of U.S. Pat. No. 9,624,274; herein SEQ ID NO: 1882), EKQRNGTLT (SEQ ID NO: 86 of U.S. Pat. No. 9,624,274; herein SEQ ID NO: 1883), TYQCRVTHPHLPRALMR (SEQ ID NO: 87 of U.S. Pat. No. 9,624,274; herein SEQ ID NO: 1884), RHSTTQPRKTKGSG (SEQ ID NO: 88 of U.S. Pat. No. 9,624,274; herein SEQ ID NO: 1885), DSNPRGVSAYLSR (SEQ ID NO: 89 of U.S. Pat. No. 9,624,274; herein SEQ ID NO: 1886), TITCLWDLAPSK (SEQ ID NO: 90 of U.S. Pat. No. 9,624,274; herein SEQ ID NO: 1887), KTKGSGFFVF (SEQ ID NO: 91 of U.S. Pat. No. 9,624,274; herein SEQ ID NO: 1888), THPHLPRALMRS (SEQ ID NO: 92 of U.S. Pat. No. 9,624,274; herein SEQ ID NO: 1889), GETYQCRVTHPHLPRALMRSTTK (SEQ ID NO: 93 of U.S. Pat. No. 9,624,274; herein SEQ ID NO: 1890), LPRALMRS (SEQ ID NO: 94 of U.S. Pat. No. 9,624,274; herein SEQ ID NO: 1891), INHRGYWV (SEQ ID NO: 95 of U.S. Pat. No. 9,624,274; herein SEQ ID NO: 1892), CDAGSVRTNAPD (SEQ ID NO: 60 of U.S. Pat. No. 9,624,274; herein SEQ ID NO: 1893), AKAVSNLTESRSESLQS (SEQ ID NO: 96 of U.S. Pat. No. 9,624,274; herein SEQ ID NO: 1894), SLTGDEFKKVLET (SEQ ID NO: 97 of U.S. Pat. No. 9,624,274; herein SEQ ID NO: 1895), REAVAYRFEED (SEQ ID NO: 98 of U.S. Pat. No. 9,624,274; herein SEQ ID NO: 1896), INPEIITLDG (SEQ ID NO: 99 of U.S. Pat. No. 9,624,274; herein SEQ ID NO: 1897), DISVTGAPVITATYL (SEQ ID NO: 100 of U.S. Pat. No. 9,624,274; herein SEQ ID NO: 1898), DISVTGAPVITA (SEQ ID NO: 101 of U.S. Pat. No. 9,624,274; herein SEQ ID NO: 1899), PKTVSNLTESSSESVQS (SEQ ID NO: 102 of U.S. Pat. No. 9,624,274; herein SEQ ID NO: 1900), SLMGDEFKAVLET (SEQ ID NO: 103 of U.S. Pat. No. 9,624,274; herein SEQ ID NO: 1901), QHSVAYTFEED (SEQ ID NO: 104 of U.S. Pat. No. 9,624,274; herein SEQ ID NO: 1902), INPEIITRDG (SEQ ID NO: 105 of U.S. Pat. No. 9,624,274; herein SEQ ID NO: 1903), DISLTGDPVITASYL (SEQ ID NO: 106 of U.S. Pat. No. 9,624,274; herein SEQ ID NO: 1904), DISLTGDPVITA (SEQ ID NO: 107 of U.S. Pat. No. 9,624,274; herein SEQ ID NO: 1905), DQSIDFEIDSA (SEQ ID NO: 108 of U.S. Pat. No. 9,624,274; herein SEQ ID NO: 1906), KNVSEDLPLPTFSPTLLGDS (SEQ ID NO: 109 of U.S. Pat. No. 9,624,274; herein SEQ ID NO: 1907), KNVSEDLPLPT (SEQ ID NO: 110 of U.S. Pat. No. 9,624,274; herein SEQ ID NO: 1908), CDSGRVRTDAPD (SEQ ID NO: 111 of U.S. Pat. No. 9,624,274; herein SEQ ID NO: 1909), FPEHLLVDFLQSLS (SEQ ID NO: 112 of U.S. Pat. No. 9,624,274; herein SEQ ID NO: 1910), DAEFRHDSG (SEQ ID NO: 65 of U.S. Pat. No. 9,624,274; herein SEQ ID NO: 1911), HYAAAQWDFGNTMCQL (SEQ ID NO: 113 of U.S. Pat. No. 9,624,274; herein SEQ ID NO: 1912), YAAQWDFGNTMCQ (SEQ ID NO: 114 of U.S. Pat. No. 9,624,274; herein SEQ ID NO: 1913), RSQKEGLHYT (SEQ ID NO: 115 of U.S. Pat. No. 9,624,274; herein SEQ ID NO: 1914), SSRTPSDKPVAHWANPQAE (SEQ ID NO: 116 of U.S. Pat. No. 9,624,274; herein SEQ ID NO: 1915), SRTPSDKPVAHWANP (SEQ ID NO: 117 of U.S. Pat. No. 9,624,274; herein SEQ ID NO: 1916), SSRTPSDKP (SEQ ID NO: 118 of U.S. Pat. No. 9,624,274; herein SEQ ID NO: 1917), NADGNVDYHMNSVP (SEQ ID NO: 119 of U.S. Pat. No. 9,624,274; herein SEQ ID NO: 1918), DGNVDYHMNSV (SEQ ID NO: 120 of U.S. Pat. No. 9,624,274; herein SEQ ID NO: 1919), RSFKEFLQSSLRALRQ (SEQ ID NO: 121 of U.S. Pat. No. 9,624,274; herein SEQ ID NO: 1920); FKEFLQSSLRA (SEQ ID NO: 122 of U.S. Pat. No. 9,624,274; herein SEQ ID NO: 1921), or QMWAPQWGPD (SEQ ID NO: 123 of U.S. Pat. No. 9,624,274; herein SEQ ID NO: 1922).

[0104] In one embodiment, the AAV serotype may be, or may have a sequence as described in U.S. Pat. No. 9,475,845, the contents of which are herein incorporated by reference in their entirety, such as, but not limited to, AAV capsid proteins comprising modification of one or more amino acids at amino acid positions 585 to 590 of the native AAV2 capsid protein. Further the modification may result in, but not limited to, the amino acid sequence RGNRQA (SEQ ID NO: 3 of U.S. Pat. No. 9,475,845; herein SEQ ID NO: 1923), SSSTDP (SEQ ID NO: 4 of U.S. Pat. No. 9,475,845; herein SEQ ID NO: 1924), SSNTAP (SEQ ID NO: 5 of U.S. Pat. No. 9,475,845; herein SEQ ID NO: 1925), SNSNLP (SEQ ID NO: 6 of U.S. Pat. No. 9,475,845; herein SEQ ID NO: 1926), SSTTAP (SEQ ID NO: 7 of U.S. Pat. No. 9,475,845; herein SEQ ID NO: 1927), AANTAA (SEQ ID NO: 8 of U.S. Pat. No. 9,475,845; herein SEQ ID NO: 1928), QQNTAP (SEQ ID NO: 9 of U.S. Pat. No. 9,475,845; herein SEQ ID NO: 1929), SAQAQA (SEQ ID NO: 10 of U.S. Pat. No. 9,475,845; herein SEQ ID NO: 1930), QANTGP (SEQ ID NO: 11 of U.S. Pat. No. 9,475,845; herein SEQ ID NO: 1931), NATTAP (SEQ ID NO: 12 of U.S. Pat. No. 9,475,845; herein SEQ ID NO: 1932), SSTAGP (SEQ ID NO: 13 and 20 of U.S. Pat. No. 9,475,845; herein SEQ ID NO: 1933), QQNTAA (SEQ ID NO: 14 of U.S. Pat. No. 9,475,845; herein SEQ ID NO: 1934), PSTAGP (SEQ ID NO: 15 of U.S. Pat. No. 9,475,845; herein SEQ ID NO: 1935), NQNTAP (SEQ ID NO: 16 of U.S. Pat. No. 9,475,845; herein SEQ ID NO: 1936), QAANAP (SEQ ID NO: 17 of U.S. Pat. No. 9,475,845; herein SEQ ID NO: 1937), SIVGLP (SEQ ID NO: 18 of U.S. Pat. No. 9,475,845; herein SEQ ID NO: 1938), AASTAA (SEQ ID NO: 19, and 27 of U.S. Pat. No. 9,475,845; herein SEQ ID NO: 1939), SQNTTA (SEQ ID NO: 21 of U.S. Pat. No. 9,475,845; herein SEQ ID NO: 1940), QQDTAP (SEQ ID NO: 22 of U.S. Pat. No. 9,475,845; herein SEQ ID NO: 1941), QTNTGP (SEQ ID NO: 23 of U.S. Pat. No. 9,475,845; herein SEQ ID NO: 1942), QTNGAP (SEQ ID NO: 24 of U.S. Pat. No. 9,475,845; herein SEQ ID NO: 1943), QQNAAP (SEQ ID NO: 25 of U.S. Pat. No. 9,475,845; herein SEQ ID NO: 1944), or AANTQA (SEQ ID NO: 26 of U.S. Pat. No. 9,475,845; herein SEQ ID NO: 1945). In one embodiment, the amino acid modification is a substitution at amino acid positions 262 through 265 in the native AAV2 capsid protein or the corresponding position in the capsid protein of another AAV with a targeting sequence. The targeting sequence may be, but is not limited to, any of the amino acid sequences, NGRAHA (SEQ ID NO: 38 of U.S. Pat. No. 9,475,845; herein SEQ ID NO: 1946), QPEHSST (SEQ ID NO: 39 and 50 of U.S. Pat. No. 9,475,845; herein SEQ ID NO: 1947), VNTANST (SEQ ID NO: 40 of U.S. Pat. No. 9,475,845; herein SEQ ID NO: 1948), HGPMQKS (SEQ ID NO: 41 of U.S. Pat. No. 9,475,845; herein SEQ ID NO: 1949), PHKPPLA (SEQ ID NO: 42 of U.S. Pat. No. 9,475,845; herein SEQ ID NO: 1950), IKNNEMW (SEQ ID NO: 43 of U.S. Pat. No. 9,475,845; herein SEQ ID NO: 1951), RNLDTPM (SEQ ID NO: 44 of U.S. Pat. No. 9,475,845; herein SEQ ID NO: 1952), VDSHRQS (SEQ ID NO: 45 of U.S. Pat. No. 9,475,845; herein SEQ ID NO: 1953), YDSKTKT (SEQ ID NO: 46 of U.S. Pat. No. 9,475,845; herein SEQ ID NO: 1954), SQLPHQK (SEQ ID NO: 47 of U.S. Pat. No. 9,475,845; herein SEQ ID NO: 1955), STMQQNT (SEQ ID NO: 48 of U.S. Pat. No. 9,475,845; herein SEQ ID NO: 1956), TERYMTQ (SEQ ID NO: 49 of U.S. Pat. No. 9,475,845; herein SEQ ID NO: 1957), DASLSTS (SEQ ID NO: 51 of U.S. Pat. No. 9,475,845; herein SEQ ID NO: 1958), DLPNKKT (SEQ ID NO: 52 of U.S. Pat. No. 9,475,845; herein SEQ ID NO: 1959), DLTAARL (SEQ ID NO: 53 of U.S. Pat. No. 9,475,845; herein SEQ ID NO: 1960), EPHQFNY (SEQ ID NO: 54 of U.S. Pat. No. 9,475,845; herein SEQ ID NO: 1961), EPQSNHT (SEQ ID NO: 55 of U.S. Pat. No. 9,475,845; herein SEQ ID NO: 1962), MSSWPSQ (SEQ ID NO: 56 of U.S. Pat. No. 9,475,845; herein SEQ ID NO: 1963), NPKHNAT (SEQ ID NO: 57 of U.S. Pat. No. 9,475,845; herein SEQ ID NO: 1964), PDGMRTT (SEQ ID NO: 58 of U.S. Pat. No. 9,475,845; herein SEQ ID NO: 1965), PNNNKTT (SEQ ID NO: 59 of U.S. Pat. No. 9,475,845; herein SEQ ID NO: 1966), QSTTHDS (SEQ ID NO: 60 of U.S. Pat. No. 9,475,845; herein SEQ ID NO: 1967), TGSKQKQ (SEQ ID NO: 61 of U.S. Pat. No. 9,475,845; herein SEQ ID NO: 1968), SLKHQAL (SEQ ID NO: 62 of U.S. Pat. No. 9,475,845; herein SEQ ID NO: 1969), SPIDGEQ (SEQ ID NO: 63 of U.S. Pat. No. 9,475,845; herein SEQ ID NO: 1970), WIFPWIQL (SEQ ID NO: 64 and 112 of U.S. Pat. No. 9,475,845; herein SEQ ID NO: 1971), CDCRGDCFC (SEQ ID NO: 65 of U.S. Pat. No. 9,475,845; herein SEQ ID NO: 1972), CNGRC (SEQ ID NO: 66 of U.S. Pat. No. 9,475,845; herein SEQ ID NO: 1973), CPRECES (SEQ ID NO: 67 of U.S. Pat. No. 9,475,845; herein SEQ ID NO: 1974), CTTHWGFTLC (SEQ ID NO: 68 and 123 of U.S. Pat. No. 9,475,845; herein SEQ ID NO: 1975), CGRRAGGSC (SEQ ID NO: 69 of U.S. Pat. No. 9,475,845; herein SEQ ID NO: 1976), CKGGRAKDC (SEQ ID NO: 70 of U.S. Pat. No. 9,475,845; herein SEQ ID NO: 1977), CVPELGHEC (SEQ ID NO: 71 and 115 of U.S. Pat. No. 9,475,845; herein SEQ ID NO: 1978), CRRETAWAK (SEQ ID NO: 72 of U.S. Pat. No. 9,475,845; herein SEQ ID NO: 1979), VSWFSHRYSPFAVS (SEQ ID NO: 73 of U.S. Pat. No. 9,475,845; herein SEQ ID NO: 1980), GYRDGYAGPILYN (SEQ ID NO: 74 of U.S. Pat. No. 9,475,845; herein SEQ ID NO: 1981), XXXYXXX (SEQ ID NO: 75 of U.S. Pat. No. 9,475,845; herein SEQ ID NO: 1982), YXNW (SEQ ID NO: 76 of U.S. Pat. No. 9,475,845; herein SEQ ID NO: 1983), RPLPPLP (SEQ ID NO: 77 of U.S. Pat. No. 9,475,845; herein SEQ ID NO: 1984), APPLPPR (SEQ ID NO: 78 of U.S. Pat. No. 9,475,845; herein SEQ ID NO: 1985), DVFYPYPYASGS (SEQ ID NO: 79 of U.S. Pat. No. 9,475,845; herein SEQ ID NO: 1986), MYWYPY (SEQ ID NO: 80 of U.S. Pat. No. 9,475,845; herein SEQ ID NO: 1987), DITWDQLWDLMK (SEQ ID NO: 81 of U.S. Pat. No. 9,475,845; herein SEQ ID NO: 1988), CWDDXWLC (SEQ ID NO: 82 of U.S. Pat. No. 9,475,845; herein SEQ ID NO: 1989), EWCEYLGGYLRCYA (SEQ ID NO: 83 of U.S. Pat. No. 9,475,845; herein SEQ ID NO: 1990), YXCXXGPXTWXCXP (SEQ ID NO: 84 of U.S. Pat. No. 9,475,845; herein SEQ ID NO: 1991), IEGPTLRQWLAARA (SEQ ID NO: 85 of U.S. Pat. No. 9,475,845; herein SEQ ID NO: 1992), LWXXX (SEQ ID NO: 86 of U.S. Pat. No. 9,475,845; herein SEQ ID NO: 1993), XFXXYLW (SEQ ID NO: 87 of U.S. Pat. No. 9,475,845; herein SEQ ID NO: 1994), SSIISHFRWGLCD (SEQ ID NO: 88 of U.S. Pat. No. 9,475,845; herein SEQ ID NO: 1995), MSRPACPPNDKYE (SEQ ID NO: 89 of U.S. Pat. No. 9,475,845; herein SEQ ID NO: 1996), CLRSGRGC (SEQ ID NO: 90 of U.S. Pat. No. 9,475,845; herein SEQ ID NO: 1997), CHWMFSPWC (SEQ ID NO: 91 of U.S. Pat. No. 9,475,845; herein SEQ ID NO: 1998), WXXF (SEQ ID NO: 92 of U.S. Pat. No. 9,475,845; herein SEQ ID NO: 1999), CSSRLDAC (SEQ ID NO: 93 of U.S. Pat. No. 9,475,845; herein SEQ ID NO: 2000), CLPVASC (SEQ ID NO: 94 of U.S. Pat. No. 9,475,845; herein SEQ ID NO: 2001), CGFECVRQCPERC (SEQ ID NO: 95 of U.S. Pat. No. 9,475,845; herein SEQ ID NO: 2002), CVALCREACGEGC (SEQ ID NO: 96 of U.S. Pat. No. 9,475,845; herein SEQ ID NO: 2003), SWCEPGWCR (SEQ ID NO: 97 of U.S. Pat. No. 9,475,845; herein SEQ ID NO: 2004), YSGKWGW (SEQ ID NO: 98 of U.S. Pat. No. 9,475,845; herein SEQ ID NO: 2005), GLSGGRS (SEQ ID NO: 99 of U.S. Pat. No. 9,475,845; herein SEQ ID NO: 2006), LMLPRAD (SEQ ID NO: 100 of U.S. Pat. No. 9,475,845; herein SEQ ID NO: 2007), CSCFRDVCC (SEQ ID NO: 101 of U.S. Pat. No. 9,475,845; herein SEQ ID NO: 2008), CRDVVSVIC (SEQ ID NO: 102 of U.S. Pat. No. 9,475,845; herein SEQ ID NO: 2009), MARSGL (SEQ ID NO: 103 of U.S. Pat. No. 9,475,845; herein SEQ ID NO: 2010), MARAKE (SEQ ID NO: 104 of U.S. Pat. No. 9,475,845; herein SEQ ID NO: 2011), MSRTMS (SEQ ID NO: 105 of U.S. Pat. No. 9,475,845; herein SEQ ID NO: 2012), KCCYSL (SEQ ID NO: 106 of U.S. Pat. No. 9,475,845; herein SEQ ID NO: 2013), MYWGDSHWLQYWYE (SEQ ID NO: 107 of U.S. Pat. No. 9,475,845; herein SEQ ID NO: 2014), MQLPLAT (SEQ ID NO: 108 of U.S. Pat. No. 9,475,845; herein SEQ ID NO: 2015), EWLS (SEQ ID NO: 109 of U.S. Pat. No. 9,475,845; herein SEQ ID NO: 2016), SNEW (SEQ ID NO: 110 of U.S. Pat. No. 9,475,845; herein SEQ ID NO: 2017), TNYL (SEQ ID NO: 111 of U.S. Pat. No. 9,475,845; herein SEQ ID NO: 2018), WDLAWMFRLPVG (SEQ ID NO: 113 of U.S. Pat. No. 9,475,845; herein SEQ ID NO: 2019), CTVALPGGYVRVC (SEQ ID NO: 114 of U.S. Pat. No. 9,475,845; herein SEQ ID NO: 2020), CVAYCIEHHCWTC (SEQ ID NO: 116 of U.S. Pat. No. 9,475,845; herein SEQ ID NO: 2021), CVFAHNYDYLVC (SEQ ID NO: 117 of U.S. Pat. No. 9,475,845; herein SEQ ID NO: 2022), CVFTSNYAFC (SEQ ID NO: 118 of U.S. Pat. No. 9,475,845; herein SEQ ID NO: 2023), VHSPNKK (SEQ ID NO: 119 of U.S. Pat. No. 9,475,845; herein SEQ ID NO: 2024), CRGDGWC (SEQ ID NO: 120 of U.S. Pat. No. 9,475,845; herein SEQ ID NO: 2025), XRGCDX (SEQ ID NO: 121 of U.S. Pat. No. 9,475,845; herein SEQ ID NO: 2026), PXXX (SEQ ID NO: 122 of U.S. Pat. No. 9,475,845; herein SEQ ID NO: 2027), SGKGPRQITAL (SEQ ID NO: 124 of U.S. Pat. No. 9,475,845; herein SEQ ID NO: 2028), AAAAAAAAAXXXXX (SEQ ID NO: 125 of U.S. Pat. No. 9,475,845; herein SEQ ID NO: 2029), VYMSPF (SEQ ID NO: 126 of U.S. Pat. No. 9,475,845; herein SEQ ID NO: 2030), ATWLPPR (SEQ ID NO: 127 of U.S. Pat. No. 9,475,845; herein SEQ ID NO: 2031), HTMYYHHYQHHL (SEQ ID NO: 128 of U.S. Pat. No. 9,475,845; herein SEQ ID NO: 2032), SEVGCRAGPLQWLCEKYFG (SEQ ID NO: 129 of U.S. Pat. No. 9,475,845; herein SEQ ID NO: 2033), CGLLPVGRPDRNVWRWLC (SEQ ID NO: 130 of U.S. Pat. No. 9,475,845; herein SEQ ID NO: 2034), CKGQCDRFKGLPWEC (SEQ ID NO: 131 of U.S. Pat. No. 9,475,845; herein SEQ ID NO: 2035), SGRSA (SEQ ID NO: 132 of U.S. Pat. No. 9,475,845; herein SEQ ID NO: 2036), WGFP (SEQ ID NO: 133 of U.S. Pat. No. 9,475,845; herein SEQ ID NO: 2037), AEPMPHSLNFSQYLWYT (SEQ ID NO: 134 of U.S. Pat. No. 9,475,845; herein SEQ ID NO: 2038), WAYXSP (SEQ ID NO: 135 of U.S. Pat. No. 9,475,845; herein SEQ ID NO: 2039), IELLQAR (SEQ ID NO: 136 of U.S. Pat. No. 9,475,845; herein SEQ ID NO: 2040), AYTKCSRQWRTCMTTH (SEQ ID NO: 137 of U.S. Pat. No. 9,475,845; herein SEQ ID NO: 2041), PQNSKIPGPTFLDPH (SEQ ID NO: 138 of U.S. Pat. No. 9,475,845; herein SEQ ID NO: 2042), SMEPALPDWWWKMFK (SEQ ID NO: 139 of U.S. Pat. No. 9,475,845; herein SEQ ID NO: 2043), ANTPCGPYTHDCPVKR (SEQ ID NO: 140 of U.S. Pat. No. 9,475,845; herein SEQ ID NO: 2044), TACHQHVRMVRP (SEQ ID NO: 141 of U.S. Pat. No. 9,475,845; herein SEQ ID NO: 2045), VPWMEPAYQRFL (SEQ ID NO: 142 of U.S. Pat. No. 9,475,845; herein SEQ ID NO: 2046), DPRATPGS (SEQ ID NO: 143 of U.S. Pat. No. 9,475,845; herein SEQ ID NO: 2047), FRPNRAQDYNTN (SEQ ID NO: 144 of U.S. Pat. No. 9,475,845; herein SEQ ID NO: 2048), CTKNSYLMC (SEQ ID NO: 145 of U.S. Pat. No. 9,475,845; herein SEQ ID NO: 2049), CXXTXXXGXGC (SEQ ID NO: 146 of U.S. Pat. No. 9,475,845; herein SEQ ID NO: 2050), CPIEDRPMC (SEQ ID NO: 147 of U.S. Pat. No. 9,475,845; herein SEQ ID NO: 2051), HEWSYLAPYPWF (SEQ ID NO: 148 of U.S. Pat. No. 9,475,845; herein SEQ ID NO: 2052), MCPKHPLGC (SEQ ID NO: 149 of U.S. Pat. No. 9,475,845; herein SEQ ID NO: 2053), RMWPSSTVNLSAGRR (SEQ ID NO: 150 of U.S. Pat. No. 9,475,845; herein SEQ ID NO: 2054), SAKTAVSQRVWLPSHRGGEP (SEQ ID NO: 151 of U.S. Pat. No. 9,475,845; herein SEQ ID NO: 2055), KSREHVNNSACPSKRITAAL (SEQ ID NO: 152 of U.S. Pat. No. 9,475,845; herein SEQ ID NO: 2056), EGFR (SEQ ID NO: 153 of U.S. Pat. No. 9,475,845; herein SEQ ID NO: 2057), AGLGVR (SEQ ID NO: 154 of U.S. Pat. No. 9,475,845; herein SEQ ID NO: 2058), GTRQGHTMRLGVSDG (SEQ ID NO: 155 of U.S. Pat. No. 9,475,845; herein SEQ ID NO: 2059), IAGLATPGWSHWLAL (SEQ ID NO: 156 of U.S. Pat. No. 9,475,845; herein SEQ ID NO: 2060), SMSIARL (SEQ ID NO: 157 of U.S. Pat. No. 9,475,845; herein SEQ ID NO: 2061), HTFEPGV (SEQ ID NO: 158 of U.S. Pat. No. 9,475,845; herein SEQ ID NO: 2062), NTSLKRISNKRIRRK (SEQ ID NO: 159 of U.S. Pat. No. 9,475,845; herein SEQ ID NO: 2063), LRIKRKRRKRKKTRK (SEQ ID NO: 160 of U.S. Pat. No. 9,475,845; herein SEQ ID NO: 2064), GGG, GFS, LWS, EGG, LLV, LSP, LBS, AGG, GRR, GGH and GTV.

[0105] In one embodiment, the AAV serotype may be, or may have a sequence as described in United States Publication No. US 20160369298, the contents of which are herein incorporated by reference in their entirety, such as, but not limited to, site-specific mutated capsid protein of AAV2 (SEQ ID NO: 97 of US 20160369298; herein SEQ ID NO: 2065) or variants thereof, wherein the specific site is at least one site selected from sites R447, G453, 5578, N587, N587+1, S662 of VP1 or fragment thereof.

[0106] Further, any of the mutated sequences described in US 20160369298, may be or may have, but not limited to, any of the following sequences SDSGASN (SEQ ID NO: 1 and SEQ ID NO: 231 of US20160369298; herein SEQ ID NO: 2066), SPSGASN (SEQ ID NO: 2 of US20160369298; herein SEQ ID NO: 2067), SHSGASN (SEQ ID NO: 3 of US20160369298; herein SEQ ID NO: 2068), SRSGASN (SEQ ID NO: 4 of US20160369298; herein SEQ ID NO: 2069), SKSGASN (SEQ ID NO: 5 of US20160369298; herein SEQ ID NO: 2070), SNSGASN (SEQ ID NO: 6 of US20160369298; herein SEQ ID NO: 2071), SGSGASN (SEQ ID NO: 7 of US20160369298; herein SEQ ID NO: 2072), SASGASN (SEQ ID NO: 8, 175, and 221 of US20160369298; herein SEQ ID NO: 2073), SESGTSN (SEQ ID NO: 9 of US20160369298; herein SEQ ID NO: 2074), STTGGSN (SEQ ID NO: 10 of US20160369298; herein SEQ ID NO: 2075), SSAGSTN (SEQ ID NO: 11 of US20160369298; herein SEQ ID NO: 2076), NNDSQA (SEQ ID NO: 12 of US20160369298; herein SEQ ID NO: 2077), NNRNQA (SEQ ID NO: 13 of US20160369298; herein SEQ ID NO: 2078), NNNKQA (SEQ ID NO: 14 of US20160369298; herein SEQ ID NO: 2079), NAKRQA (SEQ ID NO: 15 of US20160369298; herein SEQ ID NO: 2080), NDEHQA (SEQ ID NO: 16 of US20160369298; herein SEQ ID NO: 2081), NTSQKA (SEQ ID NO: 17 of US20160369298; herein SEQ ID NO: 2082), YYLSRTNTPSGTDTQSRLVFSQAGA (SEQ ID NO: 18 of US20160369298; herein SEQ ID NO: 2083), YYLSRTNTDSGTETQSGLDFSQAGA (SEQ ID NO: 19 of US20160369298; herein SEQ ID NO: 2084), YYLSRTNTESGTPTQSALEFSQAGA (SEQ ID NO: 20 of US20160369298; herein SEQ ID NO: 2085), YYLSRTNTHSGTHTQSPLHFSQAGA (SEQ ID NO: 21 of US20160369298; herein SEQ ID NO: 2086), YYLSRTNTSSGTITISHLIFSQAGA (SEQ ID NO: 22 of US20160369298; herein SEQ ID NO: 2087), YYLSRTNTRSGIMTKSSLMFSQAGA (SEQ ID NO: 23 of US20160369298; herein SEQ ID NO: 2088), YYLSRTNTKSGRKTLSNLSFSQAGA (SEQ ID NO: 24 of US20160369298; herein SEQ ID NO: 2089), YYLSRTNDGSGPVTPSKLRFSQRGA (SEQ ID NO: 25 of US20160369298; herein SEQ ID NO: 2090), YYLSRTNAASGHATHSDLKFSQPGA (SEQ ID NO: 26 of US20160369298; herein SEQ ID NO: 2091), YYLSRTNGQAGSLTMSELGFSQVGA (SEQ ID NO: 27 of US20160369298; herein SEQ ID NO: 2092), YYLSRTNSTGGNQTTSQLLFSQLSA (SEQ ID NO: 28 of US20160369298; herein SEQ ID NO: 2093), YFLSRTNNNTGLNTNSTLNFSQGRA (SEQ ID NO: 29 of US20160369298; herein SEQ ID NO: 2094), SKTGADNNNSEYSWTG (SEQ ID NO: 30 of US20160369298; herein SEQ ID NO: 2095), SKTDADNNNSEYSWTG (SEQ ID NO: 31 of US20160369298; herein SEQ ID NO: 2096), SKTEADNNNSEYSWTG (SEQ ID NO: 32 of US20160369298; herein SEQ ID NO: 2097), SKTPADNNNSEYSWTG (SEQ ID NO: 33 of US20160369298; herein SEQ ID NO: 2098), SKTHADNNNSEYSWTG (SEQ ID NO: 34 of US20160369298; herein SEQ ID NO: 2099), SKTQADNNNSEYSWTG (SEQ ID NO: 35 of US20160369298; herein SEQ ID NO: 2100), SKTIADNNNSEYSWTG (SEQ ID NO: 36 of US20160369298; herein SEQ ID NO: 2101), SKTMADNNNSEYSWTG (SEQ ID NO: 37 of US20160369298; herein SEQ ID NO: 2102), SKTRADNNNSEYSWTG (SEQ ID NO: 38 of US20160369298; herein SEQ ID NO: 2103), SKTNADNNNSEYSWTG (SEQ ID NO: 39 of US20160369298; herein SEQ ID NO: 2104), SKTVGRNNNSEYSWTG (SEQ ID NO: 40 of US20160369298; herein SEQ ID NO: 2105), SKTADRNNNSEYSWTG (SEQ ID NO: 41 of US20160369298; herein SEQ ID NO: 2106), SKKLSQNNNSKYSWQG (SEQ ID NO: 42 of US20160369298; herein SEQ ID NO: 2107), SKPTTGNNNSDYSWPG (SEQ ID NO: 43 of US20160369298; herein SEQ ID NO: 2108), STQKNENNNSNYSWPG (SEQ ID NO: 44 of US20160369298; herein SEQ ID NO: 2109), HKDDEGKF (SEQ ID NO: 45 of US20160369298; herein SEQ ID NO: 2110), HKDDNRKF (SEQ ID NO: 46 of US20160369298; herein SEQ ID NO: 2111), HKDDTNKF (SEQ ID NO: 47 of US20160369298; herein SEQ ID NO: 2112), HEDSDKNF (SEQ ID NO: 48 of US20160369298; herein SEQ ID NO: 2113), HRDGADSF (SEQ ID NO: 49 of US20160369298; herein SEQ ID NO: 2114), HGDNKSRF (SEQ ID NO: 50 of US20160369298; herein SEQ ID NO: 2115), KQGSEKTNVDFEEV (SEQ ID NO: 51 of US20160369298; herein SEQ ID NO: 2116), KQGSEKTNVDSEEV (SEQ ID NO: 52 of US20160369298; herein SEQ ID NO: 2117), KQGSEKTNVDVEEV (SEQ ID NO: 53 of US20160369298; herein SEQ ID NO: 2118), KQGSDKTNVDDAGV (SEQ ID NO: 54 of US20160369298; herein SEQ ID NO: 2119), KQGSSKTNVDPREV (SEQ ID NO: 55 of US20160369298; herein SEQ ID NO: 2120), KQGSRKTNVDHKQV (SEQ ID NO: 56 of US20160369298; herein SEQ ID NO: 2121), KQGSKGGNVDTNRV (SEQ ID NO: 57 of US20160369298; herein SEQ ID NO: 2122), KQGSGEANVDNGDV (SEQ ID NO: 58 of US20160369298; herein SEQ ID NO: 2123), KQDAAADNIDYDHV (SEQ ID NO: 59 of US20160369298; herein SEQ ID NO: 2124), KQSGTRSNAAASSV (SEQ ID NO: 60 of US20160369298; herein SEQ ID NO: 2125), KENTNTNDTELTNV (SEQ ID NO: 61 of US20160369298; herein SEQ ID NO: 2126), QRGNNVAATADVNT (SEQ ID NO: 62 of US20160369298; herein SEQ ID NO: 2127), QRGNNEAATADVNT (SEQ ID NO: 63 of US20160369298; herein SEQ ID NO: 2128), QRGNNPAATADVNT (SEQ ID NO: 64 of US20160369298; herein SEQ ID NO: 2129), QRGNNHAATADVNT (SEQ ID NO: 65 of US20160369298; herein SEQ ID NO: 2130), QEENNIAATPGVNT (SEQ ID NO: 66 of US20160369298; herein SEQ ID NO: 2131), QPPNNMAATHEVNT (SEQ ID NO: 67 of US20160369298; herein SEQ ID NO: 2132), QHHNNSAATTIVNT (SEQ ID NO: 68 of US20160369298; herein SEQ ID NO: 2133), QTTNNRAAFNMVET (SEQ ID NO: 69 of US20160369298; herein SEQ ID NO: 2134), QKKNNNAASKKVAT (SEQ ID NO: 70 of US20160369298; herein SEQ ID NO: 2135), QGGNNKAADDAVKT (SEQ ID NO: 71 of US20160369298; herein SEQ ID NO: 2136), QAAKGGAADDAVKT (SEQ ID NO: 72 of US20160369298; herein SEQ ID NO: 2137), QDDRAAAANESVDT (SEQ ID NO: 73 of US20160369298; herein SEQ ID NO: 2138), QQQHDDAAYQRVHT (SEQ ID NO: 74 of US20160369298; herein SEQ ID NO: 2139), QSSSSLAAVSTVQT (SEQ ID NO: 75 of US20160369298; herein SEQ ID NO: 2140), QNNQTTAAIRNVTT (SEQ ID NO: 76 of US20160369298; herein SEQ ID NO: 2141), NYNKKSDNVDFT (SEQ ID NO: 77 of US20160369298; herein SEQ ID NO: 2142), NYNKKSENVDFT (SEQ ID NO: 78 of US20160369298; herein SEQ ID NO: 2143), NYNKKSLNVDFT (SEQ ID NO: 79 of US20160369298; herein SEQ ID NO: 2144), NYNKKSPNVDFT (SEQ ID NO: 80 of US20160369298; herein SEQ ID NO: 2145), NYSKKSHCVDFT (SEQ ID NO: 81 of US20160369298; herein SEQ ID NO: 2146), NYRKTIYVDFT (SEQ ID NO: 82 of US20160369298; herein SEQ ID NO: 2147), NYKEKKDVHFT (SEQ ID NO: 83 of US20160369298; herein SEQ ID NO: 2148), NYGHRAIVQFT (SEQ ID NO: 84 of US20160369298; herein SEQ ID NO: 2149), NYANHQFVVCT (SEQ ID NO: 85 of US20160369298; herein SEQ ID NO: 2150), NYDDDPTGVLLT (SEQ ID NO: 86 of US20160369298; herein SEQ ID NO: 2151), NYDDPTGVLLT (SEQ ID NO: 87 of US20160369298; herein SEQ ID NO: 2152), NFEQQNSVEWT (SEQ ID NO: 88 of US20160369298; herein SEQ ID NO: 2153), SQSGASN (SEQ ID NO: 89 and SEQ ID NO: 241 of US20160369298; herein SEQ ID NO: 2154), NNGSQA (SEQ ID NO: 90 of US20160369298; herein SEQ ID NO: 2155), YYLSRTNTPSGTTTWSRLQFSQAGA (SEQ ID NO: 91 of US20160369298; herein SEQ ID NO: 2156), SKTSADNNNSEYSWTG (SEQ ID NO: 92 of US20160369298; herein SEQ ID NO: 2157), HKDDEEKF (SEQ ID NO: 93, 209, 214, 219, 224, 234, 239, and 244 of US20160369298; herein SEQ ID NO: 2158), KQGSEKTNVDIEEV (SEQ ID NO: 94 of US20160369298; herein SEQ ID NO: 2159), QRGNNQAATADVNT (SEQ ID NO: 95 of US20160369298; herein SEQ ID NO: 2160), NYNKKSVNVDFT (SEQ ID NO: 96 of US20160369298; herein SEQ ID NO: 2161), SQSGASNYNTPSGTTTQSRLQFSTSADNNNSEYSWTGATKYH (SEQ ID NO: 106 of US20160369298; herein SEQ ID NO: 2162), SASGASNFNSEGGSLTQSSLGFSTDGENNNSDFSWTGATKYH (SEQ ID NO: 107 of US20160369298; herein SEQ ID NO: 2163), SQSGASNYNTPSGTTTQSRLQFSTDGENNNSDFSWTGATKYH (SEQ ID NO: 108 of US20160369298; herein SEQ ID NO: 2164), SASGASNYNTPSGTTTQSRLQFSTSADNNNSEFSWPGATTYH (SEQ ID NO: 109 of US20160369298; herein SEQ ID NO: 2165), SQSGASNFNSEGGSLTQSSLGFSTDGENNNSDFSWTGATKYH (SEQ ID NO: 110 of US20160369298; herein SEQ ID NO: 2166), SASGASNYNTPSGSLTQSSLGFSTDGENNNSDFSWTGATKYH (SEQ ID NO: 111 of US20160369298; herein SEQ ID NO: 2167), SQSGASNYNTPSGTTTQSRLQFSTSADNNNSDFSWTGATKYH (SEQ ID NO: 112 of US20160369298; herein SEQ ID NO: 2168), SGAGASNFNSEGGSLTQSSLGFSTDGENNNSDFSWTGATKYH (SEQ ID NO: 113 of US20160369298; herein SEQ ID NO: 2169), SGAGASN (SEQ ID NO: 176 of US20160369298; herein SEQ ID NO: 2170), NSEGGSLTQSSLGFS (SEQ ID NO: 177, 185, 193 and 202 of US20160369298; herein SEQ ID NO: 2171), TDGENNNSDFS (SEQ ID NO: 178 of US20160369298; herein SEQ ID NO: 2172), SEFSWPGATT (SEQ ID NO: 179 of US20160369298; herein SEQ ID NO: 2173), TSADNNNSDFSWT (SEQ ID NO: 180 of US20160369298; herein SEQ ID NO: 2174), SQSGASNY (SEQ ID NO: 181, 187, and 198 of US20160369298; herein SEQ ID NO: 2175), NTPSGTTTQSRLQFS (SEQ ID NO: 182, 188, 191, and 199 of US20160369298; herein SEQ ID NO: 2176), TSADNNNSEYSWTGATKYH (SEQ ID NO: 183 of US20160369298; herein SEQ ID NO: 2177), SASGASNF (SEQ ID NO: 184 of US20160369298; herein SEQ ID NO: 2178), TDGENNNSDFSWTGATKYH (SEQ ID NO: 186, 189, 194, 197, and 203 of US20160369298; herein SEQ ID NO: 2179), SASGASNY (SEQ ID NO: 190 and SEQ ID NO: 195 of US20160369298; herein SEQ ID NO: 2180), TSADNNNSEFSWPGATTYH (SEQ ID NO: 192 of US20160369298; herein SEQ ID NO: 2181), NTPSGSLTQSSLGFS (SEQ ID NO: 196 of US20160369298; herein SEQ ID NO: 2182), TSADNNNSDFSWTGATKYH (SEQ ID NO: 200 of US20160369298; herein SEQ ID NO: 2183), SGAGASNF (SEQ ID NO: 201 of US20160369298; herein SEQ ID NO: 2184), CTCCAGVVSVVSMRSRVCVNSGCAGCTDHCVVSRNSGTCVMSACACAA (SEQ ID NO: 204 of US20160369298; herein SEQ ID NO: 2185), CTCCAGAGAGGCAACAGACAAGCAGCTACCGCAGATGTCAACACACAA (SEQ ID NO: 205 of US20160369298; herein SEQ ID NO: 2186), SAAGASN (SEQ ID NO: 206 of US20160369298; herein SEQ ID NO: 2187), YFLSRTNTESGSTTQSTLRFSQAG (SEQ ID NO: 207 of US20160369298; herein SEQ ID NO: 2188), SKTSADNNNSDFS (SEQ ID NO: 208, 228, and 253 of US20160369298; herein SEQ ID NO: 2189), KQGSEKTDVDIDKV (SEQ ID NO: 210 of US20160369298; herein SEQ ID NO: 2190), STAGASN (SEQ ID NO: 211 of US20160369298; herein SEQ ID NO: 2191), YFLSRTNTTSGIETQSTLRFSQAG (SEQ ID NO: 212 and SEQ ID NO: 247 of US20160369298; herein SEQ ID NO: 2192), SKTDGENNNSDFS (SEQ ID NO: 213 and SEQ ID NO: 248 of US20160369298; herein SEQ ID NO: 2193), KQGAAADDVEIDGV (SEQ ID NO: 215 and SEQ ID NO: 250 of US20160369298; herein SEQ ID NO: 2194), SEAGASN (SEQ ID NO: 216 of US20160369298; herein SEQ ID NO: 2195), YYLSRTNTPSGTTTQSRLQFSQAG (SEQ ID NO: 217, 232 and 242 of US20160369298; herein SEQ ID NO: 2196), SKTSADNNNSEYS (SEQ ID NO: 218, 233, 238, and 243 of US20160369298; herein SEQ ID NO: 2197), KQGSEKTNVDIEKV (SEQ ID NO: 220, 225 and 245 of US20160369298; herein SEQ ID NO: 2198), YFLSRTNDASGSDTKSTLLFSQAG (SEQ ID NO: 222 of US20160369298; herein SEQ ID NO: 2199), STTPSENNNSEYS (SEQ ID NO: 223 of US20160369298; herein SEQ ID NO: 2200), SAAGATN (SEQ ID NO: 226 and SEQ ID NO: 251 of US20160369298; herein SEQ ID NO: 2201), YFLSRTNGEAGSATLSELRFSQAG (SEQ ID NO: 227 of US20160369298; herein SEQ ID NO: 2202), HGDDADRF (SEQ ID NO: 229 and SEQ ID NO: 254 of US20160369298; herein SEQ ID NO: 2203), KQGAEKSDVEVDRV (SEQ ID NO: 230 and SEQ ID NO: 255 of US20160369298; herein SEQ ID NO: 2204), KQDSGGDNIDIDQV (SEQ ID NO: 235 of US20160369298; herein SEQ ID NO: 2205), SDAGASN (SEQ ID NO: 236 of US20160369298; herein SEQ ID NO: 2206), YFLSRTNTEGGHDTQSTLRFSQAG (SEQ ID NO: 237 of US20160369298; herein SEQ ID NO: 2207), KEDGGGSDVAIDEV (SEQ ID NO: 240 of US20160369298; herein SEQ ID NO: 2208), SNAGASN (SEQ ID NO: 246 of US20160369298; herein SEQ ID NO: 2209), and YFLSRTNGEAGSATLSELRFSQPG (SEQ ID NO: 252 of US20160369298; herein SEQ ID NO: 2210). Non-limiting examples of nucleotide sequences that may encode the amino acid mutated sites include the following, AGCVVMDCAGGARSCASCAAC (SEQ ID NO: 97 of US20160369298; herein SEQ ID NO: 2211), AACRACRRSMRSMAGGCA (SEQ ID NO: 98 of US20160369298; herein SEQ ID NO: 2212), CACRRGGACRRCRMSRRSARSTTT (SEQ ID NO: 99 of US20160369298; herein SEQ ID NO: 2213), TATTTCTTGAGCAGAACAAACRVCVVSRSCGGAMNCVHSACGMHSTCAVVSCTTVDSTT TTCTCAGSBCRGSGCG (SEQ ID NO: 100 of US20160369298; herein SEQ ID NO: 2214), TCAAMAMMAVNSRVCSRSAACAACAACAGTRASTTCTCGTGGMMAGGA (SEQ ID NO: 101 of US20160369298; herein SEQ ID NO: 2215), AAGSAARRCRSCRVSRVARVCRATRYCGMSNHCRVMVRSGTC (SEQ ID NO: 102 of US20160369298; herein SEQ ID NO: 2216), CAGVVSVVSMRSRVCVNSGCAGCTDHCVVSRNSGTCVMSACA (SEQ ID NO: 103 of US20160369298; herein SEQ ID NO: 2217), AACTWCRVSVASMVSVHSDDTGTGSWSTKSACT (SEQ ID NO: 104 of US20160369298; herein SEQ ID NO: 2218), TTGTTGAACATCACCACGTGACGCACGTTC (SEQ ID NO: 256 of US20160369298; herein SEQ ID NO: 2219), TCCCCGTGGTTCTACTACATAATGTGGCCG (SEQ ID NO: 257 of US20160369298; herein SEQ ID NO: 2220), TTCCACACTCCGTTTTGGATAATGTTGAAC (SEQ ID NO: 258 of US20160369298; herein SEQ ID NO: 2221), AGGGACATCCCCAGCTCCATGCTGTGGTCG (SEQ ID NO: 259 of US20160369298; herein SEQ ID NO: 2222), AGGGACAACCCCTCCGACTCGCCCTAATCC (SEQ ID NO: 260 of US20160369298; herein SEQ ID NO: 2223), TCCTAGTAGAAGACACCCTCTCACTGCCCG (SEQ ID NO: 261 of US20160369298; herein SEQ ID NO: 2224), AGTACCATGTACACCCACTCTCCCAGTGCC (SEQ ID NO: 262 of US20160369298; herein SEQ ID NO: 2225), ATATGGACGTTCATGCTGATCACCATACCG (SEQ ID NO: 263 of US20160369298; herein SEQ ID NO: 2226), AGCAGGAGCTCCTTGGCCTCAGCGTGCGAG (SEQ ID NO: 264 of US20160369298; herein SEQ ID NO: 2227), ACAAGCAGCTTCACTATGACAACCACTGAC (SEQ ID NO: 265 of US20160369298; herein SEQ ID NO: 2228), CAGCCTAGGAACTGGCTTCCTGGACCCTGTTACCGCCAGCAGAGAGTCTCAAMAMMA VNSRVCSRSAACAACAACAGTRASTTCTCCTGGMMAGGAGCTACCAAGTACCACCTCA ATGGCAGAGACTCTCTGGTGAATCCCGGACCAGCTATGGCAAGCCACRRGGACRRCRM SRRSARSTTTTTTCCTCAGAGCGGGGTTCTCATCTTTGGGAAGSAARRCRSCRVSRVARV CRATRYCGMSNHCRVMVRSGTCATGATTACAGACGAAGAGGAGATCTGGAC (SEQ ID NO: 266 of US20160369298; herein SEQ ID NO: 2229), TGGGACAATGGCGGTCGTCTCTCAGAGTTKTKKT (SEQ ID NO: 267 of US20160369298; herein SEQ ID NO: 2230), AGAGGACCKKTCCTCGATGGTTCATGGTGGAGTTA (SEQ ID NO: 268 of US20160369298; herein SEQ ID NO: 2231), CCACTTAGGGCCTGGTCGATACCGTTCGGTG (SEQ ID NO: 269 of US20160369298; herein SEQ ID NO: 2232), and TCTCGCCCCAAGAGTAGAAACCCTTCSTTYYG (SEQ ID NO: 270 of US20160369298; herein SEQ ID NO: 2233).

[0107] In some embodiments, the AAV serotype may comprise an ocular cell targeting peptide as described in International Patent Publication WO2016134375, the contents of which are herein incorporated by reference in their entirety, such as, but not limited to SEQ ID NO: 9, and SEQ ID NO:10 of WO2016134375. Further, any of the ocular cell targeting peptides or amino acids described in WO2016134375, may be inserted into any parent AAV serotype, such as, but not limited to, AAV2 (SEQ ID NO:8 of WO2016134375; herein SEQ ID NO: 2234), or AAV9 (SEQ ID NO: 11 of WO2016134375; herein SEQ ID NO: 2235). In some embodiments, modifications, such as insertions are made in AAV2 proteins at P34-A35, T138-A139, A139-P140, G453-T454, N587-R588, and/or R588-Q589. In certain embodiments, insertions are made at D384, G385, 1560, T561, N562, E563, E564, E565, N704, and/or Y705 of AAV9. The ocular cell targeting peptide may be, but is not limited to, any of the following amino acid sequences, GSTPPPM (SEQ ID NO: 1 of WO2016134375; herein SEQ ID NO: 2236), or GETRAPL (SEQ ID NO: 4 of WO2016134375; herein SEQ ID NO: 2237).

[0108] In some embodiments, the AAV serotype may be modified as described in the United States Publication US 20170145405 the contents of which are herein incorporated by reference in their entirety. AAV serotypes may include, modified AAV2 (e.g., modifications at Y444F, Y500F, Y730F and/or S662V), modified AAV3 (e.g., modifications at Y705F, Y731F and/or T492V), and modified AAV6 (e.g., modifications at S663V and/or T492V).

[0109] In some embodiments, the AAV serotype may be modified as described in the International Publication WO2017083722 the contents of which are herein incorporated by reference in their entirety. AAV serotypes may include, AAV1 (Y705+731F+T492V), AAV2 (Y444+500+730F+T491V), AAV3 (Y705+731F), AAV5, AAV 5 (Y436+693+719F), AAV6 (VP3 variant Y705F/Y731F/T492V), AAV8 (Y733F), AAV9, AAV9 (VP3 variant Y731F), and AAV10 (Y733F).

[0110] In some embodiments, the AAV serotype may comprise, as described in International Patent Publication WO2017015102, the contents of which are herein incorporated by reference in their entirety, an engineered epitope comprising the amino acids SPAKFA (SEQ ID NO: 24 of WO2017015102; herein SEQ ID NO: 2238) or NKDKLN (SEQ ID NO:2 of WO2017015102; herein SEQ ID NO: 2239). The epitope may be inserted in the region of amino acids 665 to 670 based on the numbering of the VP1 capsid of AAV8 (SEQ ID NO:3 of WO2017015102) and/or residues 664 to 668 of AAV3B (SEQ ID NO:3).

[0111] In one embodiment, the AAV serotype may be, or may have a sequence as described in International Patent Publication WO2017058892, the contents of which are herein incorporated by reference in their entirety, such as, but not limited to, AAV variants with capsid proteins that may comprise a substitution at one or more (e.g., 2, 3, 4, 5, 6, or 7) of amino acid residues 262-268, 370-379, 451-459, 472-473, 493-500, 528-534, 547-552, 588-597, 709-710, 716-722 of AAV1, in any combination, or the equivalent amino acid residues in AAV2, AAV3, AAV4, AAV5, AAV6, AAV7, AAV8, AAV9, AAV10, AAV11, AAV12, AAVrh8, AAVrh10, AAVrh32.33, bovine AAV or avian AAV. The amino acid substitution may be, but is not limited to, any of the amino acid sequences described in WO2017058892. In one embodiment, the AAV may comprise an amino acid substitution at residues 256L, 258K, 259Q, 261S, 263A, 264S, 265T, 266G, 272H, 385S, 386Q, S472R, V473D, N500E 547S, 709A, 710N, 716D, 717N, 718N, 720L, A456T, Q457T, N458Q, K459S, T492S, K493A, S586R, 5587G, S588N, T589R and/or 722T of AAV1 (SEQ ID NO: 1 of WO2017058892) in any combination, 244N, 246Q, 248R, 249E, 2501, 251K, 252S, 253G, 2545, 255V, 256D, 263Y, 377E, 378N, 453L, 456R, 532Q, 533P, 535N, 536P, 537G, 538T, 539T, 540A, 541T, 542Y, 543L, 546N, 653V, 654P, 6565, 697Q, 698F, 704D, 7055, 706T, 707G, 708E, 709Y and/or 710R of AAV5 (SEQ ID NO:5 of WO2017058892) in any combination, 248R, 316V, 317Q, 318D, 3195, 443N, 530N, 531S, 532Q 533P, 534A, 535N, 540A, 541 T, 542Y, 543L, 545G, 546N, 697Q, 704D, 706T, 708E, 709Y and/or 710R of AAV5 (SEQ ID NO: 5 of WO2017058892) in any combination, 264S, 266G, 269N, 272H, 457Q, 588S and/or 589I of AAV6 (SEQ ID NO:6 WO2017058892) in any combination, 457T, 459N, 496G, 499N, 500N, 589Q, 590N and/or 592A of AAV8 (SEQ ID NO: 8 WO2017058892) in any combination, 451I, 452N, 453G, 4545, 455G, 456Q, 457N and/or 458Q of AAV9 (SEQ ID NO: 9 WO2017058892) in any combination.

[0112] In some embodiments, the AAV may include a sequence of amino acids at positions 155, 156 and 157 of VP1 or at positions 17, 18, 19 and 20 of VP2, as described in International Publication No. WO 2017066764, the contents of which are herein incorporated by reference in their entirety. The sequences of amino acid may be, but not limited to, N-S-S, S-X-S, S-S-Y, N-X-S, N-S-Y, S-X-Y and N-X-Y, where N, X and Y are, but not limited to, independently non-serine, or non-threonine amino acids, wherein the AAV may be, but not limited to AAV1, AAV2, AAV3, AAV4, AAV5, AAV6, AAV7, AAV8, AAV9, AAV10, AAV11 and AAV12. In some embodiments, the AAV may include a deletion of at least one amino acid at positions 156, 157 or 158 of VP1 or at positions 19, 20 or 21 of VP2, wherein the AAV may be, but not limited to AAV1, AAV2, AAV3, AAV4, AAV5, AAV6, AAV7, AAV8, AAV9, AAV10, AAV11 and AAV12.

[0113] In one embodiment, peptides for inclusion in an AAV serotype may be identified using the methods described by Hui et al. (Molecular Therapy—Methods & Clinical Development (2015) 2, 15029 doi:10.1038/mtm.2015.29; the contents of which are herein incorporated by reference in its entirety). As a non-limiting example, the procedure includes isolating human splenocytes, restimulating the splenocytes in vitro using individual peptides spanning the amino acid sequence of the AAV capsid protein, IFN-gamma ELISpot with the individual peptides used for the in vitro restimulation, bioinformatics analysis to determine the HLA restriction of 15-mers identified by IFN-gamma ELISpot, identification of candidate reactive 9-mer epitopes for a given HLA allele, synthesis candidate 9-mers, second IFN-gamma ELISpot screening of splenocytes from subjects carrying the HLA alleles to which identified AAV epitopes are predicted to bind, determine the AAV capsid-reactive CD8+ T cell epitopes and determine the frequency of subjects reacting to a given AAV epitope.

[0114] In one embodiment, the AAV may be a serotype generated by Cre-recombination-based AAV targeted evolution (CREATE) as described by Deverman et al., (Nature Biotechnology 34(2):204-209 (2016)), the contents of which are herein incorporated by reference in their entirety. In one embodiment, AAV serotypes generated in this manner have improved CNS transduction and/or neuronal and astrocytic tropism, as compared to other AAV serotypes. As non-limiting examples, the AAV serotype may be PHP.B, PHP.B2, PHP.B3, PHP.A, G2A12, G2A15. In one embodiment, these AAV serotypes may be AAV9 (SEQ ID NO: 126 and 127) derivatives with a 7-amino acid insert between amino acids 588-589. Non-limiting examples of these 7-amino acid inserts include TLAVPFK (SEQ ID NO: 873), SVSKPFL (SEQ ID NO: 1249), FTLTTPK (SEQ ID NO: 882), YTLSQGW (SEQ ID NO: 888), QAVRTSL (SEQ ID NO: 914) and/or LAKERLS (SEQ ID NO: 915).

[0115] In one embodiment, the AAV serotype may be as described in Jackson et al (Frontiers in Molecular Neuroscience 9:154 (2016)), the contents of which are herein incorporated by reference in their entirety. In some embodiments, the AAV serotype is PHP.B or AAV9. In some embodiments, the AAV serotype is paired with a synapsin promoter to enhance neuronal transduction, as compared to when more ubiquitous promoters are used (i.e., CBA or CMV).

[0116] In one embodiment, peptides for inclusion in an AAV serotype may be identified by isolating human splenocytes, restimulating the splenocytes in vitro using individual peptides spanning the amino acid sequence of the AAV capsid protein, IFN-gamma ELISpot with the individual peptides used for the in vitro restimulation, bioinformatics analysis to determine the given allele restriction of 15-mers identified by IFN-gamma ELISpot, identification of candidate reactive 9-mer epitopes for a given allele, synthesis candidate 9-mers, second IFN-gamma ELISpot screening of splenocytes from subjects carrying the specific alleles to which identified AAV epitopes are predicted to bind, determine the AAV capsid-reactive CD8+ T cell epitopes and determine the frequency of subjects reacting to a given AAV epitope.

[0117] AAV particles comprising a modulatory polynucleotide encoding the siRNA molecules may be prepared or derived from various serotypes of AAVs, including, but not limited to, AAV1, AAV2, AAV3, AAV4, AAV5, AAV6, AAV7, AAV8, AAV9, AAV9.47, AAV9(hu14), AAV10, AAV11, AAV12, AAVrh8, AAVrh10, AAV-DJ8 and AAV-DJ. In some cases, different serotypes of AAVs may be mixed together or with other types of viruses to produce chimeric AAV particles. As a non-limiting example, the AAV particle is derived from the AAV9 serotype.

[0118] Viral Genome

[0119] In one embodiment, as shown in an AAV particle comprises a viral genome with a payload region.

[0120] In one embodiment, the viral genome may comprise the components as shown in FIG. 1. The payload region 110 is located within the viral genome 100. At the 5′ and/or the 3′ end of the viral genome 100 there may be at least one inverted terminal repeat (ITR) 120. Between the 5′ ITR 120 and the payload region 110, there may be a promoter region 130. In one embodiment, the payload region may comprise at least one modulatory polynucleotide.

[0121] In one embodiment, the viral genome 100 may comprise the components as shown in FIG. 2. The payload region 110 is located within the viral genome 100. At the 5′ and/or the 3′ end of the viral genome 100 there may be at least one inverted terminal repeat (ITR) 120. Between the 5′ ITR 120 and the payload region 110, there may be a promoter region 130. Between the promoter region 130 and the payload region 110, there may be an intron region 140. In one embodiment, the payload region may comprise at least one modulatory polynucleotide.

[0122] In one embodiment, the viral genome 100 may comprise the components as shown in FIG. 3. At the 5′ and/or the 3′ end of the viral genome 100 there may be at least one inverted terminal repeat (ITR) 120. Within the viral genome 100, there may be an enhancer region 150, a promoter region 130, an intron region 140, and a payload region 110. In one embodiment, the payload region may comprise at least one modulatory polynucleotide.

[0123] In one embodiment, the viral genome 100 may comprise the components as shown in FIG. 4. At the 5′ and/or the 3′ end of the viral genome 100 there may be at least one inverted terminal repeat (ITR) 120. Within the viral genome 100, there may be an enhancer region 150, a promoter region 130, an intron region 140, a payload region 110, and a polyadenylation signal sequence region 160.

[0124] In one embodiment, the payload region may comprise at least one modulatory polynucleotide.

[0125] In one embodiment, the viral genome 100 may comprise the components as shown in FIG. 5. At the 5′ and/or the 3′ end of the viral genome 100 there may be at least one inverted terminal repeat (ITR) 120. Within the viral genome 100, there may be at least one MCS region 170, an enhancer region 150, a promoter region 130, an intron region 140, a payload region 110, and a polyadenylation signal sequence region 160. In one embodiment, the payload region may comprise at least one modulatory polynucleotide.

[0126] In one embodiment, the viral genome 100 may comprise the components as shown in FIG. 6. At the 5′ and/or the 3′ end of the viral genome 100 there may be at least one inverted terminal repeat (ITR) 120. Within the viral genome 100, there may be at least one MCS region 170, an enhancer region 150, a promoter region 130, at least one exon region 180, at least one intron region 140, a payload region 110, and a polyadenylation signal sequence region 160. In one embodiment, the payload region may comprise at least one modulatory polynucleotide.

[0127] In one embodiment, the viral genome 100 may comprise the components as shown in FIGS. 7 and 8. Within the viral genome 100, there may be at least one promoter region 130, and a payload region 110. In one embodiment, the payload region may comprise at least one modulatory polynucleotide.

[0128] In one embodiment, the viral genome 100 may comprise the components as shown in FIG. 9. Within the viral genome 100, there may be at least one promoter region 130, a payload region 110, and a polyadenylation signal sequence region 160. In one embodiment, the payload region may comprise at least one modulatory polynucleotide.

[0129] Viral Genome Size

[0130] In one embodiment, the viral genome which comprises a payload described herein, may be single stranded or double stranded viral genome. The size of the viral genome may be small, medium, large or the maximum size. Additionally, the viral genome may comprise a promoter and a polyA tail.

[0131] In one embodiment, the viral genome which comprises a payload described herein, may be a small single stranded viral genome. A small single stranded viral genome may be 2.7 to 3.5 kb in size such as about 2.7, 2.8, 2.9, 3.0, 3.1, 3.2, 3.3, 3.4, and 3.5 kb in size. As a non-limiting example, the small single stranded viral genome may be 3.2 kb in size. Additionally, the viral genome may comprise a promoter and a polyA tail.

[0132] In one embodiment, the viral genome which comprises a payload described herein, may be a small double stranded viral genome. A small double stranded viral genome may be 1.3 to 1.7 kb in size such as about 1.3, 1.4, 1.5, 1.6, and 1.7 kb in size. As a non-limiting example, the small double stranded viral genome may be 1.6 kb in size. Additionally, the viral genome may comprise a promoter and a polyA tail.

[0133] In one embodiment, the viral genome which comprises a payload described herein, may a medium single stranded viral genome. A medium single stranded viral genome may be 3.6 to 4.3 kb in size such as about 3.6, 3.7, 3.8, 3.9, 4.0, 4.1, 4.2 and 4.3 kb in size. As a non-limiting example, the medium single stranded viral genome may be 4.0 kb in size. Additionally, the viral genome may comprise a promoter and a polyA tail.

[0134] In one embodiment, the viral genome which comprises a payload described herein, may be a medium double stranded viral genome. A medium double stranded viral genome may be 1.8 to 2.1 kb in size such as about 1.8, 1.9, 2.0, and 2.1 kb in size. As a non-limiting example, the medium double stranded viral genome may be 2.0 kb in size. Additionally, the viral genome may comprise a promoter and a polyA tail.

[0135] In one embodiment, the viral genome which comprises a payload described herein, may be a large single stranded viral genome. A large single stranded viral genome may be 4.4 to 6.0 kb in size such as about 4.4, 4.5, 4.6, 4.7, 4.8, 4.9, 5.0, 5.1, 5.2, 5.3, 5.4, 5.5, 5.6, 5.7, 5.8, 5.9 and 6.0 kb in size. As a non-limiting example, the large single stranded viral genome may be 4.7 kb in size. As another non-limiting example, the large single stranded viral genome may be 4.8 kb in size. As yet another non-limiting example, the large single stranded viral genome may be 6.0 kb in size. Additionally, the viral genome may comprise a promoter and a polyA tail.

[0136] In one embodiment, the viral genome which comprises a payload described herein, may be a large double stranded viral genome. A large double stranded viral genome may be 2.2 to 3.0 kb in size such as about 2.2, 2.3, 2.4, 2.5, 2.6, 2.7, 2.8, 2.9 and 3.0 kb in size. As a non-limiting example, the large double stranded viral genome may be 2.4 kb in size. Additionally, the viral genome may comprise a promoter and a polyA tail.

[0137] Viral Genome Component: Inverted Terminal Repeats (ITRs)

[0138] The AAV particles of the present invention comprise a viral genome with at least one ITR region and a payload region. In one embodiment the viral genome has two ITRs. These two ITRs flank the payload region at the 5′ and 3′ ends. The ITRs function as origins of replication comprising recognition sites for replication. ITRs comprise sequence regions which can be complementary and symmetrically arranged. ITRs incorporated into viral genomes of the invention may be comprised of naturally occurring polynucleotide sequences or recombinantly derived polynucleotide sequences.

[0139] The ITRs may be derived from the same serotype as the capsid, selected from any of the serotypes listed in Table 1, or a derivative thereof. The ITR may be of a different serotype from the capsid.

[0140] In one embodiment the AAV particle has more than one ITR. In a non-limiting example, the AAV particle has a viral genome comprising two ITRs. In one embodiment the ITRs are of the same serotype as one another. In another embodiment the ITRs are of different serotypes. Non-limiting examples include zero, one or both of the ITRs having the same serotype as the capsid. In one embodiment both ITRs of the viral genome of the AAV particle are AAV2 ITRs.

[0141] Independently, each ITR may be about 100 to about 150 nucleotides in length. An ITR may be about 100-105 nucleotides in length, 106-110 nucleotides in length, 111-115 nucleotides in length, 116-120 nucleotides in length, 121-125 nucleotides in length, 126-130 nucleotides in length, 131-135 nucleotides in length, 136-140 nucleotides in length, 141-145 nucleotides in length or 146-150 nucleotides in length. In one embodiment the ITRs are 140-142 nucleotides in length. Non limiting examples of ITR length are 102, 140, 141, 142, 145 nucleotides in length, and those having at least 95% identity thereto.

[0142] In one embodiment, the AAV particle comprises a nucleic acid sequence encoding an siRNA molecule which may be located near the 5′ end of the flip ITR in an expression vector. In another embodiment, the AAV particle comprises a nucleic acid sequence encoding an siRNA molecule may be located near the 3′ end of the flip ITR in an expression vector. In yet another embodiment, the AAV particle comprises a nucleic acid sequence encoding an siRNA molecule may be located near the 5′ end of the flop ITR in an expression vector. In yet another embodiment, the AAV particle comprises a nucleic acid sequence encoding an siRNA molecule may be located near the 3′ end of the flop ITR in an expression vector. In one embodiment, the AAV particle comprises a nucleic acid sequence encoding an siRNA molecule may be located between the 5′ end of the flip ITR and the 3′ end of the flop ITR in an expression vector. In one embodiment, the AAV particle comprises a nucleic acid sequence encoding an siRNA molecule may be located between (e.g., half-way between the 5′ end of the flip ITR and 3′ end of the flop ITR or the 3′ end of the flop ITR and the 5′ end of the flip ITR), the 3′ end of the flip ITR and the 5′ end of the flip ITR in an expression vector. As a non-limiting example, the AAV particle comprises a nucleic acid sequence encoding an siRNA molecule may be located within 1, 2, 3, 4, 5, 6, 7, 8, 9, 10, 11, 12, 13, 14, 15, 16, 17, 18, 19, 20, 21, 22, 23, 24, 25, 26, 27, 28, 29, 30 or more than 30 nucleotides downstream from the 5′ or 3′ end of an ITR (e.g., Flip or Flop ITR) in an expression vector. As a non-limiting example, the AAV particle comprises a nucleic acid sequence encoding an siRNA molecule may be located within 1, 2, 3, 4, 5, 6, 7, 8, 9, 10, 11, 12, 13, 14, 15, 16, 17, 18, 19, 20, 21, 22, 23, 24, 25, 26, 27, 28, 29, 30 or more than 30 nucleotides upstream from the 5′ or 3′ end of an ITR (e.g., Flip or Flop ITR) in an expression vector. As another non-limiting example, the AAV particle comprises a nucleic acid sequence encoding an siRNA molecule may be located within 1-5, 1-10, 1-15, 1-20, 1-25, 1-30, 5-10, 5-15, 5-20, 5-25, 5-30, 10-15, 10-20, 10-25, 10-30, 15-20, 15-25, 15-30, 20-25, 20-30 or 25-30 nucleotides downstream from the 5′ or 3′ end of an ITR (e.g., Flip or Flop ITR) in an expression vector. As another non-limiting example, the AAV particle comprises a nucleic acid sequence encoding an siRNA molecule may be located within 1-5, 1-10, 1-15, 1-20, 1-25, 1-30, 5-10, 5-15, 5-20, 5-25, 5-30, 10-15, 10-20, 10-25, 10-30, 15-20, 15-25, 15-30, 20-25, 20-30 or 25-30 upstream from the 5′ or 3′ end of an ITR (e.g., Flip or Flop ITR) in an expression vector. As a non-limiting example, the AAV particle comprises a nucleic acid sequence encoding an siRNA molecule may be located within the first 1%, 2%, 3%, 4%, 5%, 6%, 7%, 8%, 9%, 10%, 15%, 20%, 25% or more than 25% of the nucleotides upstream from the 5′ or 3′ end of an ITR (e.g., Flip or Flop ITR) in an expression vector. As another non-limiting example, the AAV particle comprises a nucleic acid sequence encoding an siRNA molecule may be located with the first 1-5%, 1-10%, 1-15%, 1-20%, 1-25%, 5-10%, 5-15%, 5-20%, 5-25%, 10-15%, 10-20%, 10-25%, 15-20%, 15-25%, or 20-25% downstream from the 5′ or 3′ end of an ITR (e.g., Flip or Flop ITR) in an expression vector.

[0143] Viral Genome Component: Promoters

[0144] In one embodiment, the payload region of the viral genome comprises at least one element to enhance the transgene target specificity and expression (See e.g., Powell et al. Viral Expression Cassette Elements to Enhance Transgene Target Specificity and Expression in Gene Therapy, 2015; the contents of which are herein incorporated by reference in its entirety). Non-limiting examples of elements to enhance the transgene target specificity and expression include promoters, endogenous miRNAs, post-transcriptional regulatory elements (PREs), polyadenylation (PolyA) signal sequences and upstream enhancers (USEs), CMV enhancers and introns.

[0145] A person skilled in the art may recognize that expression of the polypeptides of the invention in a target cell may require a specific promoter, including but not limited to, a promoter that is species specific, inducible, tissue-specific, or cell cycle-specific (Parr et al., Nat. Med. 3:1145-9 (1997); the contents of which are herein incorporated by reference in their entirety).

[0146] In one embodiment, the promoter is deemed to be efficient when it drives expression of the polypeptide(s) encoded in the payload region of the viral genome of the AAV particle.

[0147] In one embodiment, the promoter is a promoter deemed to be efficient to drive the expression of the modulatory polynucleotide.

[0148] In one embodiment, the promoter is a promoter deemed to be efficient when it drives expression in the cell being targeted.

[0149] In one embodiment, the promoter drives expression of the payload for a period of time in targeted tissues. Expression driven by a promoter may be for a period of 1 hour, 2, hours, 3 hours, 4 hours, 5 hours, 6 hours, 7 hours, 8 hours, 9 hours, 10 hours, 11 hours, 12 hours, 13 hours, 14 hours, 15 hours, 16 hours, 17 hours, 18 hours, 19 hours, 20 hours, 21 hours, 22 hours, 23 hours, 1 day, 2 days, 3 days, 4 days, 5 days, 6 days, 1 week, 8 days, 9 days, 10 days, 11 days, 12 days, 13 days, 2 weeks, 15 days, 16 days, 17 days, 18 days, 19 days, 20 days, 3 weeks, 22 days, 23 days, 24 days, 25 days, 26 days, 27 days, 28 days, 29 days, 30 days, 31 days, 1 month, 2 months, 3 months, 4 months, 5 months, 6 months, 7 months, 8 months, 9 months, 10 months, 11 months, 1 year, 13 months, 14 months, 15 months, 16 months, 17 months, 18 months, 19 months, 20 months, 21 months, 22 months, 23 months, 2 years, 3 years, 4 years, 5 years, 6 years, 7 years, 8 years, 9 years, 10 years or more than 10 years. Expression may be for 1-5 hours, 1-12 hours, 1-2 days, 1-5 days, 1-2 weeks, 1-3 weeks, 1-4 weeks, 1-2 months, 1-4 months, 1-6 months, 2-6 months, 3-6 months, 3-9 months, 4-8 months, 6-12 months, 1-2 years, 1-5 years, 2-5 years, 3-6 years, 3-8 years, 4-8 years or 5-10 years.

[0150] In one embodiment, the promoter drives expression of the payload for at least 1 month, 2 months, 3 months, 4 months, 5 months, 6 months, 7 months, 8 months, 9 months, 10 months, 11 months, 1 year, 2 years, 3 years 4 years, 5 years, 6 years, 7 years, 8 years, 9 years, 10 years, 11 years, 12 years, 13 years, 14 years, 15 years, 16 years, 17 years, 18 years, 19 years, 20 years, 21 years, 22 years, 23 years, 24 years, 25 years, 26 years, 27 years, 28 years, 29 years, 30 years, 31 years, 32 years, 33 years, 34 years, 35 years, 36 years, 37 years, 38 years, 39 years, 40 years, 41 years, 42 years, 43 years, 44 years, 45 years, 46 years, 47 years, 48 years, 49 years, 50 years, 55 years, 60 years, 65 years, or more than 65 years.

[0151] Promoters may be naturally occurring or non-naturally occurring. Non-limiting examples of promoters include viral promoters, plant promoters and mammalian promoters. In some embodiments, the promoters may be human promoters. In some embodiments, the promoter may be truncated.

[0152] Promoters which drive or promote expression in most tissues include, but are not limited to, human elongation factor 1α-subunit (EF1α), cytomegalovirus (CMV) immediate-early enhancer and/or promoter, chicken β-actin (CBA) and its derivative CAG, R glucuronidase (GUSB), or ubiquitin C (UBC). Tissue-specific expression elements can be used to restrict expression to certain cell types such as, but not limited to, muscle specific promoters, B cell promoters, monocyte promoters, leukocyte promoters, macrophage promoters, pancreatic acinar cell promoters, endothelial cell promoters, lung tissue promoters, astrocyte promoters, or nervous system promoters which can be used to restrict expression to neurons, astrocytes, or oligodendrocytes.

[0153] Non-limiting examples of muscle-specific promoters include mammalian muscle creatine kinase (MCK) promoter, mammalian desmin (DES) promoter, mammalian troponin I (TNNI2) promoter, and mammalian skeletal alpha-actin (ASKA) promoter (see, e.g. U.S. Patent Publication US 20110212529, the contents of which are herein incorporated by reference in their entirety) Non-limiting examples of tissue-specific expression elements for neurons include neuron-specific enolase (NSE), platelet-derived growth factor (PDGF), platelet-derived growth factor B-chain (PDGF-β), synapsin (Syn), methyl-CpG binding protein 2 (MeCP2), Ca²⁺/calmodulin-dependent protein kinase II (CaMKII), metabotropic glutamate receptor 2 (mGluR2), neurofilament light (NFL) or heavy (NFH), β-globin minigene nβ2, preproenkephalin (PPE), enkephalin (Enk) and excitatory amino acid transporter 2 (EAAT2) promoters. Non-limiting examples of tissue-specific expression elements for astrocytes include glial fibrillary acidic protein (GFAP) and EAAT2 promoters. A non-limiting example of a tissue-specific expression element for oligodendrocytes includes the myelin basic protein (MBP) promoter.

[0154] In one embodiment, the promoter may be less than 1 kb. The promoter may have a length of 200, 210, 220, 230, 240, 250, 260, 270, 280, 290, 300, 310, 320, 330, 340, 350, 360, 370, 380, 390, 400, 410, 420, 430, 440, 450, 460, 470, 480, 490, 500, 510, 520, 530, 540, 550, 560, 570, 580, 590, 600, 610, 620, 630, 640, 650, 660, 670, 680, 690, 700, 710, 720, 730, 740, 750, 760, 770, 780, 790, 800 or more than 800 nucleotides. The promoter may have a length between 200-300, 200-400, 200-500, 200-600, 200-700, 200-800, 300-400, 300-500, 300-600, 300-700, 300-800, 400-500, 400-600, 400-700, 400-800, 500-600, 500-700, 500-800, 600-700, 600-800 or 700-800.

[0155] In one embodiment, the promoter may be a combination of two or more components of the same or different starting or parental promoters such as, but not limited to, CMV and CBA. Each component may have a length of 200, 210, 220, 230, 240, 250, 260, 270, 280, 290, 300, 310, 320, 330, 340, 350, 360, 370, 380, 381, 382, 383, 384, 385, 386, 387, 388, 389, 390, 400, 410, 420, 430, 440, 450, 460, 470, 480, 490, 500, 510, 520, 530, 540, 550, 560, 570, 580, 590, 600, 610, 620, 630, 640, 650, 660, 670, 680, 690, 700, 710, 720, 730, 740, 750, 760, 770, 780, 790, 800 or more than 800. Each component may have a length between 200-300, 200-400, 200-500, 200-600, 200-700, 200-800, 300-400, 300-500, 300-600, 300-700, 300-800, 400-500, 400-600, 400-700, 400-800, 500-600, 500-700, 500-800, 600-700, 600-800 or 700-800. In one embodiment, the promoter is a combination of a 382 nucleotide CMV-enhancer sequence and a 260 nucleotide CBA-promoter sequence.

[0156] In one embodiment, the viral genome comprises a ubiquitous promoter. Non-limiting examples of ubiquitous promoters include CMV, CBA (including derivatives CAG, CBh, etc.), EF-1α, PGK, UBC, GUSB (hGBp), and UCOE (promoter of HNRPA2B1-CBX3).

[0157] Yu et al. (Molecular Pain 2011, 7:63; the contents of which are herein incorporated by reference in their entirety) evaluated the expression of eGFP under the CAG, EFIα, PGK and UBC promoters in rat DRG cells and primary DRG cells using lentiviral vectors and found that UBC showed weaker expression than the other 3 promoters and only 10-12% glial expression was seen for all promoters. Soderblom et al. (E. Neuro 2015; the contents of which are herein incorporated by reference in its entirety) evaluated the expression of eGFP in AAV8 with CMV and UBC promoters and AAV2 with the CMV promoter after injection in the motor cortex. Intranasal administration of a plasmid containing a UBC or EFIα promoter showed a sustained airway expression greater than the expression with the CMV promoter (See e.g., Gill et al., Gene Therapy 2001, Vol. 8, 1539-1546; the contents of which are herein incorporated by reference in their entirety). Husain et al. (Gene Therapy 2009; the contents of which are herein incorporated by reference in its entirety) evaluated an HOH construct with a hGUSB promoter, a HSV-1LAT promoter and an NSE promoter and found that the HOH construct showed weaker expression than NSE in mouse brain. Passini and Wolfe (J. Virol. 2001, 12382-12392, the contents of which are herein incorporated by reference in its entirety) evaluated the long term effects of the HOH vector following an intraventricular injection in neonatal mice and found that there was sustained expression for at least 1 year. Low expression in all brain regions was found by Xu et al. (Gene Therapy 2001, 8, 1323-1332; the contents of which are herein incorporated by reference in their entirety) when NFL and NFH promoters were used as compared to the CMV-lacZ, CMV-luc, EF, GFAP, hENK, nAChR, PPE, PPE+wpre, NSE (0.3 kb), NSE (1.8 kb) and NSE (1.8 kb+wpre). Xu et al. found that the promoter activity in descending order was NSE (1.8 kb), EF, NSE (0.3 kb), GFAP, CMV, hENK, PPE, NFL and NFH. NFL is a 650 nucleotide promoter and NFH is a 920 nucleotide promoter which are both absent in the liver but NFH is abundant in the sensory proprioceptive neurons, brain and spinal cord and NFH is present in the heart. Scn8a is a 470 nucleotide promoter which expresses throughout the DRG, spinal cord and brain with particularly high expression seen in the hippocampal neurons and cerebellar Purkinje cells, cortex, thalamus and hypothalamus (See e.g., Drews et al. Identification of evolutionary conserved, functional noncoding elements in the promoter region of the sodium channel gene SCN8A, Mamm Genome (2007) 18:723-731; and Raymond et al. Expression of Alternatively Spliced Sodium Channel α-subunit genes, Journal of Biological Chemistry (2004) 279(44) 46234-46241; the contents of each of which are herein incorporated by reference in their entireties).

[0158] Any of promoters taught by the aforementioned Yu, Soderblom, Gill, Husain, Passini, Xu, Drews or Raymond may be used in the present inventions.

[0159] In one embodiment, the promoter is not cell specific.

[0160] In one embodiment, the promoter is an ubiquitin c (UBC) promoter. The UBC promoter may have a size of 300-350 nucleotides. As a non-limiting example, the UBC promoter is 332 nucleotides.

[0161] In one embodiment, the promoter is a β-glucuronidase (GUSB) promoter. The GUSB promoter may have a size of 350-400 nucleotides. As a non-limiting example, the GUSB promoter is 378 nucleotides.

[0162] In one embodiment, the promoter is a neurofilament light (NFL) promoter. The NFL promoter may have a size of 600-700 nucleotides. As a non-limiting example, the NFL promoter is 650 nucleotides. As a non-limiting example, the construct may be AAV-promoter-CMV/globin intron-modulatory polynucleotide-RBG, where the AAV may be self-complementary and the AAV may be the DJ serotype.

[0163] In one embodiment, the promoter is a neurofilament heavy (NFH) promoter. The NFH promoter may have a size of 900-950 nucleotides. As a non-limiting example, the NFH promoter is 920 nucleotides. As a non-limiting example, the construct may be AAV-promoter-CMV/globin intron-modulatory polynucleotide-RBG, where the AAV may be self-complementary and the AAV may be the DJ serotype.

[0164] In one embodiment, the promoter is a scn8a promoter. The scn8a promoter may have a size of 450-500 nucleotides. As a non-limiting example, the scn8a promoter is 470 nucleotides. As a non-limiting example, the construct may be AAV-promoter-CMV/globin intron-modulatory polynucleotide-RBG, where the AAV may be self-complementary and the AAV may be the DJ serotype

[0165] In one embodiment, the viral genome comprises a Pol III promoter.

[0166] In one embodiment, the viral genome comprises a P1 promoter.

[0167] In one embodiment, the viral genome comprises a FXN promoter.

[0168] In one embodiment, the promoter is a phosphoglycerate kinase 1 (PGK) promoter.

[0169] In one embodiment, the promoter is a chicken β-actin (CBA) promoter.

[0170] In one embodiment, the promoter is a CAG promoter which is a construct comprising the cytomegalovirus (CMV) enhancer fused to the chicken beta-actin (CBA) promoter.

[0171] In one embodiment, the promoter is a cytomegalovirus (CMV) promoter.

[0172] In one embodiment, the viral genome comprises a H1 promoter.

[0173] In one embodiment, the viral genome comprises a U6 promoter.

[0174] In one embodiment, the promoter is a liver or a skeletal muscle promoter. Non-limiting examples of liver promoters include human α-1-antitrypsin (hAAT) and thyroxine binding globulin (TBG).

[0175] Non-limiting examples of skeletal muscle promoters include Desmin, MCK or synthetic C5-12.

[0176] In one embodiment, the promoter is a RNA pol III promoter. As a non-limiting example, the RNA pol III promoter is U6. As a non-limiting example, the RNA pol III promoter is H1.

[0177] In one embodiment, the viral genome comprises two promoters. As a non-limiting example, the promoters are an EF1α promoter and a CMV promoter.

[0178] In one embodiment, the viral genome comprises an enhancer element, a promoter and/or a 5′UTR intron. The enhancer element, also referred to herein as an “enhancer,” may be, but is not limited to, a CMV enhancer, the promoter may be, but is not limited to, a CMV, CBA, UBC, GUSB, NSE, Synapsin, MeCP2, and GFAP promoter and the 5′UTR/intron may be, but is not limited to, SV40, and CBA-MVM. As a non-limiting example, the enhancer, promoter and/or intron used in combination may be: (1) CMV enhancer, CMV promoter, SV40 5′UTR intron; (2) CMV enhancer, CBA promoter, SV 40 5′UTR intron; (3) CMV enhancer, CBA promoter, CBA-MVM 5′UTR intron; (4) UBC promoter; (5) GUSB promoter; (6) NSE promoter; (7) Synapsin promoter; (8) MeCP2 promoter, (9) GFAP promoter, (10) H1 promoter; and (11) U6 promoter.

[0179] In one embodiment, the viral genome comprises an engineered promoter.

[0180] In another embodiment the viral genome comprises a promoter from a naturally expressed protein.

[0181] Viral Genome Component: Untranslated Regions (UTRs)

[0182] By definition, wild type untranslated regions (UTRs) of a gene are transcribed but not translated. Generally, the 5′ UTR starts at the transcription start site and ends at the start codon and the 3′ UTR starts immediately following the stop codon and continues until the termination signal for transcription.

[0183] Features typically found in abundantly expressed genes of specific target organs may be engineered into UTRs to enhance the stability and protein production. As a non-limiting example, a 5′ UTR from mRNA normally expressed in the liver (e.g., albumin, serum amyloid A, Apolipoprotein A/B/E, transferrin, alpha fetoprotein, erythropoietin, or Factor VIII) may be used in the viral genomes of the AAV particles of the invention to enhance expression in hepatic cell lines or liver. While not wishing to be bound by theory, wild-type 5′ untranslated regions (UTRs) include features which play roles in translation initiation. Kozak sequences, which are commonly known to be involved in the process by which the ribosome initiates translation of many genes, are usually included in 5′ UTRs. Kozak sequences have the consensus CCR(A/G)CCAUGG, where R is a purine (adenine or guanine) three bases upstream of the start codon (ATG), which is followed by another ‘G’.

[0184] In one embodiment, the 5′UTR in the viral genome includes a Kozak sequence.

[0185] In one embodiment, the 5′UTR in the viral genome does not include a Kozak sequence.

[0186] While not wishing to be bound by theory, wild-type 3′ UTRs are known to have stretches of Adenosines and Uridines embedded therein. These AU rich signatures are particularly prevalent in genes with high rates of turnover. Based on their sequence features and functional properties, the AU rich elements (AREs) can be separated into three classes (Chen et al, 1995, the contents of which are herein incorporated by reference in its entirety): Class I AREs, such as, but not limited to, c-Myc and MyoD, contain several dispersed copies of an AUUUA motif within U-rich regions. Class II AREs, such as, but not limited to, GM-CSF and TNF-α, possess two or more overlapping UUAUUUA(U/A)(U/A) nonamers. Class III ARES, such as, but not limited to, c-Jun and Myogenin, are less well defined. These U rich regions do not contain an AUUUA motif. Most proteins binding to the AREs are known to destabilize the messenger, whereas members of the ELAV family, most notably HuR, have been documented to increase the stability of mRNA. HuR binds to AREs of all the three classes. Engineering the HuR specific binding sites into the 3′ UTR of nucleic acid molecules will lead to HuR binding and thus, stabilization of the message in vivo. Introduction, removal or modification of 3′ UTR AU rich elements (AREs) can be used to modulate the stability of polynucleotides. When engineering specific polynucleotides, e.g., payload regions of viral genomes, one or more copies of an ARE can be introduced to make polynucleotides less stable and thereby curtail translation and decrease production of the resultant protein. Likewise, AREs can be identified and removed or mutated to increase the intracellular stability and thus increase translation and production of the resultant protein.

[0187] In one embodiment, the 3′ UTR of the viral genome may include an oligo(dT) sequence for templated addition of a poly-A tail.

[0188] In one embodiment, the viral genome may include at least one miRNA seed, binding site or full sequence. microRNAs (or miRNA or miR) are 19-25 nucleotide noncoding RNAs that bind to the sites of nucleic acid targets and down-regulate gene expression either by reducing nucleic acid molecule stability or by inhibiting translation. A microRNA sequence comprises a “seed” region, i.e., a sequence in the region of positions 2-8 of the mature microRNA, which sequence has perfect Watson-Crick complementarity to the miRNA target sequence of the nucleic acid.

[0189] In one embodiment, the viral genome may be engineered to include, alter or remove at least one miRNA binding site, sequence or seed region.

[0190] Any UTR from any gene known in the art may be incorporated into the viral genome of the AAV particle. These UTRs, or portions thereof, may be placed in the same orientation as in the gene from which they were selected or they may be altered in orientation or location. In one embodiment, the UTR used in the viral genome of the AAV particle may be inverted, shortened, lengthened, made with one or more other 5′ UTRs or 3′ UTRs known in the art. As used herein, the term “altered” as it relates to a UTR, means that the UTR has been changed in some way in relation to a reference sequence. For example, a 3′ or 5′ UTR may be altered relative to a wild type or native UTR by the change in orientation or location as taught above or may be altered by the inclusion of additional nucleotides, deletion of nucleotides, swapping or transposition of nucleotides.

[0191] In one embodiment, the viral genome of the AAV particle comprises at least one artificial UTRs which is not a variant of a wild type UTR.

[0192] In one embodiment, the viral genome of the AAV particle comprises UTRs which have been selected from a family of transcripts whose proteins share a common function, structure, feature or property.

[0193] Viral Genome Component: Polyadenylation Sequence

[0194] In one embodiment, the viral genome of the AAV particles of the present invention comprise at least one polyadenylation sequence. The viral genome of the AAV particle may comprise a polyadenylation sequence between the 3′ end of the payload coding sequence and the 5′ end of the 3′ITR.

[0195] In one embodiment, the polyadenylation sequence or “polyA sequence” may range from absent to about 500 nucleotides in length. The polyadenylation sequence may be, but is not limited to, 1, 2, 3, 4, 5, 6, 7, 8, 9, 10, 11, 12, 13, 14, 15, 16, 17, 18, 19, 20, 21, 22, 23, 24, 25, 26, 27, 28, 29, 30, 31, 32, 33, 34, 35, 36, 37, 38, 39, 40, 41, 42, 43, 44, 45, 46, 47, 48, 49, 50, 51, 52, 53, 54, 55, 56, 57, 58, 59, 60, 61, 62, 63, 64, 65, 66, 67, 68, 69, 70, 71, 72, 73, 74, 75, 76, 77, 78, 79, 80, 81, 82, 83, 84, 85, 86, 87, 88, 89, 90, 91, 92, 93, 94, 95, 96, 97, 98, 99, 100, 101, 102, 103, 104, 105, 106, 107, 108, 109, 110, 111, 112, 113, 114, 115, 116, 117, 118, 119, 120, 121, 122, 123, 124, 125, 126, 127, 128, 129, 130, 131, 132, 133, 134, 135, 136, 137, 138, 139, 140, 141, 142, 143, 144, 145, 146, 147, 148, 149, 150, 151, 152, 153, 154, 155, 156, 157, 158, 159, 160, 161, 162, 163, 164, 165, 166, 167, 168, 169, 170, 171, 172, 173, 174, 175, 176, 177, 178, 179, 180, 181, 182, 183, 184, 185, 186, 187, 188, 189, 190, 191, 192, 193, 194, 195, 196, 197, 198, 199, 200, 201, 202, 203, 204, 205, 206, 207, 208, 209, 210, 211, 212, 213, 214, 215, 216, 217, 218, 219, 220, 221, 222, 223, 224, 225, 226, 227, 228, 229, 230, 231, 232, 233, 234, 235, 236, 237, 238, 239, 240, 241, 242, 243, 244, 245, 246, 247, 248, 249, 250, 251, 252, 253, 254, 255, 256, 257, 258, 259, 260, 261, 262, 263, 264, 265, 266, 267, 268, 269, 270, 271, 272, 273, 274, 275, 276, 277, 278, 279, 280, 281, 282, 283, 284, 285, 286, 287, 288, 289, 290, 291, 292, 293, 294, 295, 296, 297, 298, 299, 300, 301, 302, 303, 304, 305, 306, 307, 308, 309, 310, 311, 312, 313, 314, 315, 316, 317, 318, 319, 320, 321, 322, 323, 324, 325, 326, 327, 328, 329, 330, 331, 332, 333, 334, 335, 336, 337, 338, 339, 340, 341, 342, 343, 344, 345, 346, 347, 348, 349, 350, 351, 352, 353, 354, 355, 356, 357, 358, 359, 360, 361, 362, 363, 364, 365, 366, 367, 368, 369, 370, 371, 372, 373, 374, 375, 376, 377, 378, 379, 380, 381, 382, 383, 384, 385, 386, 387, 388, 389, 390, 391, 392, 393, 394, 395, 396, 397, 398, 399, 400, 401, 402, 403, 404, 405, 406, 407, 408, 409, 410, 411, 412, 413, 414, 415, 416, 417, 418, 419, 420, 421, 422, 423, 424, 425, 426, 427, 428, 429, 430, 431, 432, 433, 434, 435, 436, 437, 438, 439, 440, 441, 442, 443, 444, 445, 446, 447, 448, 449, 450, 451, 452, 453, 454, 455, 456, 457, 458, 459, 460, 461, 462, 463, 464, 465, 466, 467, 468, 469, 470, 471, 472, 473, 474, 475, 476, 477, 478, 479, 480, 481, 482, 483, 484, 485, 486, 487, 488, 489, 490, 491, 492, 493, 494, 495, 496, 497, 498, 499, and 500 nucleotides in length.

[0196] In one embodiment, the polyadenylation sequence is 50-100 nucleotides in length.

[0197] In one embodiment, the polyadenylation sequence is 50-150 nucleotides in length.

[0198] In one embodiment, the polyadenylation sequence is 50-160 nucleotides in length.

[0199] In one embodiment, the polyadenylation sequence is 50-200 nucleotides in length.

[0200] In one embodiment, the polyadenylation sequence is 60-100 nucleotides in length.

[0201] In one embodiment, the polyadenylation sequence is 60-150 nucleotides in length.

[0202] In one embodiment, the polyadenylation sequence is 60-160 nucleotides in length.

[0203] In one embodiment, the polyadenylation sequence is 60-200 nucleotides in length.

[0204] In one embodiment, the polyadenylation sequence is 70-100 nucleotides in length.

[0205] In one embodiment, the polyadenylation sequence is 70-150 nucleotides in length.

[0206] In one embodiment, the polyadenylation sequence is 70-160 nucleotides in length.

[0207] In one embodiment, the polyadenylation sequence is 70-200 nucleotides in length.

[0208] In one embodiment, the polyadenylation sequence is 80-100 nucleotides in length.

[0209] In one embodiment, the polyadenylation sequence is 80-150 nucleotides in length.

[0210] In one embodiment, the polyadenylation sequence is 80-160 nucleotides in length.

[0211] In one embodiment, the polyadenylation sequence is 80-200 nucleotides in length.

[0212] In one embodiment, the polyadenylation sequence is 90-100 nucleotides in length.

[0213] In one embodiment, the polyadenylation sequence is 90-150 nucleotides in length.

[0214] In one embodiment, the polyadenylation sequence is 90-160 nucleotides in length.

[0215] In one embodiment, the polyadenylation sequence is 90-200 nucleotides in length.

[0216] In one embodiment, the AAV particle comprises a nucleic acid sequence encoding an siRNA molecule may be located upstream of the polyadenylation sequence in an expression vector.

[0217] Further, the AAV particle comprises a nucleic acid sequence encoding an siRNA molecule may be located downstream of a promoter such as, but not limited to, CMV, U6, CAG, CBA or a CBA promoter with a SV40 intron or a human betaglobin intron in an expression vector. As a non-limiting example, the AAV particle comprises a nucleic acid sequence encoding an siRNA molecule may be located within 1, 2, 3, 4, 5, 6, 7, 8, 9, 10, 11, 12, 13, 14, 15, 16, 17, 18, 19, 20, 21, 22, 23, 24, 25, 26, 27, 28, 29, 30 or more than 30 nucleotides downstream from the promoter and/or upstream of the polyadenylation sequence in an expression vector. As another non-limiting example, the AAV particle comprises a nucleic acid sequence encoding an siRNA molecule may be located within 1-5, 1-10, 1-15, 1-20, 1-25, 1-30, 5-10, 5-15, 5-20, 5-25, 5-30, 10-15, 10-20, 10-25, 10-30, 15-20, 15-25, 15-30, 20-25, 20-30 or 25-30 nucleotides downstream from the promoter and/or upstream of the polyadenylation sequence in an expression vector. As a non-limiting example, the AAV particle comprises a nucleic acid sequence encoding an siRNA molecule may be located within the first 1%, 2%, 3%, 4%, 5%, 6%, 7%, 8%, 9%, 10%, 15%, 20%, 25% or more than 25% of the nucleotides downstream from the promoter and/or upstream of the polyadenylation sequence in an expression vector. As another non-limiting example, the AAV particle comprises a nucleic acid sequence encoding an siRNA molecule may be located with the first 1-5%, 1-10%, 1-15%, 1-20%, 1-25%, 5-10%, 5-15%, 5-20%, 5-25%, 10-15%, 10-20%, 10-25%, 15-20%, 15-25%, or 20-25% downstream from the promoter and/or upstream of the polyadenylation sequence in an expression vector.

[0218] In one embodiment, the AAV particle comprises a rabbit globin polyadenylation (polyA) signal sequence.

[0219] In one embodiment, the AAV particle comprises a human growth hormone polyadenylation (polyA) signal sequence.

[0220] Viral Genome Component: Introns

[0221] In one embodiment, the payload region comprises at least one element to enhance the expression such as one or more introns or portions thereof. Non-limiting examples of introns include, MVM (67-97 bps), F.IX truncated intron 1 (300 bps), β-globin SD/immunoglobulin heavy chain splice acceptor (250 bps), adenovirus splice donor/immunoglobin splice acceptor (500 bps), SV40 late splice donor/splice acceptor (19S/16S) (180 bps) and hybrid adenovirus splice donor/IgG splice acceptor (230 bps).

[0222] In one embodiment, the intron or intron portion may be 100-500 nucleotides in length. The intron may have a length of 80, 90, 100, 110, 120, 130, 140, 150, 160, 170, 171, 172, 173, 174, 175, 176, 177, 178, 179, 180, 190, 200, 210, 220, 230, 240, 250, 260, 270, 280, 290, 300, 310, 320, 330, 340, 350, 360, 370, 380, 390, 400, 410, 420, 430, 440, 450, 460, 470, 480, 490 or 500. The intron may have a length between 80-100, 80-120, 80-140, 80-160, 80-180, 80-200, 80-250, 80-300, 80-350, 80-400, 80-450, 80-500, 200-300, 200-400, 200-500, 300-400, 300-500, or 400-500.

[0223] In one embodiment, the AAV viral genome may comprise a promoter such as, but not limited to, CMV or U6. As a non-limiting example, the promoter for the AAV comprising the nucleic acid sequence for the siRNA molecules of the present invention is a CMV promoter. As another non-limiting example, the promoter for the AAV comprising the nucleic acid sequence for the siRNA molecules of the present invention is a U6 promoter.

[0224] In one embodiment, the AAV viral genome may comprise a CMV promoter.

[0225] In one embodiment, the AAV viral genome may comprise a U6 promoter.

[0226] In one embodiment, the AAV viral genome may comprise a CMV and a U6 promoter.

[0227] In one embodiment, the AAV viral genome may comprise a H1 promoter.

[0228] In one embodiment, the AAV viral genome may comprise a CBA promoter.

[0229] In one embodiment, the encoded siRNA molecule may be located downstream of a promoter in an expression vector such as, but not limited to, CMV, U6, H1, CBA, CAG, or a CBA promoter with an intron such as SV40 or others known in the art. Further, the encoded siRNA molecule may also be located upstream of the polyadenylation sequence in an expression vector. As a non-limiting example, the encoded siRNA molecule may be located within 1, 2, 3, 4, 5, 6, 7, 8, 9, 10, 11, 12, 13, 14, 15, 16, 17, 18, 19, 20, 21, 22, 23, 24, 25, 26, 27, 28, 29, 30 or more than 30 nucleotides downstream from the promoter and/or upstream of the polyadenylation sequence in an expression vector. As another non-limiting example, the encoded siRNA molecule may be located within 1-5, 1-10, 1-15, 1-20, 1-25, 1-30, 5-10, 5-15, 5-20, 5-25, 5-30, 10-15, 10-20, 10-25, 10-30, 15-20, 15-25, 15-30, 20-25, 20-30 or 25-30 nucleotides downstream from the promoter and/or upstream of the polyadenylation sequence in an expression vector. As a non-limiting example, the encoded siRNA molecule may be located within the first 1%, 2%, 3%, 4%, 5%, 6%, 7%, 8%, 9%, 10%, 15%, 20%, 25% or more than 25% of the nucleotides downstream from the promoter and/or upstream of the polyadenylation sequence in an expression vector. As another non-limiting example, the encoded siRNA molecule may be located with the first 1-5%, 1-10%, 1-15%, 1-20%, 1-25%, 5-10%, 5-15%, 5-20%, 5-25%, 10-15%, 10-20%, 10-25%, 15-20%, 15-25%, or 20-25% downstream from the promoter and/or upstream of the polyadenylation sequence in an expression vector.

[0230] Viral Genome Component: Filler Sequence

[0231] In one embodiment, the viral genome comprises one or more filler sequences.

[0232] In one embodiment, the viral genome comprises one or more filler sequences in order to have the length of the viral genome be the optimal size for packaging. As a non-limiting example, the viral genome comprises at least one filler sequence in order to have the length of the viral genome be about 2.3 kb. As a non-limiting example, the viral genome comprises at least one filler sequence in order to have the length of the viral genome be about 4.6 kb.

[0233] In one embodiment, the viral genome comprises one or more filler sequences in order to reduce the likelihood that a hairpin structure of the vector genome (e.g., a modulatory polynucleotide described herein) may be read as an inverted terminal repeat (ITR) during expression and/or packaging. As a non-limiting example, the viral genome comprises at least one filler sequence in order to have the length of the viral genome be about 2.3 kb. As a non-limiting example, the viral genome comprises at least one filler sequence in order to have the length of the viral genome be about 4.6 kb

[0234] In one embodiment, the viral genome is a single stranded (ss) viral genome and comprises one or more filler sequences which have a length about between 0.1 kb-3.8 kb, such as, but not limited to, 0.1 kb, 0.2 kb, 0.3 kb, 0.4 kb, 0.5 kb, 0.6 kb, 0.7 kb, 0.8 kb, 0.9 kb, 1 kb, 1.1 kb, 1.2 kb, 1.3 kb, 1.4 kb, 1.5 kb, 1.6 kb, 1.7 kb, 1.8 kb, 1.9 kb, 2 kb, 2.1 kb, 2.2 kb, 2.3 kb, 2.4 kb, 2.5 kb, 2.6 kb, 2.7 kb, 2.8 kb, 2.9 kb, 3 kb, 3.1 kb, 3.2 kb, 3.3 kb, 3.4 kb, 3.5 kb, 3.6 kb, 3.7 kb, or 3.8 kb. As a non-limiting example, the total length filler sequence in the vector genome is 3.1 kb. As a non-limiting example, the total length filler sequence in the vector genome is 2.7 kb. As a non-limiting example, the total length filler sequence in the vector genome is 0.8 kb. As a non-limiting example, the total length filler sequence in the vector genome is 0.4 kb. As a non-limiting example, the length of each filler sequence in the vector genome is 0.8 kb. As a non-limiting example, the length of each filler sequence in the vector genome is 0.4 kb.

[0235] In one embodiment, the viral genome is a self-complementary (sc) viral genome and comprises one or more filler sequences which have a length about between 0.1 kb-1.5 kb, such as, but not limited to, 0.1 kb, 0.2 kb, 0.3 kb, 0.4 kb, 0.5 kb, 0.6 kb, 0.7 kb, 0.8 kb, 0.9 kb, 1 kb, 1.1 kb, 1.2 kb, 1.3 kb, 1.4 kb, or 1.5 kb. As a non-limiting example, the total length filler sequence in the vector genome is 0.8 kb. As a non-limiting example, the total length filler sequence in the vector genome is 0.4 kb.

[0236] As a non-limiting example, the length of each filler sequence in the vector genome is 0.8 kb. As a non-limiting example, the length of each filler sequence in the vector genome is 0.4 kb

[0237] In one embodiment, the viral genome comprises any portion of a filler sequence. The viral genome may comprise 1%, 2%, 3%, 4%, 5%, 6%, 7%, 8%, 9%, 10%, 15%, 20%, 25%, 30%, 35%, 40%, 45%, 50%, 55%, 60%, 65%, 70%, 75%, 80%, 85%, 90%, 95%, or 99% of a filler sequence.

[0238] In one embodiment, the viral genome is a single stranded (ss) viral genome and comprises one or more filler sequences in order to have the length of the viral genome be about 4.6 kb. As a non-limiting example, the viral genome comprises at least one filler sequence and the filler sequence is located 3′ to the 5′ ITR sequence. As a non-limiting example, the viral genome comprises at least one filler sequence and the filler sequence is located 5′ to a promoter sequence. As a non-limiting example, the viral genome comprises at least one filler sequence and the filler sequence is located 3′ to the polyadenylation signal sequence. As a non-limiting example, the viral genome comprises at least one filler sequence and the filler sequence is located 5′ to the 3′ ITR sequence. As a non-limiting example, the viral genome comprises at least one filler sequence, and the filler sequence is located between two intron sequences. As a non-limiting example, the viral genome comprises at least one filler sequence, and the filler sequence is located within an intron sequence. As a non-limiting example, the viral genome comprises two filler sequences, and the first filler sequence is located 3′ to the 5′ ITR sequence and the second filler sequence is located 3′ to the polyadenylation signal sequence. As a non-limiting example, the viral genome comprises two filler sequences, and the first filler sequence is located 5′ to a promoter sequence and the second filler sequence is located 3′ to the polyadenylation signal sequence. As a non-limiting example, the viral genome comprises two filler sequences, and the first filler sequence is located 3′ to the 5′ ITR sequence and the second filler sequence is located 5′ to the 5′ ITR sequence.

[0239] In one embodiment, the viral genome is a self-complementary (sc) viral genome and comprises one or more filler sequences in order to have the length of the viral genome be about 2.3 kb. As a non-limiting example, the viral genome comprises at least one filler sequence and the filler sequence is located 3′ to the 5′ ITR sequence. As a non-limiting example, the viral genome comprises at least one filler sequence and the filler sequence is located 5′ to a promoter sequence. As a non-limiting example, the viral genome comprises at least one filler sequence and the filler sequence is located 3′ to the polyadenylation signal sequence. As a non-limiting example, the viral genome comprises at least one filler sequence and the filler sequence is located 5′ to the 3′ ITR sequence. As a non-limiting example, the viral genome comprises at least one filler sequence, and the filler sequence is located between two intron sequences. As a non-limiting example, the viral genome comprises at least one filler sequence, and the filler sequence is located within an intron sequence. As a non-limiting example, the viral genome comprises two filler sequences, and the first filler sequence is located 3′ to the 5′ ITR sequence and the second filler sequence is located 3′ to the polyadenylation signal sequence. As a non-limiting example, the viral genome comprises two filler sequences, and the first filler sequence is located 5′ to a promoter sequence and the second filler sequence is located 3′ to the polyadenylation signal sequence. As a non-limiting example, the viral genome comprises two filler sequences, and the first filler sequence is located 3′ to the 5′ ITR sequence and the second filler sequence is located 5′ to the 5′ ITR sequence.

[0240] In one embodiment, the viral genome may comprise one or more filler sequences between one of more regions of the viral genome. In one embodiment, the filler region may be located before a region such as, but not limited to, a payload region, an inverted terminal repeat (ITR), a promoter region, an intron region, an enhancer region, a polyadenylation signal sequence region, a multiple cloning site (MCS) region, and/or an exon region. In one embodiment, the filler region may be located after a region such as, but not limited to, a payload region, an inverted terminal repeat (ITR), a promoter region, an intron region, an enhancer region, a polyadenylation signal sequence region, a multiple cloning site (MCS) region, and/or an exon region. In one embodiment, the filler region may be located before and after a region such as, but not limited to, a payload region, an inverted terminal repeat (ITR), a promoter region, an intron region, an enhancer region, a polyadenylation signal sequence region, a multiple cloning site (MCS) region, and/or an exon region.

[0241] In one embodiment, the viral genome may comprise one or more filler sequences which bifurcates at least one region of the viral genome. The bifurcated region of the viral genome may comprise 1%, 2%, 3%, 4%, 5%, 6%, 7%, 8%, 9%, 10%, 15%, 20%, 25%, 30%, 35%, 40%, 45%, 50%, 55%, 60%, 65%, 70%, 75%, 80%, 85%, 90%, 95%, or 99% of the of the region to the 5′ of the filler sequence region. As a non-limiting example, the filler sequence may bifurcate at least one region so that 10% of the region is located 5′ to the filler sequence and 90% of the region is located 3′ to the filler sequence. As a non-limiting example, the filler sequence may bifurcate at least one region so that 20% of the region is located 5′ to the filler sequence and 80% of the region is located 3′ to the filler sequence. As a non-limiting example, the filler sequence may bifurcate at least one region so that 30% of the region is located 5′ to the filler sequence and 70% of the region is located 3′ to the filler sequence. As a non-limiting example, the filler sequence may bifurcate at least one region so that 40% of the region is located 5′ to the filler sequence and 60% of the region is located 3′ to the filler sequence. As a non-limiting example, the filler sequence may bifurcate at least one region so that 50% of the region is located 5′ to the filler sequence and 50% of the region is located 3′ to the filler sequence. As a non-limiting example, the filler sequence may bifurcate at least one region so that 60% of the region is located 5′ to the filler sequence and 40% of the region is located 3′ to the filler sequence. As a non-limiting example, the filler sequence may bifurcate at least one region so that 70% of the region is located 5′ to the filler sequence and 30% of the region is located 3′ to the filler sequence. As a non-limiting example, the filler sequence may bifurcate at least one region so that 80% of the region is located 5′ to the filler sequence and 20% of the region is located 3′ to the filler sequence. As a non-limiting example, the filler sequence may bifurcate at least one region so that 90% of the region is located 5′ to the filler sequence and 10% of the region is located 3′ to the filler sequence.

[0242] In one embodiment, the viral genome comprises a filler sequence after the 5′ ITR.

[0243] In one embodiment, the viral genome comprises a filler sequence after the promoter region. In one embodiment, the viral genome comprises a filler sequence after the payload region. In one embodiment, the viral genome comprises a filler sequence after the intron region. In one embodiment, the viral genome comprises a filler sequence after the enhancer region. In one embodiment, the viral genome comprises a filler sequence after the polyadenylation signal sequence region. In one embodiment, the viral genome comprises a filler sequence after the MCS region. In one embodiment, the viral genome comprises a filler sequence after the exon region.

[0244] In one embodiment, the viral genome comprises a filler sequence before the promoter region. In one embodiment, the viral genome comprises a filler sequence before the payload region. In one embodiment, the viral genome comprises a filler sequence before the intron region. In one embodiment, the viral genome comprises a filler sequence before the enhancer region. In one embodiment, the viral genome comprises a filler sequence before the polyadenylation signal sequence region. In one embodiment, the viral genome comprises a filler sequence before the MCS region. In one embodiment, the viral genome comprises a filler sequence before the exon region.

[0245] In one embodiment, the viral genome comprises a filler sequence before the 3′ ITR.

[0246] In one embodiment, a filler sequence may be located between two regions, such as, but not limited to, the 5′ ITR and the promoter region. In one embodiment, a filler sequence may be located between two regions, such as, but not limited to, the 5′ ITR and the payload region. In one embodiment, a filler sequence may be located between two regions, such as, but not limited to, the 5′ ITR and the intron region. In one embodiment, a filler sequence may be located between two regions, such as, but not limited to, the 5′ ITR and the enhancer region. In one embodiment, a filler sequence may be located between two regions, such as, but not limited to, the 5′ ITR and the polyadenylation signal sequence region. In one embodiment, a filler sequence may be located between two regions, such as, but not limited to, the 5′ ITR and the MCS region.

[0247] In one embodiment, a filler sequence may be located between two regions, such as, but not limited to, the 5′ ITR and the exon region.

[0248] In one embodiment, a filler sequence may be located between two regions, such as, but not limited to, the promoter region and the payload region. In one embodiment, a filler sequence may be located between two regions, such as, but not limited to, the promoter region and the intron region.

[0249] In one embodiment, a filler sequence may be located between two regions, such as, but not limited to, the promoter region and the enhancer region. In one embodiment, a filler sequence may be located between two regions, such as, but not limited to, the promoter region and the polyadenylation signal sequence region. In one embodiment, a filler sequence may be located between two regions, such as, but not limited to, the promoter region and the MCS region. In one embodiment, a filler sequence may be located between two regions, such as, but not limited to, the promoter region and the exon region. In one embodiment, a filler sequence may be located between two regions, such as, but not limited to, the promoter region and the 3′ ITR.

[0250] In one embodiment, a filler sequence may be located between two regions, such as, but not limited to, the payload region and the intron region. In one embodiment, a filler sequence may be located between two regions, such as, but not limited to, the payload region and the enhancer region. In one embodiment, a filler sequence may be located between two regions, such as, but not limited to, the payload region and the polyadenylation signal sequence region. In one embodiment, a filler sequence may be located between two regions, such as, but not limited to, the payload region and the MCS region. In one embodiment, a filler sequence may be located between two regions, such as, but not limited to, the payload region and the exon region.

[0251] In one embodiment, a filler sequence may be located between two regions, such as, but not limited to, the payload region and the 3′ ITR.

[0252] In one embodiment, a filler sequence may be located between two regions, such as, but not limited to, the intron region and the enhancer region. In one embodiment, a filler sequence may be located between two regions, such as, but not limited to, the intron region and the polyadenylation signal sequence region. In one embodiment, a filler sequence may be located between two regions, such as, but not limited to, the intron region and the MCS region. In one embodiment, a filler sequence may be located between two regions, such as, but not limited to, the intron region and the exon region. In one embodiment, a filler sequence may be located between two regions, such as, but not limited to, the intron region and the 3′ ITR. In one embodiment, a filler sequence may be located between two regions, such as, but not limited to, the enhancer region and the polyadenylation signal sequence region. In one embodiment, a filler sequence may be located between two regions, such as, but not limited to, the enhancer region and the MCS region. In one embodiment, a filler sequence may be located between two regions, such as, but not limited to, the enhancer region and the exon region. In one embodiment, a filler sequence may be located between two regions, such as, but not limited to, the enhancer region and the 3′ ITR.

[0253] In one embodiment, a filler sequence may be located between two regions, such as, but not limited to, the polyadenylation signal sequence region and the MCS region. In one embodiment, a filler sequence may be located between two regions, such as, but not limited to, the polyadenylation signal sequence region and the exon region. In one embodiment, a filler sequence may be located between two regions, such as, but not limited to, the polyadenylation signal sequence region and the 3′ ITR.

[0254] In one embodiment, a filler sequence may be located between two regions, such as, but not limited to, the MCS region and the exon region. In one embodiment, a filler sequence may be located between two regions, such as, but not limited to, the MCS region and the 3′ ITR.

[0255] In one embodiment, a filler sequence may be located between two regions, such as, but not limited to, the exon region and the 3′ ITR.

[0256] In one embodiment, a viral genome may comprise two filler sequences, the first filler sequence may be located between the 5′ ITR and promoter region, and the second filler sequence may be located between the promoter region and payload region. In one embodiment, a viral genome may comprise two filler sequences, the first filler sequence may be located between the 5′ ITR and promoter region, and the second filler sequence may be located between the promoter region and intron region. In one embodiment, a viral genome may comprise two filler sequences, the first filler sequence may be located between the 5′ ITR and promoter region, and the second filler sequence may be located between the promoter region and enhancer region. In one embodiment, a viral genome may comprise two filler sequences, the first filler sequence may be located between the 5′ ITR and promoter region, and the second filler sequence may be located between the promoter region and polyadenylation signal sequence region. In one embodiment, a viral genome may comprise two filler sequences, the first filler sequence may be located between the 5′ ITR and promoter region, and the second filler sequence may be located between the promoter region and MCS region. In one embodiment, a viral genome may comprise two filler sequences, the first filler sequence may be located between the 5′ ITR and promoter region, and the second filler sequence may be located between the promoter region and exon region. In one embodiment, a viral genome may comprise two filler sequences, the first filler sequence may be located between the 5′ ITR and promoter region, and the second filler sequence may be located between the promoter region and 3′ ITR. In one embodiment, a viral genome may comprise two filler sequences, the first filler sequence may be located between the 5′ ITR and promoter region, and the second filler sequence may be located between the payload region and intron region. In one embodiment, a viral genome may comprise two filler sequences, the first filler sequence may be located between the 5′ ITR and promoter region, and the second filler sequence may be located between the payload region and enhancer region. In one embodiment, a viral genome may comprise two filler sequences, the first filler sequence may be located between the 5′ ITR and promoter region, and the second filler sequence may be located between the payload region and polyadenylation signal sequence region.

[0257] In one embodiment, a viral genome may comprise two filler sequences, the first filler sequence may be located between the 5′ ITR and promoter region, and the second filler sequence may be located between the payload region and MCS region. In one embodiment, a viral genome may comprise two filler sequences, the first filler sequence may be located between the 5′ ITR and promoter region, and the second filler sequence may be located between the payload region and exon region.

[0258] In one embodiment, a viral genome may comprise two filler sequences, the first filler sequence may be located between the 5′ ITR and promoter region, and the second filler sequence may be located between the payload region and 3′ ITR. In one embodiment, a viral genome may comprise two filler sequences, the first filler sequence may be located between the 5′ ITR and promoter region, and the second filler sequence may be located between the intron region and enhancer region. In one embodiment, a viral genome may comprise two filler sequences, the first filler sequence may be located between the 5′ ITR and promoter region, and the second filler sequence may be located between the intron region and polyadenylation signal sequence region. In one embodiment, a viral genome may comprise two filler sequences, the first filler sequence may be located between the 5′ ITR and promoter region, and the second filler sequence may be located between the intron region and MCS region. In one embodiment, a viral genome may comprise two filler sequences, the first filler sequence may be located between the 5′ ITR and promoter region, and the second filler sequence may be located between the intron region and exon region. In one embodiment, a viral genome may comprise two filler sequences, the first filler sequence may be located between the 5′ ITR and promoter region, and the second filler sequence may be located between the intron region and 3′ ITR. In one embodiment, a viral genome may comprise two filler sequences, the first filler sequence may be located between the 5′ ITR and promoter region, and the second filler sequence may be located between the enhancer region and polyadenylation signal sequence region. In one embodiment, a viral genome may comprise two filler sequences, the first filler sequence may be located between the 5′ ITR and promoter region, and the second filler sequence may be located between the enhancer region and MCS region. In one embodiment, a viral genome may comprise two filler sequences, the first filler sequence may be located between the 5′ ITR and promoter region, and the second filler sequence may be located between the enhancer region and exon region.

[0259] In one embodiment, a viral genome may comprise two filler sequences, the first filler sequence may be located between the 5′ ITR and promoter region, and the second filler sequence may be located between the enhancer region and 3′ ITR. In one embodiment, a viral genome may comprise two filler sequences, the first filler sequence may be located between the 5′ ITR and promoter region, and the second filler sequence may be located between the polyadenylation signal sequence region and MCS region. In one embodiment, a viral genome may comprise two filler sequences, the first filler sequence may be located between the 5′ ITR and promoter region, and the second filler sequence may be located between the polyadenylation signal sequence region and exon region. In one embodiment, a viral genome may comprise two filler sequences, the first filler sequence may be located between the 5′ ITR and promoter region, and the second filler sequence may be located between the polyadenylation signal sequence region and 3′ ITR. In one embodiment, a viral genome may comprise two filler sequences, the first filler sequence may be located between the 5′ ITR and promoter region, and the second filler sequence may be located between the MCS region and exon region. In one embodiment, a viral genome may comprise two filler sequences, the first filler sequence may be located between the 5′ ITR and promoter region, and the second filler sequence may be located between the MCS region and 3′ ITR. In one embodiment, a viral genome may comprise two filler sequences, the first filler sequence may be located between the 5′ ITR and promoter region, and the second filler sequence may be located between the exon region and 3′ ITR.

[0260] In one embodiment, a viral genome may comprise two filler sequences, the first filler sequence may be located between the 5′ ITR and payload region, and the second filler sequence may be located between the promoter region and payload region. In one embodiment, a viral genome may comprise two filler sequences, the first filler sequence may be located between the 5′ ITR and payload region, and the second filler sequence may be located between the promoter region and intron region. In one embodiment, a viral genome may comprise two filler sequences, the first filler sequence may be located between the 5′ ITR and payload region, and the second filler sequence may be located between the promoter region and enhancer region. In one embodiment, a viral genome may comprise two filler sequences, the first filler sequence may be located between the 5′ ITR and payload region, and the second filler sequence may be located between the promoter region and polyadenylation signal sequence region. In one embodiment, a viral genome may comprise two filler sequences, the first filler sequence may be located between the 5′ ITR and payload region, and the second filler sequence may be located between the promoter region and MCS region. In one embodiment, a viral genome may comprise two filler sequences, the first filler sequence may be located between the 5′ ITR and payload region, and the second filler sequence may be located between the promoter region and exon region. In one embodiment, a viral genome may comprise two filler sequences, the first filler sequence may be located between the 5′ ITR and payload region, and the second filler sequence may be located between the promoter region and 3′ ITR. In one embodiment, a viral genome may comprise two filler sequences, the first filler sequence may be located between the 5′ ITR and payload region, and the second filler sequence may be located between the payload region and intron region. In one embodiment, a viral genome may comprise two filler sequences, the first filler sequence may be located between the 5′ ITR and payload region, and the second filler sequence may be located between the payload region and enhancer region. In one embodiment, a viral genome may comprise two filler sequences, the first filler sequence may be located between the 5′ ITR and payload region, and the second filler sequence may be located between the payload region and polyadenylation signal sequence region.

[0261] In one embodiment, a viral genome may comprise two filler sequences, the first filler sequence may be located between the 5′ ITR and payload region, and the second filler sequence may be located between the payload region and MCS region. In one embodiment, a viral genome may comprise two filler sequences, the first filler sequence may be located between the 5′ ITR and payload region, and the second filler sequence may be located between the payload region and exon region.

[0262] In one embodiment, a viral genome may comprise two filler sequences, the first filler sequence may be located between the 5′ ITR and payload region, and the second filler sequence may be located between the payload region and 3′ ITR. In one embodiment, a viral genome may comprise two filler sequences, the first filler sequence may be located between the 5′ ITR and payload region, and the second filler sequence may be located between the intron region and enhancer region. In one embodiment, a viral genome may comprise two filler sequences, the first filler sequence may be located between the 5′ ITR and payload region, and the second filler sequence may be located between the intron region and polyadenylation signal sequence region. In one embodiment, a viral genome may comprise two filler sequences, the first filler sequence may be located between the 5′ ITR and payload region, and the second filler sequence may be located between the intron region and MCS region. In one embodiment, a viral genome may comprise two filler sequences, the first filler sequence may be located between the 5′ ITR and payload region, and the second filler sequence may be located between the intron region and exon region. In one embodiment, a viral genome may comprise two filler sequences, the first filler sequence may be located between the 5′ ITR and payload region, and the second filler sequence may be located between the intron region and 3′ ITR. In one embodiment, a viral genome may comprise two filler sequences, the first filler sequence may be located between the 5′ ITR and payload region, and the second filler sequence may be located between the enhancer region and polyadenylation signal sequence region. In one embodiment, a viral genome may comprise two filler sequences, the first filler sequence may be located between the 5′ ITR and payload region, and the second filler sequence may be located between the enhancer region and MCS region. In one embodiment, a viral genome may comprise two filler sequences, the first filler sequence may be located between the 5′ ITR and payload region, and the second filler sequence may be located between the enhancer region and exon region.

[0263] In one embodiment, a viral genome may comprise two filler sequences, the first filler sequence may be located between the 5′ ITR and payload region, and the second filler sequence may be located between the enhancer region and 3′ ITR. In one embodiment, a viral genome may comprise two filler sequences, the first filler sequence may be located between the 5′ ITR and payload region, and the second filler sequence may be located between the polyadenylation signal sequence region and MCS region. In one embodiment, a viral genome may comprise two filler sequences, the first filler sequence may be located between the 5′ ITR and payload region, and the second filler sequence may be located between the polyadenylation signal sequence region and exon region. In one embodiment, a viral genome may comprise two filler sequences, the first filler sequence may be located between the 5′ ITR and payload region, and the second filler sequence may be located between the polyadenylation signal sequence region and 3′ ITR. In one embodiment, a viral genome may comprise two filler sequences, the first filler sequence may be located between the 5′ ITR and payload region, and the second filler sequence may be located between the MCS region and exon region. In one embodiment, a viral genome may comprise two filler sequences, the first filler sequence may be located between the 5′ ITR and payload region, and the second filler sequence may be located between the MCS region and 3′ ITR. In one embodiment, a viral genome may comprise two filler sequences, the first filler sequence may be located between the 5′ ITR and payload region, and the second filler sequence may be located between the exon region and 3′ ITR.

[0264] In one embodiment, a viral genome may comprise two filler sequences, the first filler sequence may be located between the 5′ ITR and intron region, and the second filler sequence may be located between the promoter region and payload region. In one embodiment, a viral genome may comprise two filler sequences, the first filler sequence may be located between the 5′ ITR and intron region, and the second filler sequence may be located between the promoter region and intron region. In one embodiment, a viral genome may comprise two filler sequences, the first filler sequence may be located between the 5′ ITR and intron region, and the second filler sequence may be located between the promoter region and enhancer region. In one embodiment, a viral genome may comprise two filler sequences, the first filler sequence may be located between the 5′ ITR and intron region, and the second filler sequence may be located between the promoter region and polyadenylation signal sequence region. In one embodiment, a viral genome may comprise two filler sequences, the first filler sequence may be located between the 5′ ITR and intron region, and the second filler sequence may be located between the promoter region and MCS region. In one embodiment, a viral genome may comprise two filler sequences, the first filler sequence may be located between the 5′ ITR and intron region, and the second filler sequence may be located between the promoter region and exon region. In one embodiment, a viral genome may comprise two filler sequences, the first filler sequence may be located between the 5′ ITR and intron region, and the second filler sequence may be located between the promoter region and 3′ ITR. In one embodiment, a viral genome may comprise two filler sequences, the first filler sequence may be located between the 5′ ITR and intron region, and the second filler sequence may be located between the payload region and intron region. In one embodiment, a viral genome may comprise two filler sequences, the first filler sequence may be located between the 5′ ITR and intron region, and the second filler sequence may be located between the payload region and enhancer region. In one embodiment, a viral genome may comprise two filler sequences, the first filler sequence may be located between the 5′ ITR and intron region, and the second filler sequence may be located between the payload region and polyadenylation signal sequence region. In one embodiment, a viral genome may comprise two filler sequences, the first filler sequence may be located between the 5′ ITR and intron region, and the second filler sequence may be located between the payload region and MCS region. In one embodiment, a viral genome may comprise two filler sequences, the first filler sequence may be located between the 5′ ITR and intron region, and the second filler sequence may be located between the payload region and exon region. In one embodiment, a viral genome may comprise two filler sequences, the first filler sequence may be located between the 5′ ITR and intron region, and the second filler sequence may be located between the payload region and 3′ ITR. In one embodiment, a viral genome may comprise two filler sequences, the first filler sequence may be located between the 5′ ITR and intron region, and the second filler sequence may be located between the intron region and enhancer region. In one embodiment, a viral genome may comprise two filler sequences, the first filler sequence may be located between the 5′ ITR and intron region, and the second filler sequence may be located between the intron region and polyadenylation signal sequence region. In one embodiment, a viral genome may comprise two filler sequences, the first filler sequence may be located between the 5′ ITR and intron region, and the second filler sequence may be located between the intron region and MCS region. In one embodiment, a viral genome may comprise two filler sequences, the first filler sequence may be located between the 5′ ITR and intron region, and the second filler sequence may be located between the intron region and exon region. In one embodiment, a viral genome may comprise two filler sequences, the first filler sequence may be located between the 5′ ITR and intron region, and the second filler sequence may be located between the intron region and 3′ ITR. In one embodiment, a viral genome may comprise two filler sequences, the first filler sequence may be located between the 5′ ITR and intron region, and the second filler sequence may be located between the enhancer region and polyadenylation signal sequence region. In one embodiment, a viral genome may comprise two filler sequences, the first filler sequence may be located between the 5′ ITR and intron region, and the second filler sequence may be located between the enhancer region and MCS region. In one embodiment, a viral genome may comprise two filler sequences, the first filler sequence may be located between the 5′ ITR and intron region, and the second filler sequence may be located between the enhancer region and exon region. In one embodiment, a viral genome may comprise two filler sequences, the first filler sequence may be located between the 5′ ITR and intron region, and the second filler sequence may be located between the enhancer region and 3′ ITR. In one embodiment, a viral genome may comprise two filler sequences, the first filler sequence may be located between the 5′ ITR and intron region, and the second filler sequence may be located between the polyadenylation signal sequence region and MCS region. In one embodiment, a viral genome may comprise two filler sequences, the first filler sequence may be located between the 5′ ITR and intron region, and the second filler sequence may be located between the polyadenylation signal sequence region and exon region. In one embodiment, a viral genome may comprise two filler sequences, the first filler sequence may be located between the 5′ ITR and intron region, and the second filler sequence may be located between the polyadenylation signal sequence region and 3′ ITR. In one embodiment, a viral genome may comprise two filler sequences, the first filler sequence may be located between the 5′ ITR and intron region, and the second filler sequence may be located between the MCS region and exon region. In one embodiment, a viral genome may comprise two filler sequences, the first filler sequence may be located between the 5′ ITR and intron region, and the second filler sequence may be located between the MCS region and 3′ ITR. In one embodiment, a viral genome may comprise two filler sequences, the first filler sequence may be located between the 5′ ITR and intron region, and the second filler sequence may be located between the exon region and 3′ ITR.

[0265] In one embodiment, a viral genome may comprise two filler sequences, the first filler sequence may be located between the 5′ ITR and enhancer region, and the second filler sequence may be located between the promoter region and payload region. In one embodiment, a viral genome may comprise two filler sequences, the first filler sequence may be located between the 5′ ITR and enhancer region, and the second filler sequence may be located between the promoter region and intron region. In one embodiment, a viral genome may comprise two filler sequences, the first filler sequence may be located between the 5′ ITR and enhancer region, and the second filler sequence may be located between the promoter region and enhancer region. In one embodiment, a viral genome may comprise two filler sequences, the first filler sequence may be located between the 5′ ITR and enhancer region, and the second filler sequence may be located between the promoter region and polyadenylation signal sequence region. In one embodiment, a viral genome may comprise two filler sequences, the first filler sequence may be located between the 5′ ITR and enhancer region, and the second filler sequence may be located between the promoter region and MCS region. In one embodiment, a viral genome may comprise two filler sequences, the first filler sequence may be located between the 5′ ITR and enhancer region, and the second filler sequence may be located between the promoter region and exon region. In one embodiment, a viral genome may comprise two filler sequences, the first filler sequence may be located between the 5′ ITR and enhancer region, and the second filler sequence may be located between the promoter region and 3′ ITR. In one embodiment, a viral genome may comprise two filler sequences, the first filler sequence may be located between the 5′ ITR and enhancer region, and the second filler sequence may be located between the payload region and intron region. In one embodiment, a viral genome may comprise two filler sequences, the first filler sequence may be located between the 5′ ITR and enhancer region, and the second filler sequence may be located between the payload region and enhancer region. In one embodiment, a viral genome may comprise two filler sequences, the first filler sequence may be located between the 5′ ITR and enhancer region, and the second filler sequence may be located between the payload region and polyadenylation signal sequence region.

[0266] In one embodiment, a viral genome may comprise two filler sequences, the first filler sequence may be located between the 5′ ITR and enhancer region, and the second filler sequence may be located between the payload region and MCS region. In one embodiment, a viral genome may comprise two filler sequences, the first filler sequence may be located between the 5′ ITR and enhancer region, and the second filler sequence may be located between the payload region and exon region.

[0267] In one embodiment, a viral genome may comprise two filler sequences, the first filler sequence may be located between the 5′ ITR and enhancer region, and the second filler sequence may be located between the payload region and 3′ ITR. In one embodiment, a viral genome may comprise two filler sequences, the first filler sequence may be located between the 5′ ITR and enhancer region, and the second filler sequence may be located between the intron region and enhancer region. In one embodiment, a viral genome may comprise two filler sequences, the first filler sequence may be located between the 5′ ITR and enhancer region, and the second filler sequence may be located between the intron region and polyadenylation signal sequence region. In one embodiment, a viral genome may comprise two filler sequences, the first filler sequence may be located between the 5′ ITR and enhancer region, and the second filler sequence may be located between the intron region and MCS region. In one embodiment, a viral genome may comprise two filler sequences, the first filler sequence may be located between the 5′ ITR and enhancer region, and the second filler sequence may be located between the intron region and exon region. In one embodiment, a viral genome may comprise two filler sequences, the first filler sequence may be located between the 5′ ITR and enhancer region, and the second filler sequence may be located between the intron region and 3′ ITR. In one embodiment, a viral genome may comprise two filler sequences, the first filler sequence may be located between the 5′ ITR and enhancer region, and the second filler sequence may be located between the enhancer region and polyadenylation signal sequence region. In one embodiment, a viral genome may comprise two filler sequences, the first filler sequence may be located between the 5′ ITR and enhancer region, and the second filler sequence may be located between the enhancer region and MCS region. In one embodiment, a viral genome may comprise two filler sequences, the first filler sequence may be located between the 5′ ITR and enhancer region, and the second filler sequence may be located between the enhancer region and exon region.

[0268] In one embodiment, a viral genome may comprise two filler sequences, the first filler sequence may be located between the 5′ ITR and enhancer region, and the second filler sequence may be located between the enhancer region and 3′ ITR. In one embodiment, a viral genome may comprise two filler sequences, the first filler sequence may be located between the 5′ ITR and enhancer region, and the second filler sequence may be located between the polyadenylation signal sequence region and MCS region. In one embodiment, a viral genome may comprise two filler sequences, the first filler sequence may be located between the 5′ ITR and enhancer region, and the second filler sequence may be located between the polyadenylation signal sequence region and exon region. In one embodiment, a viral genome may comprise two filler sequences, the first filler sequence may be located between the 5′ ITR and enhancer region, and the second filler sequence may be located between the polyadenylation signal sequence region and 3′ ITR. In one embodiment, a viral genome may comprise two filler sequences, the first filler sequence may be located between the 5′ ITR and enhancer region, and the second filler sequence may be located between the MCS region and exon region. In one embodiment, a viral genome may comprise two filler sequences, the first filler sequence may be located between the 5′ ITR and enhancer region, and the second filler sequence may be located between the MCS region and 3′ ITR. In one embodiment, a viral genome may comprise two filler sequences, the first filler sequence may be located between the 5′ ITR and enhancer region, and the second filler sequence may be located between the exon region and 3′ ITR.

[0269] In one embodiment, a viral genome may comprise two filler sequences, the first filler sequence may be located between the 5′ ITR and polyadenylation signal sequence region, and the second filler sequence may be located between the promoter region and payload region. In one embodiment, a viral genome may comprise two filler sequences, the first filler sequence may be located between the 5′ ITR and polyadenylation signal sequence region, and the second filler sequence may be located between the promoter region and intron region. In one embodiment, a viral genome may comprise two filler sequences, the first filler sequence may be located between the 5′ ITR and polyadenylation signal sequence region, and the second filler sequence may be located between the promoter region and enhancer region. In one embodiment, a viral genome may comprise two filler sequences, the first filler sequence may be located between the 5′ ITR and polyadenylation signal sequence region, and the second filler sequence may be located between the promoter region and polyadenylation signal sequence region. In one embodiment, a viral genome may comprise two filler sequences, the first filler sequence may be located between the 5′ ITR and polyadenylation signal sequence region, and the second filler sequence may be located between the promoter region and MCS region. In one embodiment, a viral genome may comprise two filler sequences, the first filler sequence may be located between the 5′ ITR and polyadenylation signal sequence region, and the second filler sequence may be located between the promoter region and exon region. In one embodiment, a viral genome may comprise two filler sequences, the first filler sequence may be located between the 5′ ITR and polyadenylation signal sequence region, and the second filler sequence may be located between the promoter region and 3′ ITR. In one embodiment, a viral genome may comprise two filler sequences, the first filler sequence may be located between the 5′ ITR and polyadenylation signal sequence region, and the second filler sequence may be located between the payload region and intron region. In one embodiment, a viral genome may comprise two filler sequences, the first filler sequence may be located between the 5′ ITR and polyadenylation signal sequence region, and the second filler sequence may be located between the payload region and enhancer region. In one embodiment, a viral genome may comprise two filler sequences, the first filler sequence may be located between the 5′ ITR and polyadenylation signal sequence region, and the second filler sequence may be located between the payload region and polyadenylation signal sequence region. In one embodiment, a viral genome may comprise two filler sequences, the first filler sequence may be located between the 5′ ITR and polyadenylation signal sequence region, and the second filler sequence may be located between the payload region and MCS region. In one embodiment, a viral genome may comprise two filler sequences, the first filler sequence may be located between the 5′ ITR and polyadenylation signal sequence region, and the second filler sequence may be located between the payload region and exon region. In one embodiment, a viral genome may comprise two filler sequences, the first filler sequence may be located between the 5′ ITR and polyadenylation signal sequence region, and the second filler sequence may be located between the payload region and 3′ ITR. In one embodiment, a viral genome may comprise two filler sequences, the first filler sequence may be located between the 5′ ITR and polyadenylation signal sequence region, and the second filler sequence may be located between the intron region and enhancer region. In one embodiment, a viral genome may comprise two filler sequences, the first filler sequence may be located between the 5′ ITR and polyadenylation signal sequence region, and the second filler sequence may be located between the intron region and polyadenylation signal sequence region. In one embodiment, a viral genome may comprise two filler sequences, the first filler sequence may be located between the 5′ ITR and polyadenylation signal sequence region, and the second filler sequence may be located between the intron region and MCS region. In one embodiment, a viral genome may comprise two filler sequences, the first filler sequence may be located between the 5′ ITR and polyadenylation signal sequence region, and the second filler sequence may be located between the intron region and exon region. In one embodiment, a viral genome may comprise two filler sequences, the first filler sequence may be located between the 5′ ITR and polyadenylation signal sequence region, and the second filler sequence may be located between the intron region and 3′ ITR. In one embodiment, a viral genome may comprise two filler sequences, the first filler sequence may be located between the 5′ ITR and polyadenylation signal sequence region, and the second filler sequence may be located between the enhancer region and polyadenylation signal sequence region. In one embodiment, a viral genome may comprise two filler sequences, the first filler sequence may be located between the 5′ ITR and polyadenylation signal sequence region, and the second filler sequence may be located between the enhancer region and MCS region. In one embodiment, a viral genome may comprise two filler sequences, the first filler sequence may be located between the 5′ ITR and polyadenylation signal sequence region, and the second filler sequence may be located between the enhancer region and exon region. In one embodiment, a viral genome may comprise two filler sequences, the first filler sequence may be located between the 5′ ITR and polyadenylation signal sequence region, and the second filler sequence may be located between the enhancer region and 3′ ITR. In one embodiment, a viral genome may comprise two filler sequences, the first filler sequence may be located between the 5′ ITR and polyadenylation signal sequence region, and the second filler sequence may be located between the polyadenylation signal sequence region and MCS region. In one embodiment, a viral genome may comprise two filler sequences, the first filler sequence may be located between the 5′ ITR and polyadenylation signal sequence region, and the second filler sequence may be located between the polyadenylation signal sequence region and exon region. In one embodiment, a viral genome may comprise two filler sequences, the first filler sequence may be located between the 5′ ITR and polyadenylation signal sequence region, and the second filler sequence may be located between the polyadenylation signal sequence region and 3′ ITR. In one embodiment, a viral genome may comprise two filler sequences, the first filler sequence may be located between the 5′ ITR and polyadenylation signal sequence region, and the second filler sequence may be located between the MCS region and exon region. In one embodiment, a viral genome may comprise two filler sequences, the first filler sequence may be located between the 5′ ITR and polyadenylation signal sequence region, and the second filler sequence may be located between the MCS region and 3′ ITR. In one embodiment, a viral genome may comprise two filler sequences, the first filler sequence may be located between the 5′ ITR and polyadenylation signal sequence region, and the second filler sequence may be located between the exon region and 3′ ITR.

[0270] In one embodiment, a viral genome may comprise two filler sequences, the first filler sequence may be located between the 5′ ITR and MCS region, and the second filler sequence may be located between the promoter region and payload region. In one embodiment, a viral genome may comprise two filler sequences, the first filler sequence may be located between the 5′ ITR and MCS region, and the second filler sequence may be located between the promoter region and intron region. In one embodiment, a viral genome may comprise two filler sequences, the first filler sequence may be located between the 5′ ITR and MCS region, and the second filler sequence may be located between the promoter region and enhancer region. In one embodiment, a viral genome may comprise two filler sequences, the first filler sequence may be located between the 5′ ITR and MCS region, and the second filler sequence may be located between the promoter region and polyadenylation signal sequence region. In one embodiment, a viral genome may comprise two filler sequences, the first filler sequence may be located between the 5′ ITR and MCS region, and the second filler sequence may be located between the promoter region and MCS region. In one embodiment, a viral genome may comprise two filler sequences, the first filler sequence may be located between the 5′ ITR and MCS region, and the second filler sequence may be located between the promoter region and exon region. In one embodiment, a viral genome may comprise two filler sequences, the first filler sequence may be located between the 5′ ITR and MCS region, and the second filler sequence may be located between the promoter region and 3′ ITR. In one embodiment, a viral genome may comprise two filler sequences, the first filler sequence may be located between the 5′ ITR and MCS region, and the second filler sequence may be located between the payload region and intron region. In one embodiment, a viral genome may comprise two filler sequences, the first filler sequence may be located between the 5′ ITR and MCS region, and the second filler sequence may be located between the payload region and enhancer region. In one embodiment, a viral genome may comprise two filler sequences, the first filler sequence may be located between the 5′ ITR and MCS region, and the second filler sequence may be located between the payload region and polyadenylation signal sequence region. In one embodiment, a viral genome may comprise two filler sequences, the first filler sequence may be located between the 5′ ITR and MCS region, and the second filler sequence may be located between the payload region and MCS region. In one embodiment, a viral genome may comprise two filler sequences, the first filler sequence may be located between the 5′ ITR and MCS region, and the second filler sequence may be located between the payload region and exon region. In one embodiment, a viral genome may comprise two filler sequences, the first filler sequence may be located between the 5′ ITR and MCS region, and the second filler sequence may be located between the payload region and 3′ ITR. In one embodiment, a viral genome may comprise two filler sequences, the first filler sequence may be located between the 5′ ITR and MCS region, and the second filler sequence may be located between the intron region and enhancer region. In one embodiment, a viral genome may comprise two filler sequences, the first filler sequence may be located between the 5′ ITR and MCS region, and the second filler sequence may be located between the intron region and polyadenylation signal sequence region. In one embodiment, a viral genome may comprise two filler sequences, the first filler sequence may be located between the 5′ ITR and MCS region, and the second filler sequence may be located between the intron region and MCS region. In one embodiment, a viral genome may comprise two filler sequences, the first filler sequence may be located between the 5′ ITR and MCS region, and the second filler sequence may be located between the intron region and exon region. In one embodiment, a viral genome may comprise two filler sequences, the first filler sequence may be located between the 5′ ITR and MCS region, and the second filler sequence may be located between the intron region and 3′ ITR. In one embodiment, a viral genome may comprise two filler sequences, the first filler sequence may be located between the 5′ ITR and MCS region, and the second filler sequence may be located between the enhancer region and polyadenylation signal sequence region. In one embodiment, a viral genome may comprise two filler sequences, the first filler sequence may be located between the 5′ ITR and MCS region, and the second filler sequence may be located between the enhancer region and MCS region. In one embodiment, a viral genome may comprise two filler sequences, the first filler sequence may be located between the 5′ ITR and MCS region, and the second filler sequence may be located between the enhancer region and exon region. In one embodiment, a viral genome may comprise two filler sequences, the first filler sequence may be located between the 5′ ITR and MCS region, and the second filler sequence may be located between the enhancer region and 3′ ITR. In one embodiment, a viral genome may comprise two filler sequences, the first filler sequence may be located between the 5′ ITR and MCS region, and the second filler sequence may be located between the polyadenylation signal sequence region and MCS region. In one embodiment, a viral genome may comprise two filler sequences, the first filler sequence may be located between the 5′ ITR and MCS region, and the second filler sequence may be located between the polyadenylation signal sequence region and exon region. In one embodiment, a viral genome may comprise two filler sequences, the first filler sequence may be located between the 5′ ITR and MCS region, and the second filler sequence may be located between the polyadenylation signal sequence region and 3′ ITR. In one embodiment, a viral genome may comprise two filler sequences, the first filler sequence may be located between the 5′ ITR and MCS region, and the second filler sequence may be located between the MCS region and exon region. In one embodiment, a viral genome may comprise two filler sequences, the first filler sequence may be located between the 5′ ITR and MCS region, and the second filler sequence may be located between the MCS region and 3′ ITR. In one embodiment, a viral genome may comprise two filler sequences, the first filler sequence may be located between the 5′ ITR and MCS region, and the second filler sequence may be located between the exon region and 3′ ITR.

[0271] In one embodiment, a viral genome may comprise two filler sequences, the first filler sequence may be located between the 5′ ITR and exon region, and the second filler sequence may be located between the promoter region and payload region. In one embodiment, a viral genome may comprise two filler sequences, the first filler sequence may be located between the 5′ ITR and exon region, and the second filler sequence may be located between the promoter region and intron region. In one embodiment, a viral genome may comprise two filler sequences, the first filler sequence may be located between the 5′ ITR and exon region, and the second filler sequence may be located between the promoter region and enhancer region. In one embodiment, a viral genome may comprise two filler sequences, the first filler sequence may be located between the 5′ ITR and exon region, and the second filler sequence may be located between the promoter region and polyadenylation signal sequence region. In one embodiment, a viral genome may comprise two filler sequences, the first filler sequence may be located between the 5′ ITR and exon region, and the second filler sequence may be located between the promoter region and MCS region. In one embodiment, a viral genome may comprise two filler sequences, the first filler sequence may be located between the 5′ ITR and exon region, and the second filler sequence may be located between the promoter region and exon region. In one embodiment, a viral genome may comprise two filler sequences, the first filler sequence may be located between the 5′ ITR and exon region, and the second filler sequence may be located between the promoter region and 3′ ITR. In one embodiment, a viral genome may comprise two filler sequences, the first filler sequence may be located between the 5′ ITR and exon region, and the second filler sequence may be located between the payload region and intron region. In one embodiment, a viral genome may comprise two filler sequences, the first filler sequence may be located between the 5′ ITR and exon region, and the second filler sequence may be located between the payload region and enhancer region. In one embodiment, a viral genome may comprise two filler sequences, the first filler sequence may be located between the 5′ ITR and exon region, and the second filler sequence may be located between the payload region and polyadenylation signal sequence region. In one embodiment, a viral genome may comprise two filler sequences, the first filler sequence may be located between the 5′ ITR and exon region, and the second filler sequence may be located between the payload region and MCS region. In one embodiment, a viral genome may comprise two filler sequences, the first filler sequence may be located between the 5′ ITR and exon region, and the second filler sequence may be located between the payload region and exon region. In one embodiment, a viral genome may comprise two filler sequences, the first filler sequence may be located between the 5′ ITR and exon region, and the second filler sequence may be located between the payload region and 3′ ITR.

[0272] In one embodiment, a viral genome may comprise two filler sequences, the first filler sequence may be located between the 5′ ITR and exon region, and the second filler sequence may be located between the intron region and enhancer region. In one embodiment, a viral genome may comprise two filler sequences, the first filler sequence may be located between the 5′ ITR and exon region, and the second filler sequence may be located between the intron region and polyadenylation signal sequence region. In one embodiment, a viral genome may comprise two filler sequences, the first filler sequence may be located between the 5′ ITR and exon region, and the second filler sequence may be located between the intron region and MCS region. In one embodiment, a viral genome may comprise two filler sequences, the first filler sequence may be located between the 5′ ITR and exon region, and the second filler sequence may be located between the intron region and exon region. In one embodiment, a viral genome may comprise two filler sequences, the first filler sequence may be located between the 5′ ITR and exon region, and the second filler sequence may be located between the intron region and 3′ ITR. In one embodiment, a viral genome may comprise two filler sequences, the first filler sequence may be located between the 5′ ITR and exon region, and the second filler sequence may be located between the enhancer region and polyadenylation signal sequence region. In one embodiment, a viral genome may comprise two filler sequences, the first filler sequence may be located between the 5′ ITR and exon region, and the second filler sequence may be located between the enhancer region and MCS region. In one embodiment, a viral genome may comprise two filler sequences, the first filler sequence may be located between the 5′ ITR and exon region, and the second filler sequence may be located between the enhancer region and exon region. In one embodiment, a viral genome may comprise two filler sequences, the first filler sequence may be located between the 5′ ITR and exon region, and the second filler sequence may be located between the enhancer region and 3′ ITR. In one embodiment, a viral genome may comprise two filler sequences, the first filler sequence may be located between the 5′ ITR and exon region, and the second filler sequence may be located between the polyadenylation signal sequence region and MCS region. In one embodiment, a viral genome may comprise two filler sequences, the first filler sequence may be located between the 5′ ITR and exon region, and the second filler sequence may be located between the polyadenylation signal sequence region and exon region. In one embodiment, a viral genome may comprise two filler sequences, the first filler sequence may be located between the 5′ ITR and exon region, and the second filler sequence may be located between the polyadenylation signal sequence region and 3′ ITR. In one embodiment, a viral genome may comprise two filler sequences, the first filler sequence may be located between the 5′ ITR and exon region, and the second filler sequence may be located between the MCS region and exon region. In one embodiment, a viral genome may comprise two filler sequences, the first filler sequence may be located between the 5′ ITR and exon region, and the second filler sequence may be located between the MCS region and 3′ ITR. In one embodiment, a viral genome may comprise two filler sequences, the first filler sequence may be located between the 5′ ITR and exon region, and the second filler sequence may be located between the exon region and 3′ ITR.

[0273] In one embodiment, a viral genome may comprise two filler sequences, the first filler sequence may be located between the promoter region and payload region, and the second filler sequence may be located between the payload region and intron region. In one embodiment, a viral genome may comprise two filler sequences, the first filler sequence may be located between the promoter region and payload region, and the second filler sequence may be located between the payload region and enhancer region. In one embodiment, a viral genome may comprise two filler sequences, the first filler sequence may be located between the promoter region and payload region, and the second filler sequence may be located between the payload region and polyadenylation signal sequence region. In one embodiment, a viral genome may comprise two filler sequences, the first filler sequence may be located between the promoter region and payload region, and the second filler sequence may be located between the payload region and MCS region. In one embodiment, a viral genome may comprise two filler sequences, the first filler sequence may be located between the promoter region and payload region, and the second filler sequence may be located between the payload region and exon region. In one embodiment, a viral genome may comprise two filler sequences, the first filler sequence may be located between the promoter region and payload region, and the second filler sequence may be located between the payload region and 3′ ITR. In one embodiment, a viral genome may comprise two filler sequences, the first filler sequence may be located between the promoter region and payload region, and the second filler sequence may be located between the intron region and enhancer region. In one embodiment, a viral genome may comprise two filler sequences, the first filler sequence may be located between the promoter region and payload region, and the second filler sequence may be located between the intron region and polyadenylation signal sequence region. In one embodiment, a viral genome may comprise two filler sequences, the first filler sequence may be located between the promoter region and payload region, and the second filler sequence may be located between the intron region and MCS region.

[0274] In one embodiment, a viral genome may comprise two filler sequences, the first filler sequence may be located between the promoter region and payload region, and the second filler sequence may be located between the intron region and exon region. In one embodiment, a viral genome may comprise two filler sequences, the first filler sequence may be located between the promoter region and payload region, and the second filler sequence may be located between the intron region and 3′ ITR. In one embodiment, a viral genome may comprise two filler sequences, the first filler sequence may be located between the promoter region and payload region, and the second filler sequence may be located between the enhancer region and polyadenylation signal sequence region.

[0275] In one embodiment, a viral genome may comprise two filler sequences, the first filler sequence may be located between the promoter region and payload region, and the second filler sequence may be located between the enhancer region and MCS region. In one embodiment, a viral genome may comprise two filler sequences, the first filler sequence may be located between the promoter region and payload region, and the second filler sequence may be located between the enhancer region and exon region. In one embodiment, a viral genome may comprise two filler sequences, the first filler sequence may be located between the promoter region and payload region, and the second filler sequence may be located between the enhancer region and 3′ ITR. In one embodiment, a viral genome may comprise two filler sequences, the first filler sequence may be located between the promoter region and payload region, and the second filler sequence may be located between the polyadenylation signal sequence region and MCS region. In one embodiment, a viral genome may comprise two filler sequences, the first filler sequence may be located between the promoter region and payload region, and the second filler sequence may be located between the polyadenylation signal sequence region and exon region. In one embodiment, a viral genome may comprise two filler sequences, the first filler sequence may be located between the promoter region and payload region, and the second filler sequence may be located between the polyadenylation signal sequence region and 3′ ITR. In one embodiment, a viral genome may comprise two filler sequences, the first filler sequence may be located between the promoter region and payload region, and the second filler sequence may be located between the MCS region and exon region. In one embodiment, a viral genome may comprise two filler sequences, the first filler sequence may be located between the promoter region and payload region, and the second filler sequence may be located between the MCS region and 3′ ITR. In one embodiment, a viral genome may comprise two filler sequences, the first filler sequence may be located between the promoter region and payload region, and the second filler sequence may be located between the exon region and 3′ ITR.

[0276] In one embodiment, a viral genome may comprise two filler sequences, the first filler sequence may be located between the promoter region and intron region, and the second filler sequence may be located between the payload region and intron region. In one embodiment, a viral genome may comprise two filler sequences, the first filler sequence may be located between the promoter region and intron region, and the second filler sequence may be located between the payload region and enhancer region. In one embodiment, a viral genome may comprise two filler sequences, the first filler sequence may be located between the promoter region and intron region, and the second filler sequence may be located between the payload region and polyadenylation signal sequence region.

[0277] In one embodiment, a viral genome may comprise two filler sequences, the first filler sequence may be located between the promoter region and intron region, and the second filler sequence may be located between the payload region and MCS region. In one embodiment, a viral genome may comprise two filler sequences, the first filler sequence may be located between the promoter region and intron region, and the second filler sequence may be located between the payload region and exon region. In one embodiment, a viral genome may comprise two filler sequences, the first filler sequence may be located between the promoter region and intron region, and the second filler sequence may be located between the payload region and 3′ ITR. In one embodiment, a viral genome may comprise two filler sequences, the first filler sequence may be located between the promoter region and intron region, and the second filler sequence may be located between the intron region and enhancer region. In one embodiment, a viral genome may comprise two filler sequences, the first filler sequence may be located between the promoter region and intron region, and the second filler sequence may be located between the intron region and polyadenylation signal sequence region. In one embodiment, a viral genome may comprise two filler sequences, the first filler sequence may be located between the promoter region and intron region, and the second filler sequence may be located between the intron region and MCS region. In one embodiment, a viral genome may comprise two filler sequences, the first filler sequence may be located between the promoter region and intron region, and the second filler sequence may be located between the intron region and exon region. In one embodiment, a viral genome may comprise two filler sequences, the first filler sequence may be located between the promoter region and intron region, and the second filler sequence may be located between the intron region and 3′ ITR. In one embodiment, a viral genome may comprise two filler sequences, the first filler sequence may be located between the promoter region and intron region, and the second filler sequence may be located between the enhancer region and polyadenylation signal sequence region. In one embodiment, a viral genome may comprise two filler sequences, the first filler sequence may be located between the promoter region and intron region, and the second filler sequence may be located between the enhancer region and MCS region. In one embodiment, a viral genome may comprise two filler sequences, the first filler sequence may be located between the promoter region and intron region, and the second filler sequence may be located between the enhancer region and exon region. In one embodiment, a viral genome may comprise two filler sequences, the first filler sequence may be located between the promoter region and intron region, and the second filler sequence may be located between the enhancer region and 3′ ITR. In one embodiment, a viral genome may comprise two filler sequences, the first filler sequence may be located between the promoter region and intron region, and the second filler sequence may be located between the polyadenylation signal sequence region and MCS region. In one embodiment, a viral genome may comprise two filler sequences, the first filler sequence may be located between the promoter region and intron region, and the second filler sequence may be located between the polyadenylation signal sequence region and exon region. In one embodiment, a viral genome may comprise two filler sequences, the first filler sequence may be located between the promoter region and intron region, and the second filler sequence may be located between the polyadenylation signal sequence region and 3′ ITR. In one embodiment, a viral genome may comprise two filler sequences, the first filler sequence may be located between the promoter region and intron region, and the second filler sequence may be located between the MCS region and exon region. In one embodiment, a viral genome may comprise two filler sequences, the first filler sequence may be located between the promoter region and intron region, and the second filler sequence may be located between the MCS region and 3′ ITR. In one embodiment, a viral genome may comprise two filler sequences, the first filler sequence may be located between the promoter region and intron region, and the second filler sequence may be located between the exon region and 3′ ITR.

[0278] In one embodiment, a viral genome may comprise two filler sequences, the first filler sequence may be located between the promoter region and enhancer region, and the second filler sequence may be located between the payload region and intron region. In one embodiment, a viral genome may comprise two filler sequences, the first filler sequence may be located between the promoter region and enhancer region, and the second filler sequence may be located between the payload region and enhancer region. In one embodiment, a viral genome may comprise two filler sequences, the first filler sequence may be located between the promoter region and enhancer region, and the second filler sequence may be located between the payload region and polyadenylation signal sequence region. In one embodiment, a viral genome may comprise two filler sequences, the first filler sequence may be located between the promoter region and enhancer region, and the second filler sequence may be located between the payload region and MCS region. In one embodiment, a viral genome may comprise two filler sequences, the first filler sequence may be located between the promoter region and enhancer region, and the second filler sequence may be located between the payload region and exon region. In one embodiment, a viral genome may comprise two filler sequences, the first filler sequence may be located between the promoter region and enhancer region, and the second filler sequence may be located between the payload region and 3′ ITR. In one embodiment, a viral genome may comprise two filler sequences, the first filler sequence may be located between the promoter region and enhancer region, and the second filler sequence may be located between the intron region and enhancer region. In one embodiment, a viral genome may comprise two filler sequences, the first filler sequence may be located between the promoter region and enhancer region, and the second filler sequence may be located between the intron region and polyadenylation signal sequence region. In one embodiment, a viral genome may comprise two filler sequences, the first filler sequence may be located between the promoter region and enhancer region, and the second filler sequence may be located between the intron region and MCS region.

[0279] In one embodiment, a viral genome may comprise two filler sequences, the first filler sequence may be located between the promoter region and enhancer region, and the second filler sequence may be located between the intron region and exon region. In one embodiment, a viral genome may comprise two filler sequences, the first filler sequence may be located between the promoter region and enhancer region, and the second filler sequence may be located between the intron region and 3′ ITR. In one embodiment, a viral genome may comprise two filler sequences, the first filler sequence may be located between the promoter region and enhancer region, and the second filler sequence may be located between the enhancer region and polyadenylation signal sequence region.

[0280] In one embodiment, a viral genome may comprise two filler sequences, the first filler sequence may be located between the promoter region and enhancer region, and the second filler sequence may be located between the enhancer region and MCS region. In one embodiment, a viral genome may comprise two filler sequences, the first filler sequence may be located between the promoter region and enhancer region, and the second filler sequence may be located between the enhancer region and exon region. In one embodiment, a viral genome may comprise two filler sequences, the first filler sequence may be located between the promoter region and enhancer region, and the second filler sequence may be located between the enhancer region and 3′ ITR. In one embodiment, a viral genome may comprise two filler sequences, the first filler sequence may be located between the promoter region and enhancer region, and the second filler sequence may be located between the polyadenylation signal sequence region and MCS region. In one embodiment, a viral genome may comprise two filler sequences, the first filler sequence may be located between the promoter region and enhancer region, and the second filler sequence may be located between the polyadenylation signal sequence region and exon region. In one embodiment, a viral genome may comprise two filler sequences, the first filler sequence may be located between the promoter region and enhancer region, and the second filler sequence may be located between the polyadenylation signal sequence region and 3′ ITR. In one embodiment, a viral genome may comprise two filler sequences, the first filler sequence may be located between the promoter region and enhancer region, and the second filler sequence may be located between the MCS region and exon region. In one embodiment, a viral genome may comprise two filler sequences, the first filler sequence may be located between the promoter region and enhancer region, and the second filler sequence may be located between the MCS region and 3′ ITR. In one embodiment, a viral genome may comprise two filler sequences, the first filler sequence may be located between the promoter region and enhancer region, and the second filler sequence may be located between the exon region and 3′ ITR.

[0281] In one embodiment, a viral genome may comprise two filler sequences, the first filler sequence may be located between the promoter region and polyadenylation signal sequence region, and the second filler sequence may be located between the payload region and intron region. In one embodiment, a viral genome may comprise two filler sequences, the first filler sequence may be located between the promoter region and polyadenylation signal sequence region, and the second filler sequence may be located between the payload region and enhancer region. In one embodiment, a viral genome may comprise two filler sequences, the first filler sequence may be located between the promoter region and polyadenylation signal sequence region, and the second filler sequence may be located between the payload region and polyadenylation signal sequence region. In one embodiment, a viral genome may comprise two filler sequences, the first filler sequence may be located between the promoter region and polyadenylation signal sequence region, and the second filler sequence may be located between the payload region and MCS region. In one embodiment, a viral genome may comprise two filler sequences, the first filler sequence may be located between the promoter region and polyadenylation signal sequence region, and the second filler sequence may be located between the payload region and exon region. In one embodiment, a viral genome may comprise two filler sequences, the first filler sequence may be located between the promoter region and polyadenylation signal sequence region, and the second filler sequence may be located between the payload region and 3′ ITR. In one embodiment, a viral genome may comprise two filler sequences, the first filler sequence may be located between the promoter region and polyadenylation signal sequence region, and the second filler sequence may be located between the intron region and enhancer region. In one embodiment, a viral genome may comprise two filler sequences, the first filler sequence may be located between the promoter region and polyadenylation signal sequence region, and the second filler sequence may be located between the intron region and polyadenylation signal sequence region. In one embodiment, a viral genome may comprise two filler sequences, the first filler sequence may be located between the promoter region and polyadenylation signal sequence region, and the second filler sequence may be located between the intron region and MCS region. In one embodiment, a viral genome may comprise two filler sequences, the first filler sequence may be located between the promoter region and polyadenylation signal sequence region, and the second filler sequence may be located between the intron region and exon region. In one embodiment, a viral genome may comprise two filler sequences, the first filler sequence may be located between the promoter region and polyadenylation signal sequence region, and the second filler sequence may be located between the intron region and 3′ ITR. In one embodiment, a viral genome may comprise two filler sequences, the first filler sequence may be located between the promoter region and polyadenylation signal sequence region, and the second filler sequence may be located between the enhancer region and polyadenylation signal sequence region. In one embodiment, a viral genome may comprise two filler sequences, the first filler sequence may be located between the promoter region and polyadenylation signal sequence region, and the second filler sequence may be located between the enhancer region and MCS region. In one embodiment, a viral genome may comprise two filler sequences, the first filler sequence may be located between the promoter region and polyadenylation signal sequence region, and the second filler sequence may be located between the enhancer region and exon region. In one embodiment, a viral genome may comprise two filler sequences, the first filler sequence may be located between the promoter region and polyadenylation signal sequence region, and the second filler sequence may be located between the enhancer region and 3′ ITR. In one embodiment, a viral genome may comprise two filler sequences, the first filler sequence may be located between the promoter region and polyadenylation signal sequence region, and the second filler sequence may be located between the polyadenylation signal sequence region and MCS region. In one embodiment, a viral genome may comprise two filler sequences, the first filler sequence may be located between the promoter region and polyadenylation signal sequence region, and the second filler sequence may be located between the polyadenylation signal sequence region and exon region. In one embodiment, a viral genome may comprise two filler sequences, the first filler sequence may be located between the promoter region and polyadenylation signal sequence region, and the second filler sequence may be located between the polyadenylation signal sequence region and 3′ ITR. In one embodiment, a viral genome may comprise two filler sequences, the first filler sequence may be located between the promoter region and polyadenylation signal sequence region, and the second filler sequence may be located between the MCS region and exon region. In one embodiment, a viral genome may comprise two filler sequences, the first filler sequence may be located between the promoter region and polyadenylation signal sequence region, and the second filler sequence may be located between the MCS region and 3′ ITR. In one embodiment, a viral genome may comprise two filler sequences, the first filler sequence may be located between the promoter region and polyadenylation signal sequence region, and the second filler sequence may be located between the exon region and 3′ ITR.

[0282] In one embodiment, a viral genome may comprise two filler sequences, the first filler sequence may be located between the promoter region and exon region, and the second filler sequence may be located between the payload region and intron region. In one embodiment, a viral genome may comprise two filler sequences, the first filler sequence may be located between the promoter region and exon region, and the second filler sequence may be located between the payload region and enhancer region. In one embodiment, a viral genome may comprise two filler sequences, the first filler sequence may be located between the promoter region and exon region, and the second filler sequence may be located between the payload region and polyadenylation signal sequence region.

[0283] In one embodiment, a viral genome may comprise two filler sequences, the first filler sequence may be located between the promoter region and exon region, and the second filler sequence may be located between the payload region and MCS region. In one embodiment, a viral genome may comprise two filler sequences, the first filler sequence may be located between the promoter region and exon region, and the second filler sequence may be located between the payload region and exon region. In one embodiment, a viral genome may comprise two filler sequences, the first filler sequence may be located between the promoter region and exon region, and the second filler sequence may be located between the payload region and 3′ ITR. In one embodiment, a viral genome may comprise two filler sequences, the first filler sequence may be located between the promoter region and exon region, and the second filler sequence may be located between the intron region and enhancer region. In one embodiment, a viral genome may comprise two filler sequences, the first filler sequence may be located between the promoter region and exon region, and the second filler sequence may be located between the intron region and polyadenylation signal sequence region. In one embodiment, a viral genome may comprise two filler sequences, the first filler sequence may be located between the promoter region and exon region, and the second filler sequence may be located between the intron region and MCS region. In one embodiment, a viral genome may comprise two filler sequences, the first filler sequence may be located between the promoter region and exon region, and the second filler sequence may be located between the intron region and exon region. In one embodiment, a viral genome may comprise two filler sequences, the first filler sequence may be located between the promoter region and exon region, and the second filler sequence may be located between the intron region and 3′ ITR. In one embodiment, a viral genome may comprise two filler sequences, the first filler sequence may be located between the promoter region and exon region, and the second filler sequence may be located between the enhancer region and polyadenylation signal sequence region. In one embodiment, a viral genome may comprise two filler sequences, the first filler sequence may be located between the promoter region and exon region, and the second filler sequence may be located between the enhancer region and MCS region. In one embodiment, a viral genome may comprise two filler sequences, the first filler sequence may be located between the promoter region and exon region, and the second filler sequence may be located between the enhancer region and exon region. In one embodiment, a viral genome may comprise two filler sequences, the first filler sequence may be located between the promoter region and exon region, and the second filler sequence may be located between the enhancer region and 3′ ITR. In one embodiment, a viral genome may comprise two filler sequences, the first filler sequence may be located between the promoter region and exon region, and the second filler sequence may be located between the polyadenylation signal sequence region and MCS region. In one embodiment, a viral genome may comprise two filler sequences, the first filler sequence may be located between the promoter region and exon region, and the second filler sequence may be located between the polyadenylation signal sequence region and exon region. In one embodiment, a viral genome may comprise two filler sequences, the first filler sequence may be located between the promoter region and exon region, and the second filler sequence may be located between the polyadenylation signal sequence region and 3′ ITR. In one embodiment, a viral genome may comprise two filler sequences, the first filler sequence may be located between the promoter region and exon region, and the second filler sequence may be located between the MCS region and exon region. In one embodiment, a viral genome may comprise two filler sequences, the first filler sequence may be located between the promoter region and exon region, and the second filler sequence may be located between the MCS region and 3′ ITR. In one embodiment, a viral genome may comprise two filler sequences, the first filler sequence may be located between the promoter region and exon region, and the second filler sequence may be located between the exon region and 3′ ITR.

[0284] In one embodiment, a viral genome may comprise two filler sequences, the first filler sequence may be located between the promoter region and MCS region, and the second filler sequence may be located between the payload region and intron region. In one embodiment, a viral genome may comprise two filler sequences, the first filler sequence may be located between the promoter region and MCS region, and the second filler sequence may be located between the payload region and enhancer region. In one embodiment, a viral genome may comprise two filler sequences, the first filler sequence may be located between the promoter region and MCS region, and the second filler sequence may be located between the payload region and polyadenylation signal sequence region.

[0285] In one embodiment, a viral genome may comprise two filler sequences, the first filler sequence may be located between the promoter region and MCS region, and the second filler sequence may be located between the payload region and MCS region. In one embodiment, a viral genome may comprise two filler sequences, the first filler sequence may be located between the promoter region and MCS region, and the second filler sequence may be located between the payload region and exon region. In one embodiment, a viral genome may comprise two filler sequences, the first filler sequence may be located between the promoter region and MCS region, and the second filler sequence may be located between the payload region and 3′ ITR. In one embodiment, a viral genome may comprise two filler sequences, the first filler sequence may be located between the promoter region and MCS region, and the second filler sequence may be located between the intron region and enhancer region. In one embodiment, a viral genome may comprise two filler sequences, the first filler sequence may be located between the promoter region and MCS region, and the second filler sequence may be located between the intron region and polyadenylation signal sequence region. In one embodiment, a viral genome may comprise two filler sequences, the first filler sequence may be located between the promoter region and MCS region, and the second filler sequence may be located between the intron region and MCS region. In one embodiment, a viral genome may comprise two filler sequences, the first filler sequence may be located between the promoter region and MCS region, and the second filler sequence may be located between the intron region and exon region. In one embodiment, a viral genome may comprise two filler sequences, the first filler sequence may be located between the promoter region and MCS region, and the second filler sequence may be located between the intron region and 3′ ITR. In one embodiment, a viral genome may comprise two filler sequences, the first filler sequence may be located between the promoter region and MCS region, and the second filler sequence may be located between the enhancer region and polyadenylation signal sequence region. In one embodiment, a viral genome may comprise two filler sequences, the first filler sequence may be located between the promoter region and MCS region, and the second filler sequence may be located between the enhancer region and MCS region. In one embodiment, a viral genome may comprise two filler sequences, the first filler sequence may be located between the promoter region and MCS region, and the second filler sequence may be located between the enhancer region and exon region. In one embodiment, a viral genome may comprise two filler sequences, the first filler sequence may be located between the promoter region and MCS region, and the second filler sequence may be located between the enhancer region and 3′ ITR. In one embodiment, a viral genome may comprise two filler sequences, the first filler sequence may be located between the promoter region and MCS region, and the second filler sequence may be located between the polyadenylation signal sequence region and MCS region. In one embodiment, a viral genome may comprise two filler sequences, the first filler sequence may be located between the promoter region and MCS region, and the second filler sequence may be located between the polyadenylation signal sequence region and exon region. In one embodiment, a viral genome may comprise two filler sequences, the first filler sequence may be located between the promoter region and MCS region, and the second filler sequence may be located between the polyadenylation signal sequence region and 3′ ITR. In one embodiment, a viral genome may comprise two filler sequences, the first filler sequence may be located between the promoter region and MCS region, and the second filler sequence may be located between the MCS region and exon region. In one embodiment, a viral genome may comprise two filler sequences, the first filler sequence may be located between the promoter region and MCS region, and the second filler sequence may be located between the MCS region and 3′ ITR. In one embodiment, a viral genome may comprise two filler sequences, the first filler sequence may be located between the promoter region and MCS region, and the second filler sequence may be located between the exon region and 3′ ITR.

[0286] In one embodiment, a viral genome may comprise two filler sequences, the first filler sequence may be located between the promoter region and 3′ITR, and the second filler sequence may be located between the payload region and intron region. In one embodiment, a viral genome may comprise two filler sequences, the first filler sequence may be located between the promoter region and 3′ITR, and the second filler sequence may be located between the payload region and enhancer region. In one embodiment, a viral genome may comprise two filler sequences, the first filler sequence may be located between the promoter region and 3′ITR, and the second filler sequence may be located between the payload region and polyadenylation signal sequence region. In one embodiment, a viral genome may comprise two filler sequences, the first filler sequence may be located between the promoter region and 3′ITR, and the second filler sequence may be located between the payload region and MCS region. In one embodiment, a viral genome may comprise two filler sequences, the first filler sequence may be located between the promoter region and 3′ITR, and the second filler sequence may be located between the payload region and exon region.

[0287] In one embodiment, a viral genome may comprise two filler sequences, the first filler sequence may be located between the promoter region and 3′ITR, and the second filler sequence may be located between the payload region and 3′ ITR. In one embodiment, a viral genome may comprise two filler sequences, the first filler sequence may be located between the promoter region and 3′ITR, and the second filler sequence may be located between the intron region and enhancer region. In one embodiment, a viral genome may comprise two filler sequences, the first filler sequence may be located between the promoter region and 3′ITR, and the second filler sequence may be located between the intron region and polyadenylation signal sequence region. In one embodiment, a viral genome may comprise two filler sequences, the first filler sequence may be located between the promoter region and 3′ITR, and the second filler sequence may be located between the intron region and MCS region. In one embodiment, a viral genome may comprise two filler sequences, the first filler sequence may be located between the promoter region and 3′ITR, and the second filler sequence may be located between the intron region and exon region. In one embodiment, a viral genome may comprise two filler sequences, the first filler sequence may be located between the promoter region and 3′ITR, and the second filler sequence may be located between the intron region and 3′ ITR. In one embodiment, a viral genome may comprise two filler sequences, the first filler sequence may be located between the promoter region and 3′ITR, and the second filler sequence may be located between the enhancer region and polyadenylation signal sequence region.

[0288] In one embodiment, a viral genome may comprise two filler sequences, the first filler sequence may be located between the promoter region and 3′ITR, and the second filler sequence may be located between the enhancer region and MCS region. In one embodiment, a viral genome may comprise two filler sequences, the first filler sequence may be located between the promoter region and 3′ITR, and the second filler sequence may be located between the enhancer region and exon region.

[0289] In one embodiment, a viral genome may comprise two filler sequences, the first filler sequence may be located between the promoter region and 3′ITR, and the second filler sequence may be located between the enhancer region and 3′ ITR. In one embodiment, a viral genome may comprise two filler sequences, the first filler sequence may be located between the promoter region and 3′ITR, and the second filler sequence may be located between the polyadenylation signal sequence region and MCS region. In one embodiment, a viral genome may comprise two filler sequences, the first filler sequence may be located between the promoter region and 3′ITR, and the second filler sequence may be located between the polyadenylation signal sequence region and exon region. In one embodiment, a viral genome may comprise two filler sequences, the first filler sequence may be located between the promoter region and 3′ITR, and the second filler sequence may be located between the polyadenylation signal sequence region and 3′ ITR. In one embodiment, a viral genome may comprise two filler sequences, the first filler sequence may be located between the promoter region and 3′ITR, and the second filler sequence may be located between the MCS region and exon region. In one embodiment, a viral genome may comprise two filler sequences, the first filler sequence may be located between the promoter region and 3′ITR, and the second filler sequence may be located between the MCS region and 3′ ITR. In one embodiment, a viral genome may comprise two filler sequences, the first filler sequence may be located between the promoter region and 3′ITR, and the second filler sequence may be located between the exon region and 3′ ITR.

[0290] In one embodiment, a viral genome may comprise two filler sequences, the first filler sequence may be located between the payload region and intron region, and the second filler sequence may be located between the intron region and enhancer region. In one embodiment, a viral genome may comprise two filler sequences, the first filler sequence may be located between the payload region and intron region, and the second filler sequence may be located between the intron region and polyadenylation signal sequence region. In one embodiment, a viral genome may comprise two filler sequences, the first filler sequence may be located between the payload region and intron region, and the second filler sequence may be located between the intron region and MCS region.

[0291] In one embodiment, a viral genome may comprise two filler sequences, the first filler sequence may be located between the payload region and intron region, and the second filler sequence may be located between the intron region and exon region. In one embodiment, a viral genome may comprise two filler sequences, the first filler sequence may be located between the payload region and intron region, and the second filler sequence may be located between the intron region and 3′ ITR. In one embodiment, a viral genome may comprise two filler sequences, the first filler sequence may be located between the payload region and intron region, and the second filler sequence may be located between the enhancer region and polyadenylation signal sequence region.

[0292] In one embodiment, a viral genome may comprise two filler sequences, the first filler sequence may be located between the payload region and intron region, and the second filler sequence may be located between the enhancer region and MCS region. In one embodiment, a viral genome may comprise two filler sequences, the first filler sequence may be located between the payload region and intron region, and the second filler sequence may be located between the enhancer region and exon region. In one embodiment, a viral genome may comprise two filler sequences, the first filler sequence may be located between the payload region and intron region, and the second filler sequence may be located between the enhancer region and 3′ ITR. In one embodiment, a viral genome may comprise two filler sequences, the first filler sequence may be located between the payload region and intron region, and the second filler sequence may be located between the polyadenylation signal sequence region and MCS region. In one embodiment, a viral genome may comprise two filler sequences, the first filler sequence may be located between the payload region and intron region, and the second filler sequence may be located between the polyadenylation signal sequence region and exon region. In one embodiment, a viral genome may comprise two filler sequences, the first filler sequence may be located between the payload region and intron region, and the second filler sequence may be located between the polyadenylation signal sequence region and 3′ ITR. In one embodiment, a viral genome may comprise two filler sequences, the first filler sequence may be located between the payload region and intron region, and the second filler sequence may be located between the MCS region and exon region. In one embodiment, a viral genome may comprise two filler sequences, the first filler sequence may be located between the payload region and intron region, and the second filler sequence may be located between the MCS region and 3′ ITR. In one embodiment, a viral genome may comprise two filler sequences, the first filler sequence may be located between the payload region and intron region, and the second filler sequence may be located between the exon region and 3′ ITR.

[0293] In one embodiment, a viral genome may comprise two filler sequences, the first filler sequence may be located between the payload region and enhancer region, and the second filler sequence may be located between the intron region and enhancer region. In one embodiment, a viral genome may comprise two filler sequences, the first filler sequence may be located between the payload region and enhancer region, and the second filler sequence may be located between the intron region and polyadenylation signal sequence region. In one embodiment, a viral genome may comprise two filler sequences, the first filler sequence may be located between the payload region and enhancer region, and the second filler sequence may be located between the intron region and MCS region.

[0294] In one embodiment, a viral genome may comprise two filler sequences, the first filler sequence may be located between the payload region and enhancer region, and the second filler sequence may be located between the intron region and exon region. In one embodiment, a viral genome may comprise two filler sequences, the first filler sequence may be located between the payload region and enhancer region, and the second filler sequence may be located between the intron region and 3′ ITR. In one embodiment, a viral genome may comprise two filler sequences, the first filler sequence may be located between the payload region and enhancer region, and the second filler sequence may be located between the enhancer region and polyadenylation signal sequence region.

[0295] In one embodiment, a viral genome may comprise two filler sequences, the first filler sequence may be located between the payload region and enhancer region, and the second filler sequence may be located between the enhancer region and MCS region. In one embodiment, a viral genome may comprise two filler sequences, the first filler sequence may be located between the payload region and enhancer region, and the second filler sequence may be located between the enhancer region and exon region. In one embodiment, a viral genome may comprise two filler sequences, the first filler sequence may be located between the payload region and enhancer region, and the second filler sequence may be located between the enhancer region and 3′ ITR. In one embodiment, a viral genome may comprise two filler sequences, the first filler sequence may be located between the payload region and enhancer region, and the second filler sequence may be located between the polyadenylation signal sequence region and MCS region. In one embodiment, a viral genome may comprise two filler sequences, the first filler sequence may be located between the payload region and enhancer region, and the second filler sequence may be located between the polyadenylation signal sequence region and exon region. In one embodiment, a viral genome may comprise two filler sequences, the first filler sequence may be located between the payload region and enhancer region, and the second filler sequence may be located between the polyadenylation signal sequence region and 3′ ITR. In one embodiment, a viral genome may comprise two filler sequences, the first filler sequence may be located between the payload region and enhancer region, and the second filler sequence may be located between the MCS region and exon region. In one embodiment, a viral genome may comprise two filler sequences, the first filler sequence may be located between the payload region and enhancer region, and the second filler sequence may be located between the MCS region and 3′ ITR. In one embodiment, a viral genome may comprise two filler sequences, the first filler sequence may be located between the payload region and enhancer region, and the second filler sequence may be located between the exon region and 3′ ITR.

[0296] In one embodiment, a viral genome may comprise two filler sequences, the first filler sequence may be located between the payload region and polyadenylation signal sequence region, and the second filler sequence may be located between the intron region and enhancer region. In one embodiment, a viral genome may comprise two filler sequences, the first filler sequence may be located between the payload region and polyadenylation signal sequence region, and the second filler sequence may be located between the intron region and polyadenylation signal sequence region. In one embodiment, a viral genome may comprise two filler sequences, the first filler sequence may be located between the payload region and polyadenylation signal sequence region, and the second filler sequence may be located between the intron region and MCS region. In one embodiment, a viral genome may comprise two filler sequences, the first filler sequence may be located between the payload region and polyadenylation signal sequence region, and the second filler sequence may be located between the intron region and exon region. In one embodiment, a viral genome may comprise two filler sequences, the first filler sequence may be located between the payload region and polyadenylation signal sequence region, and the second filler sequence may be located between the intron region and 3′ ITR. In one embodiment, a viral genome may comprise two filler sequences, the first filler sequence may be located between the payload region and polyadenylation signal sequence region, and the second filler sequence may be located between the enhancer region and polyadenylation signal sequence region. In one embodiment, a viral genome may comprise two filler sequences, the first filler sequence may be located between the payload region and polyadenylation signal sequence region, and the second filler sequence may be located between the enhancer region and MCS region. In one embodiment, a viral genome may comprise two filler sequences, the first filler sequence may be located between the payload region and polyadenylation signal sequence region, and the second filler sequence may be located between the enhancer region and exon region. In one embodiment, a viral genome may comprise two filler sequences, the first filler sequence may be located between the payload region and polyadenylation signal sequence region, and the second filler sequence may be located between the enhancer region and 3′ ITR. In one embodiment, a viral genome may comprise two filler sequences, the first filler sequence may be located between the payload region and polyadenylation signal sequence region, and the second filler sequence may be located between the polyadenylation signal sequence region and MCS region. In one embodiment, a viral genome may comprise two filler sequences, the first filler sequence may be located between the payload region and polyadenylation signal sequence region, and the second filler sequence may be located between the polyadenylation signal sequence region and exon region. In one embodiment, a viral genome may comprise two filler sequences, the first filler sequence may be located between the payload region and polyadenylation signal sequence region, and the second filler sequence may be located between the polyadenylation signal sequence region and 3′ ITR. In one embodiment, a viral genome may comprise two filler sequences, the first filler sequence may be located between the payload region and polyadenylation signal sequence region, and the second filler sequence may be located between the MCS region and exon region. In one embodiment, a viral genome may comprise two filler sequences, the first filler sequence may be located between the payload region and polyadenylation signal sequence region, and the second filler sequence may be located between the MCS region and 3′ ITR. In one embodiment, a viral genome may comprise two filler sequences, the first filler sequence may be located between the payload region and polyadenylation signal sequence region, and the second filler sequence may be located between the exon region and 3′ ITR.

[0297] In one embodiment, a viral genome may comprise two filler sequences, the first filler sequence may be located between the payload region and MCS region, and the second filler sequence may be located between the intron region and enhancer region. In one embodiment, a viral genome may comprise two filler sequences, the first filler sequence may be located between the payload region and MCS region, and the second filler sequence may be located between the intron region and polyadenylation signal sequence region. In one embodiment, a viral genome may comprise two filler sequences, the first filler sequence may be located between the payload region and MCS region, and the second filler sequence may be located between the intron region and MCS region.

[0298] In one embodiment, a viral genome may comprise two filler sequences, the first filler sequence may be located between the payload region and MCS region, and the second filler sequence may be located between the intron region and exon region. In one embodiment, a viral genome may comprise two filler sequences, the first filler sequence may be located between the payload region and MCS region, and the second filler sequence may be located between the intron region and 3′ ITR. In one embodiment, a viral genome may comprise two filler sequences, the first filler sequence may be located between the payload region and MCS region, and the second filler sequence may be located between the enhancer region and polyadenylation signal sequence region.

[0299] In one embodiment, a viral genome may comprise two filler sequences, the first filler sequence may be located between the payload region and MCS region, and the second filler sequence may be located between the enhancer region and MCS region. In one embodiment, a viral genome may comprise two filler sequences, the first filler sequence may be located between the payload region and MCS region, and the second filler sequence may be located between the enhancer region and exon region. In one embodiment, a viral genome may comprise two filler sequences, the first filler sequence may be located between the payload region and MCS region, and the second filler sequence may be located between the enhancer region and 3′ ITR. In one embodiment, a viral genome may comprise two filler sequences, the first filler sequence may be located between the payload region and MCS region, and the second filler sequence may be located between the polyadenylation signal sequence region and MCS region. In one embodiment, a viral genome may comprise two filler sequences, the first filler sequence may be located between the payload region and MCS region, and the second filler sequence may be located between the polyadenylation signal sequence region and exon region. In one embodiment, a viral genome may comprise two filler sequences, the first filler sequence may be located between the payload region and MCS region, and the second filler sequence may be located between the polyadenylation signal sequence region and 3′ ITR. In one embodiment, a viral genome may comprise two filler sequences, the first filler sequence may be located between the payload region and MCS region, and the second filler sequence may be located between the MCS region and exon region. In one embodiment, a viral genome may comprise two filler sequences, the first filler sequence may be located between the payload region and MCS region, and the second filler sequence may be located between the MCS region and 3′ ITR. In one embodiment, a viral genome may comprise two filler sequences, the first filler sequence may be located between the payload region and MCS region, and the second filler sequence may be located between the exon region and 3′ ITR.

[0300] In one embodiment, a viral genome may comprise two filler sequences, the first filler sequence may be located between the payload region and exon region, and the second filler sequence may be located between the intron region and enhancer region. In one embodiment, a viral genome may comprise two filler sequences, the first filler sequence may be located between the payload region and exon region, and the second filler sequence may be located between the intron region and polyadenylation signal sequence region. In one embodiment, a viral genome may comprise two filler sequences, the first filler sequence may be located between the payload region and exon region, and the second filler sequence may be located between the intron region and MCS region.

[0301] In one embodiment, a viral genome may comprise two filler sequences, the first filler sequence may be located between the payload region and exon region, and the second filler sequence may be located between the intron region and exon region. In one embodiment, a viral genome may comprise two filler sequences, the first filler sequence may be located between the payload region and exon region, and the second filler sequence may be located between the intron region and 3′ ITR. In one embodiment, a viral genome may comprise two filler sequences, the first filler sequence may be located between the payload region and exon region, and the second filler sequence may be located between the enhancer region and polyadenylation signal sequence region.

[0302] In one embodiment, a viral genome may comprise two filler sequences, the first filler sequence may be located between the payload region and exon region, and the second filler sequence may be located between the enhancer region and MCS region. In one embodiment, a viral genome may comprise two filler sequences, the first filler sequence may be located between the payload region and exon region, and the second filler sequence may be located between the enhancer region and exon region. In one embodiment, a viral genome may comprise two filler sequences, the first filler sequence may be located between the payload region and exon region, and the second filler sequence may be located between the enhancer region and 3′ ITR. In one embodiment, a viral genome may comprise two filler sequences, the first filler sequence may be located between the payload region and exon region, and the second filler sequence may be located between the polyadenylation signal sequence region and MCS region. In one embodiment, a viral genome may comprise two filler sequences, the first filler sequence may be located between the payload region and exon region, and the second filler sequence may be located between the polyadenylation signal sequence region and exon region. In one embodiment, a viral genome may comprise two filler sequences, the first filler sequence may be located between the payload region and exon region, and the second filler sequence may be located between the polyadenylation signal sequence region and 3′ ITR. In one embodiment, a viral genome may comprise two filler sequences, the first filler sequence may be located between the payload region and exon region, and the second filler sequence may be located between the MCS region and exon region. In one embodiment, a viral genome may comprise two filler sequences, the first filler sequence may be located between the payload region and exon region, and the second filler sequence may be located between the MCS region and 3′ ITR. In one embodiment, a viral genome may comprise two filler sequences, the first filler sequence may be located between the payload region and exon region, and the second filler sequence may be located between the exon region and 3′ ITR.

[0303] In one embodiment, a viral genome may comprise two filler sequences, the first filler sequence may be located between the payload region and 3′ ITR region, and the second filler sequence may be located between the intron region and enhancer region. In one embodiment, a viral genome may comprise two filler sequences, the first filler sequence may be located between the payload region and 3′ ITR region, and the second filler sequence may be located between the intron region and polyadenylation signal sequence region. In one embodiment, a viral genome may comprise two filler sequences, the first filler sequence may be located between the payload region and 3′ ITR region, and the second filler sequence may be located between the intron region and MCS region.

[0304] In one embodiment, a viral genome may comprise two filler sequences, the first filler sequence may be located between the payload region and 3′ ITR region, and the second filler sequence may be located between the intron region and exon region. In one embodiment, a viral genome may comprise two filler sequences, the first filler sequence may be located between the payload region and 3′ ITR region, and the second filler sequence may be located between the intron region and 3′ ITR. In one embodiment, a viral genome may comprise two filler sequences, the first filler sequence may be located between the payload region and 3′ ITR region, and the second filler sequence may be located between the enhancer region and polyadenylation signal sequence region.

[0305] In one embodiment, a viral genome may comprise two filler sequences, the first filler sequence may be located between the payload region and 3′ ITR region, and the second filler sequence may be located between the enhancer region and MCS region. In one embodiment, a viral genome may comprise two filler sequences, the first filler sequence may be located between the payload region and 3′ ITR region, and the second filler sequence may be located between the enhancer region and exon region. In one embodiment, a viral genome may comprise two filler sequences, the first filler sequence may be located between the payload region and 3′ ITR region, and the second filler sequence may be located between the enhancer region and 3′ ITR. In one embodiment, a viral genome may comprise two filler sequences, the first filler sequence may be located between the payload region and 3′ ITR region, and the second filler sequence may be located between the polyadenylation signal sequence region and MCS region. In one embodiment, a viral genome may comprise two filler sequences, the first filler sequence may be located between the payload region and 3′ ITR region, and the second filler sequence may be located between the polyadenylation signal sequence region and exon region. In one embodiment, a viral genome may comprise two filler sequences, the first filler sequence may be located between the payload region and 3′ ITR region, and the second filler sequence may be located between the polyadenylation signal sequence region and 3′ ITR. In one embodiment, a viral genome may comprise two filler sequences, the first filler sequence may be located between the payload region and 3′ ITR region, and the second filler sequence may be located between the MCS region and exon region. In one embodiment, a viral genome may comprise two filler sequences, the first filler sequence may be located between the payload region and 3′ ITR region, and the second filler sequence may be located between the MCS region and 3′ ITR. In one embodiment, a viral genome may comprise two filler sequences, the first filler sequence may be located between the payload region and 3′ ITR region, and the second filler sequence may be located between the exon region and 3′ ITR.

[0306] In one embodiment, a viral genome may comprise two filler sequences, the first filler sequence may be located between the intron region and enhancer region, and the second filler sequence may be located between the enhancer region and polyadenylation signal sequence region. In one embodiment, a viral genome may comprise two filler sequences, the first filler sequence may be located between the intron region and enhancer region, and the second filler sequence may be located between the enhancer region and MCS region. In one embodiment, a viral genome may comprise two filler sequences, the first filler sequence may be located between the intron region and enhancer region, and the second filler sequence may be located between the enhancer region and exon region. In one embodiment, a viral genome may comprise two filler sequences, the first filler sequence may be located between the intron region and enhancer region, and the second filler sequence may be located between the enhancer region and 3′ ITR. In one embodiment, a viral genome may comprise two filler sequences, the first filler sequence may be located between the intron region and enhancer region, and the second filler sequence may be located between the polyadenylation signal sequence region and MCS region. In one embodiment, a viral genome may comprise two filler sequences, the first filler sequence may be located between the intron region and enhancer region, and the second filler sequence may be located between the polyadenylation signal sequence region and exon region. In one embodiment, a viral genome may comprise two filler sequences, the first filler sequence may be located between the intron region and enhancer region, and the second filler sequence may be located between the polyadenylation signal sequence region and 3′ ITR. In one embodiment, a viral genome may comprise two filler sequences, the first filler sequence may be located between the intron region and enhancer region, and the second filler sequence may be located between the MCS region and exon region. In one embodiment, a viral genome may comprise two filler sequences, the first filler sequence may be located between the intron region and enhancer region, and the second filler sequence may be located between the MCS region and 3′ ITR. In one embodiment, a viral genome may comprise two filler sequences, the first filler sequence may be located between the intron region and enhancer region, and the second filler sequence may be located between the exon region and 3′ ITR.

[0307] In one embodiment, a viral genome may comprise two filler sequences, the first filler sequence may be located between the intron region and polyadenylation signal sequence region, and the second filler sequence may be located between the enhancer region and polyadenylation signal sequence region. In one embodiment, a viral genome may comprise two filler sequences, the first filler sequence may be located between the intron region and polyadenylation signal sequence region, and the second filler sequence may be located between the enhancer region and MCS region. In one embodiment, a viral genome may comprise two filler sequences, the first filler sequence may be located between the intron region and polyadenylation signal sequence region, and the second filler sequence may be located between the enhancer region and exon region. In one embodiment, a viral genome may comprise two filler sequences, the first filler sequence may be located between the intron region and polyadenylation signal sequence region, and the second filler sequence may be located between the enhancer region and 3′ ITR. In one embodiment, a viral genome may comprise two filler sequences, the first filler sequence may be located between the intron region and polyadenylation signal sequence region, and the second filler sequence may be located between the polyadenylation signal sequence region and MCS region. In one embodiment, a viral genome may comprise two filler sequences, the first filler sequence may be located between the intron region and polyadenylation signal sequence region, and the second filler sequence may be located between the polyadenylation signal sequence region and exon region. In one embodiment, a viral genome may comprise two filler sequences, the first filler sequence may be located between the intron region and polyadenylation signal sequence region, and the second filler sequence may be located between the polyadenylation signal sequence region and 3′ ITR. In one embodiment, a viral genome may comprise two filler sequences, the first filler sequence may be located between the intron region and polyadenylation signal sequence region, and the second filler sequence may be located between the MCS region and exon region. In one embodiment, a viral genome may comprise two filler sequences, the first filler sequence may be located between the intron region and polyadenylation signal sequence region, and the second filler sequence may be located between the MCS region and 3′ ITR. In one embodiment, a viral genome may comprise two filler sequences, the first filler sequence may be located between the intron region and polyadenylation signal sequence region, and the second filler sequence may be located between the exon region and 3′ ITR.

[0308] In one embodiment, a viral genome may comprise two filler sequences, the first filler sequence may be located between the intron region and MCS region, and the second filler sequence may be located between the enhancer region and polyadenylation signal sequence region. In one embodiment, a viral genome may comprise two filler sequences, the first filler sequence may be located between the intron region and MCS region, and the second filler sequence may be located between the enhancer region and MCS region. In one embodiment, a viral genome may comprise two filler sequences, the first filler sequence may be located between the intron region and MCS region, and the second filler sequence may be located between the enhancer region and exon region.

[0309] In one embodiment, a viral genome may comprise two filler sequences, the first filler sequence may be located between the intron region and MCS region, and the second filler sequence may be located between the enhancer region and 3′ ITR. In one embodiment, a viral genome may comprise two filler sequences, the first filler sequence may be located between the intron region and MCS region, and the second filler sequence may be located between the polyadenylation signal sequence region and MCS region. In one embodiment, a viral genome may comprise two filler sequences, the first filler sequence may be located between the intron region and MCS region, and the second filler sequence may be located between the polyadenylation signal sequence region and exon region. In one embodiment, a viral genome may comprise two filler sequences, the first filler sequence may be located between the intron region and MCS region, and the second filler sequence may be located between the polyadenylation signal sequence region and 3′ ITR. In one embodiment, a viral genome may comprise two filler sequences, the first filler sequence may be located between the intron region and MCS region, and the second filler sequence may be located between the MCS region and exon region. In one embodiment, a viral genome may comprise two filler sequences, the first filler sequence may be located between the intron region and MCS region, and the second filler sequence may be located between the MCS region and 3′ ITR. In one embodiment, a viral genome may comprise two filler sequences, the first filler sequence may be located between the intron region and MCS region, and the second filler sequence may be located between the exon region and 3′ ITR.

[0310] In one embodiment, a viral genome may comprise two filler sequences, the first filler sequence may be located between the intron region and exon region, and the second filler sequence may be located between the enhancer region and polyadenylation signal sequence region. In one embodiment, a viral genome may comprise two filler sequences, the first filler sequence may be located between the intron region and exon region, and the second filler sequence may be located between the enhancer region and MCS region. In one embodiment, a viral genome may comprise two filler sequences, the first filler sequence may be located between the intron region and exon region, and the second filler sequence may be located between the enhancer region and exon region.

[0311] In one embodiment, a viral genome may comprise two filler sequences, the first filler sequence may be located between the intron region and exon region, and the second filler sequence may be located between the enhancer region and 3′ ITR. In one embodiment, a viral genome may comprise two filler sequences, the first filler sequence may be located between the intron region and exon region, and the second filler sequence may be located between the polyadenylation signal sequence region and MCS region. In one embodiment, a viral genome may comprise two filler sequences, the first filler sequence may be located between the intron region and exon region, and the second filler sequence may be located between the polyadenylation signal sequence region and exon region. In one embodiment, a viral genome may comprise two filler sequences, the first filler sequence may be located between the intron region and exon region, and the second filler sequence may be located between the polyadenylation signal sequence region and 3′ ITR. In one embodiment, a viral genome may comprise two filler sequences, the first filler sequence may be located between the intron region and exon region, and the second filler sequence may be located between the MCS region and exon region. In one embodiment, a viral genome may comprise two filler sequences, the first filler sequence may be located between the intron region and exon region, and the second filler sequence may be located between the MCS region and 3′ ITR. In one embodiment, a viral genome may comprise two filler sequences, the first filler sequence may be located between the intron region and exon region, and the second filler sequence may be located between the exon region and 3′ ITR.

[0312] In one embodiment, a viral genome may comprise two filler sequences, the first filler sequence may be located between the intron region and 3′ITR, and the second filler sequence may be located between the enhancer region and polyadenylation signal sequence region. In one embodiment, a viral genome may comprise two filler sequences, the first filler sequence may be located between the intron region and 3′ITR, and the second filler sequence may be located between the enhancer region and MCS region. In one embodiment, a viral genome may comprise two filler sequences, the first filler sequence may be located between the intron region and 3′ITR, and the second filler sequence may be located between the enhancer region and exon region. In one embodiment, a viral genome may comprise two filler sequences, the first filler sequence may be located between the intron region and 3′ITR, and the second filler sequence may be located between the enhancer region and 3′ ITR. In one embodiment, a viral genome may comprise two filler sequences, the first filler sequence may be located between the intron region and 3′ITR, and the second filler sequence may be located between the polyadenylation signal sequence region and MCS region. In one embodiment, a viral genome may comprise two filler sequences, the first filler sequence may be located between the intron region and 3′ITR, and the second filler sequence may be located between the polyadenylation signal sequence region and exon region. In one embodiment, a viral genome may comprise two filler sequences, the first filler sequence may be located between the intron region and 3′ITR, and the second filler sequence may be located between the polyadenylation signal sequence region and 3′ ITR. In one embodiment, a viral genome may comprise two filler sequences, the first filler sequence may be located between the intron region and 3′ITR, and the second filler sequence may be located between the MCS region and exon region. In one embodiment, a viral genome may comprise two filler sequences, the first filler sequence may be located between the intron region and 3′ITR, and the second filler sequence may be located between the MCS region and 3′ ITR. In one embodiment, a viral genome may comprise two filler sequences, the first filler sequence may be located between the intron region and 3′ITR, and the second filler sequence may be located between the exon region and 3′ ITR.

[0313] In one embodiment, a viral genome may comprise two filler sequences, the first filler sequence may be located between the enhancer region and polyadenylation signal sequence region, and the second filler sequence may be located between the polyadenylation signal sequence region and MCS region. In one embodiment, a viral genome may comprise two filler sequences, the first filler sequence may be located between the enhancer region and polyadenylation signal sequence region, and the second filler sequence may be located between the polyadenylation signal sequence region and exon region. In one embodiment, a viral genome may comprise two filler sequences, the first filler sequence may be located between the enhancer region and polyadenylation signal sequence region, and the second filler sequence may be located between the polyadenylation signal sequence region and 3′ ITR. In one embodiment, a viral genome may comprise two filler sequences, the first filler sequence may be located between the enhancer region and polyadenylation signal sequence region, and the second filler sequence may be located between the MCS region and exon region. In one embodiment, a viral genome may comprise two filler sequences, the first filler sequence may be located between the enhancer region and polyadenylation signal sequence region, and the second filler sequence may be located between the MCS region and 3′ ITR. In one embodiment, a viral genome may comprise two filler sequences, the first filler sequence may be located between the enhancer region and polyadenylation signal sequence region, and the second filler sequence may be located between the exon region and 3′ ITR.

[0314] In one embodiment, a viral genome may comprise two filler sequences, the first filler sequence may be located between the enhancer region and MCS region, and the second filler sequence may be located between the polyadenylation signal sequence region and MCS region. In one embodiment, a viral genome may comprise two filler sequences, the first filler sequence may be located between the enhancer region and MCS region, and the second filler sequence may be located between the polyadenylation signal sequence region and exon region. In one embodiment, a viral genome may comprise two filler sequences, the first filler sequence may be located between the enhancer region and MCS region, and the second filler sequence may be located between the polyadenylation signal sequence region and 3′ ITR. In one embodiment, a viral genome may comprise two filler sequences, the first filler sequence may be located between the enhancer region and MCS region, and the second filler sequence may be located between the MCS region and exon region. In one embodiment, a viral genome may comprise two filler sequences, the first filler sequence may be located between the enhancer region and MCS region, and the second filler sequence may be located between the MCS region and 3′ ITR. In one embodiment, a viral genome may comprise two filler sequences, the first filler sequence may be located between the enhancer region and MCS region, and the second filler sequence may be located between the exon region and 3′ ITR.

[0315] In one embodiment, a viral genome may comprise two filler sequences, the first filler sequence may be located between the enhancer region and exon region, and the second filler sequence may be located between the polyadenylation signal sequence region and MCS region. In one embodiment, a viral genome may comprise two filler sequences, the first filler sequence may be located between the enhancer region and exon region, and the second filler sequence may be located between the polyadenylation signal sequence region and exon region. In one embodiment, a viral genome may comprise two filler sequences, the first filler sequence may be located between the enhancer region and exon region, and the second filler sequence may be located between the polyadenylation signal sequence region and 3′ ITR. In one embodiment, a viral genome may comprise two filler sequences, the first filler sequence may be located between the enhancer region and exon region, and the second filler sequence may be located between the MCS region and exon region. In one embodiment, a viral genome may comprise two filler sequences, the first filler sequence may be located between the enhancer region and exon region, and the second filler sequence may be located between the MCS region and 3′ ITR. In one embodiment, a viral genome may comprise two filler sequences, the first filler sequence may be located between the enhancer region and exon region, and the second filler sequence may be located between the exon region and 3′ ITR.

[0316] In one embodiment, a viral genome may comprise two filler sequences, the first filler sequence may be located between the enhancer region and 3′ ITR, and the second filler sequence may be located between the polyadenylation signal sequence region and MCS region. In one embodiment, a viral genome may comprise two filler sequences, the first filler sequence may be located between the enhancer region and 3′ ITR, and the second filler sequence may be located between the polyadenylation signal sequence region and exon region. In one embodiment, a viral genome may comprise two filler sequences, the first filler sequence may be located between the enhancer region and 3′ ITR, and the second filler sequence may be located between the polyadenylation signal sequence region and 3′ ITR. In one embodiment, a viral genome may comprise two filler sequences, the first filler sequence may be located between the enhancer region and 3′ ITR, and the second filler sequence may be located between the MCS region and exon region. In one embodiment, a viral genome may comprise two filler sequences, the first filler sequence may be located between the enhancer region and 3′ ITR, and the second filler sequence may be located between the MCS region and 3′ ITR. In one embodiment, a viral genome may comprise two filler sequences, the first filler sequence may be located between the enhancer region and 3′ ITR, and the second filler sequence may be located between the exon region and 3′ ITR.

[0317] In one embodiment, a viral genome may comprise two filler sequences, the first filler sequence may be located between the polyadenylation signal sequence region and MCS region, and the second filler sequence may be located between the MCS region and exon region. In one embodiment, a viral genome may comprise two filler sequences, the first filler sequence may be located between the polyadenylation signal sequence region and MCS region, and the second filler sequence may be located between the MCS region and 3′ ITR. In one embodiment, a viral genome may comprise two filler sequences, the first filler sequence may be located between the polyadenylation signal sequence region and MCS region, and the second filler sequence may be located between the exon region and 3′ ITR.

[0318] In one embodiment, a viral genome may comprise two filler sequences, the first filler sequence may be located between the polyadenylation signal sequence region and exon region, and the second filler sequence may be located between the MCS region and exon region. In one embodiment, a viral genome may comprise two filler sequences, the first filler sequence may be located between the polyadenylation signal sequence region and exon region, and the second filler sequence may be located between the MCS region and 3′ ITR. In one embodiment, a viral genome may comprise two filler sequences, the first filler sequence may be located between the polyadenylation signal sequence region and exon region, and the second filler sequence may be located between the exon region and 3′ ITR.

[0319] In one embodiment, a viral genome may comprise two filler sequences, the first filler sequence may be located between the polyadenylation signal sequence region and 3′ ITR, and the second filler sequence may be located between the MCS region and exon region. In one embodiment, a viral genome may comprise two filler sequences, the first filler sequence may be located between the polyadenylation signal sequence region and 3′ ITR, and the second filler sequence may be located between the MCS region and 3′ ITR. In one embodiment, a viral genome may comprise two filler sequences, the first filler sequence may be located between the polyadenylation signal sequence region and 3′ ITR, and the second filler sequence may be located between the exon region and 3′ ITR.

[0320] In one embodiment, a viral genome may comprise two filler sequences, the first filler sequence may be located between the MCS region and exon region, and the second filler sequence may be located between the exon region and 3′ ITR.

[0321] Payloads of the Invention

[0322] The AAV particles of the present disclosure comprise at least one payload region. As used herein, “payload” or “payload region” refers to one or more polynucleotides or polynucleotide regions encoded by or within a viral genome or an expression product of such polynucleotide or polynucleotide region, e.g., a transgene, a polynucleotide encoding a polypeptide or multi-polypeptide or a modulatory nucleic acid or regulatory nucleic acid. Payloads of the present invention typically encode modulatory polynucleotides or fragments or variants thereof.

[0323] The payload region may be constructed in such a way as to reflect a region similar to or mirroring the natural organization of an mRNA.

[0324] The payload region may comprise a combination of coding and non-coding nucleic acid sequences.

[0325] In some embodiments, the AAV payload region may encode a coding or non-coding RNA.

[0326] In one embodiment, the AAV particle comprises a viral genome with a payload region comprising nucleic acid sequences encoding a siRNA, miRNA or other RNAi agent. In such an embodiment, a viral genome encoding more than one polypeptide may be replicated and packaged into a viral particle. A target cell transduced with a viral particle may express the encoded siRNA, miRNA or other RNAi agent inside a single cell.

[0327] Modulatory Polynucleotides

[0328] In one embodiment, modulatory polynucleotides, e.g., RNA or DNA molecules, may be used to treat neurodegenerative disease, in particular, amyotrophic lateral sclerosis (ALS). As used herein, a “modulatory polynucleotide” is any nucleic acid sequence(s) which functions to modulate (either increase or decrease) the level or amount of a target gene, e.g., mRNA or protein levels.

[0329] In one embodiment, the modulatory polynucleotides may comprise at least one nucleic acid sequence encoding at least one siRNA molecule. The nucleic acids may, independently if there is more than one, encode 1, 2, 3, 4, 5, 6, 7, 8, 9, or more than 9 siRNA molecules.

[0330] In one embodiment, the molecular scaffold may be located downstream of a CMV promoter, fragment or variant thereof.

[0331] In one embodiment, the molecular scaffold may be located downstream of a CBA promoter, fragment or variant thereof.

[0332] In one embodiment, the molecular scaffold may be a natural pri-miRNA scaffold located downstream of a CMV promoter. As a non-limiting example, the natural pri-miRNA scaffold is derived from the human miR155 scaffold.

[0333] In one embodiment, the molecular scaffold may be a natural pri-miRNA scaffold located downstream of a CBA promoter.

[0334] In one embodiment, the selection of a molecular scaffold and modulatory polynucleotide is determined by a method of comparing modulatory polynucleotides in pri-miRNA (see e.g., the method described by Miniarikova et al. Design, Characterization, and Lead Selection of Therapeutic miRNAs Targeting Huntingtin for Development of Gene Therapy for Huntington's Disease. Molecular Therapy-Nucleic Acids (2016) 5, e297 and International Publication No. WO2016102664; the contents of each of which are herein incorporated by reference in their entireties). To evaluate the activities of the modulatory polynucleotides, the molecular scaffold used which may be used is a human pri-miRNA scaffold (e.g., miR155 scaffold) and the promoter may be CMV. The activity may be determined in vitro using HEK293T cells and a reporter (e.g., Luciferase).

[0335] In order to evaluate the optimal molecular scaffold for the modulatory polynucleotide, the modulatory polynucleotide is used in pri-miRNA scaffolds with a CAG promoter. The constructs are co-transfected with a reporter (e.g., luciferase reporter) at 50 ng. Constructs with greater than 80% knockdown at 50 ng co-transfection are considered efficient. In one aspect, the constructs with strong guide-strand activity are preferred. The molecular scaffolds can be processed in HEK293T cells by NGS to determine guide-passenger ratios, and processing variability.

[0336] To evaluate the molecular scaffolds and modulatory polynucleotides in vivo the molecular scaffolds comprising the modulatory polynucleotides are packaged in AAV (e.g., the serotype may be AAV5 (see e.g., the method and constructs described in WO2015060722, the contents of which are herein incorporated by reference in their entirety)) and administered to an in vivo model and the guide-passenger ratios, 5′ and 3′ end processing, ratio of guide to passenger strands, and knockdown can be determined in different areas of the model (e.g., tissue regions).

[0337] In one embodiment, the selection of a molecular scaffold and modulatory polynucleotide is determined by a method of comparing modulatory polynucleotides in natural pri-miRNA and synthetic pri-miRNA. The modulatory polynucleotide may, but it not limited to, targeting an exon other than exon 1. To evaluate the activities of the modulatory polynucleotides, the molecular scaffold is used with a CBA promoter. In one aspect, the activity may be determined in vitro using HEK293T cells, HeLa cell and a reporter (e.g., Luciferase) and knockdown efficient modulatory polynucleotides showed SOD1 knockdown of at least 80% in the cell tested. Additionally, the modulatory polynucleotides which are considered most efficient showed low to no significant passenger strand (p-strand) activity. In another aspect, the endogenous SOD1 knockdown efficacy is evaluated by transfection in vitro using HEK293T cells, HeLa cell and a reporter. Efficient modulatory polynucleotides show greater than 50% endogenous SOD1 knockdown. In yet another aspect, the endogenous SOD1 knockdown efficacy is evaluated in different cell types (e.g., HEK293, HeLa, primary astrocytes, U251 astrocytes, SH-SY5Y neuron cells and fibroblasts from ALS patients) by infection (e.g., AAV2). Efficient modulatory polynucleotides show greater than 60% endogenous SOD1 knockdown.

[0338] To evaluate the molecular scaffolds and modulatory polynucleotides in vivo the molecular scaffolds comprising the modulatory polynucleotides are packaged in AAV and administered to an in vivo model and the guide-passenger ratios, 5′ and 3′ end processing, ratio of guide to passenger strands, and knockdown can be determined in different areas of the model (e.g., tissue regions). The molecular scaffolds can be processed from in vivo samples by NGS to determine guide-passenger ratios, and processing variability.

[0339] In one embodiment, the modulatory polynucleotide is designed using at least one of the following properties: loop variant, seed mismatch/bulge/wobble variant, stem mismatch, loop variant and vassal stem mismatch variant, seed mismatch and basal stem mismatch variant, stem mismatch and basal stem mismatch variant, seed wobble and basal stem wobble variant, or a stem sequence variant.

[0340] siRNA Molecules

[0341] The present invention relates to RNA interference (RNAi) induced inhibition of gene expression for treating neurodegenerative disorders. Provided herein are siRNA duplexes or encoded dsRNA that target the gene of interest (referred to herein collectively as “siRNA molecules”). Such siRNA duplexes or encoded dsRNA can reduce or silence gene expression in cells, such as but not limited to, medium spiny neurons, cortical neurons and/or astrocytes.

[0342] RNAi (also known as post-transcriptional gene silencing (PTGS), quelling, or co-suppression) is a post-transcriptional gene silencing process in which RNA molecules, in a sequence specific manner, inhibit gene expression, typically by causing the destruction of specific mRNA molecules. The active components of RNAi are short/small double stranded RNAs (dsRNAs), called small interfering RNAs (siRNAs), that typically contain 15-30 nucleotides (e.g., 19 to 25, 19 to 24 or 19-21 nucleotides) and 2 nucleotide 3′ overhangs and that match the nucleic acid sequence of the target gene. These short RNA species may be naturally produced in vivo by Dicer-mediated cleavage of larger dsRNAs and they are functional in mammalian cells.

[0343] Naturally expressed small RNA molecules, named microRNAs (miRNAs), elicit gene silencing by regulating the expression of mRNAs. The miRNAs containing RNA Induced Silencing Complex (RISC) targets mRNAs presenting a perfect sequence complementarity with nucleotides 2-7 in the 5′region of the miRNA which is called the seed region, and other base pairs with its 3′region. miRNA mediated down regulation of gene expression may be caused by cleavage of the target mRNAs, translational inhibition of the target mRNAs, or mRNA decay. miRNA targeting sequences are usually located in the 3′-UTR of the target mRNAs. A single miRNA may target more than 100 transcripts from various genes, and one mRNA may be targeted by different miRNAs.

[0344] siRNA duplexes or dsRNA targeting a specific mRNA may be designed and synthesized in vitro and introduced into cells for activating RNAi processes. Elbashir et al. demonstrated that 21-nucleotide siRNA duplexes (termed small interfering RNAs) were capable of effecting potent and specific gene knockdown without inducing immune response in mammalian cells (Elbashir S M et al., Nature, 2001, 411, 494-498). Since this initial report, post-transcriptional gene silencing by siRNAs quickly emerged as a powerful tool for genetic analysis in mammalian cells and has the potential to produce novel therapeutics.

[0345] RNAi molecules which were designed to target against a nucleic acid sequence that encodes poly-glutamine repeat proteins which cause poly-glutamine expansion diseases such as Huntington's Disease, are described in U.S. Pat. Nos. 9,169,483 and 9,181,544 and International Patent Publication No. WO2015179525, the content of each of which is herein incorporated by reference in their entirety. U.S. Pat. Nos. 9,169,483 and 9,181,544 and International Patent Publication No. WO2015179525 each provide isolated RNA duplexes comprising a first strand of RNA (e.g., 15 contiguous nucleotides) and second strand of RNA (e.g., complementary to at least 12 contiguous nucleotides of the first strand) where the RNA duplex is about 15 to 30 base pairs in length. The first strand of RNA and second strand of RNA may be operably linked by an RNA loop (˜4 to 50 nucleotides) to form a hairpin structure which may be inserted into an expression cassette. Non-limiting examples of loop portions include SEQ ID NO: 9-14 of U.S. Pat. No. 9,169,483, the content of which is herein incorporated by reference in its entirety. Non-limiting examples of strands of RNA which may be used, either full sequence or part of the sequence, to form RNA duplexes include SEQ ID NO: 1-8 of U.S. Pat. No. 9,169,483 and SEQ ID NO: 1-11, 33-59, 208-210, 213-215 and 218-221 of U.S. Pat. No. 9,181,544, the contents of each of which is herein incorporated by reference in its entirety. Non-limiting examples of RNAi molecules include SEQ ID NOs: 1-8 of U.S. Pat. No. 9,169,483, SEQ ID NOs: 1-11, 33-59, 208-210, 213-215 and 218-221 of U.S. Pat. No. 9,181,544 and SEQ ID NOs: 1, 6, 7, and 35-38 of International Patent Publication No. WO2015179525, the contents of each of which is herein incorporated by reference in their entirety.

[0346] In vitro synthetized siRNA molecules may be introduced into cells in order to activate RNAi. An exogenous siRNA duplex, when it is introduced into cells, similar to the endogenous dsRNAs, can be assembled to form the RNA Induced Silencing Complex (RISC), a multiunit complex that interacts with RNA sequences that are complementary to one of the two strands of the siRNA duplex (i.e., the antisense strand). During the process, the sense strand (or passenger strand) of the siRNA is lost from the complex, while the antisense strand (or guide strand) of the siRNA is matched with its complementary RNA. In particular, the targets of siRNA containing RISC complexes are mRNAs presenting a perfect sequence complementarity. Then, siRNA mediated gene silencing occurs by cleaving, releasing and degrading the target.

[0347] The siRNA duplex comprised of a sense strand homologous to the target mRNA and an antisense strand that is complementary to the target mRNA offers much more advantage in terms of efficiency for target RNA destruction compared to the use of the single strand (ss)-siRNAs (e.g. antisense strand RNA or antisense oligonucleotides). In many cases, it requires higher concentration of the ss-siRNA to achieve the effective gene silencing potency of the corresponding duplex.

[0348] Any of the foregoing molecules may be encoded by a viral genome.

[0349] Design and Sequences of siRNA Duplexes Targeting Gene of Interest

[0350] The present invention provides small interfering RNA (siRNA) duplexes (and modulatory polynucleotides encoding them) that target mRNA to interfere with gene expression and/or protein production.

[0351] The encoded siRNA duplex of the present invention contains an antisense strand and a sense strand hybridized together forming a duplex structure, wherein the antisense strand is complementary to the nucleic acid sequence of the targeted gene, and wherein the sense strand is homologous to the nucleic acid sequence of the targeted gene. In some aspects, the 5′end of the antisense strand has a 5′ phosphate group and the 3′end of the sense strand contains a 3′hydroxyl group. In other aspects, there are none, one or 2 nucleotide overhangs at the 3′end of each strand.

[0352] Some guidelines for designing siRNAs have been proposed in the art. These guidelines generally recommend generating a 19-nucleotide duplexed region, symmetric 2-3 nucleotide 3′overhangs, 5′-phosphate and 3′-hydroxyl groups targeting a region in the gene to be silenced. Other rules that may govern siRNA sequence preference include, but are not limited to, (i) A/U at the 5′ end of the antisense strand; (ii) G/C at the 5′ end of the sense strand; (iii) at least five A/U residues in the 5′ terminal one-third of the antisense strand; and (iv) the absence of any GC stretch of more than 9 nucleotides in length. In accordance with such consideration, together with the specific sequence of a target gene, highly effective siRNA molecules essential for suppressing mammalian target gene expression may be readily designed.

[0353] According to the present invention, siRNA molecules (e.g., siRNA duplexes or encoded dsRNA) that target the gene of interest are designed. Such siRNA molecules can specifically, suppress gene expression and protein production. In some aspects, the siRNA molecules are designed and used to selectively “knock out” gene variants in cells, i.e., mutated transcripts. In some aspects, the siRNA molecules are designed and used to selectively “knock down” gene variants in cells. In other aspects, the siRNA molecules are able to inhibit or suppress both the wild type and mutated version of the gene of interest.

[0354] In one embodiment, an siRNA molecule of the present invention comprises a sense strand and a complementary antisense strand in which both strands are hybridized together to form a duplex structure. The antisense strand has sufficient complementarity to the target mRNA sequence to direct target-specific RNAi, i.e., the siRNA molecule has a sequence sufficient to trigger the destruction of the target mRNA by the RNAi machinery or process.

[0355] In one embodiment, an siRNA molecule of the present invention comprises a sense strand and a complementary antisense strand in which both strands are hybridized together to form a duplex structure and where the start site of the hybridization to the mRNA is between nucleotide 10 and 1000 on the target mRNA sequence. As a non-limiting example, the start site may be between nucleotide 10-20, 20-30, 30-40, 40-50, 60-70, 70-80, 80-90, 90-100, 100-150, 150-200, 200-250, 250-300, 300-350, 350-400, 400-450, 450-500, 500-550, 550-600, 600-650, 650-700, 700-70, 750-800, 800-850, 850-900, 900-950, 950-1000, on the target mRNA sequence. As yet another non-limiting example, the start site may be nucleotide 10, 11, 12, 13, 14, 15, 16, 17, 18, 19, 20, 21, 22, 23, 24, 25, 26, 27, 28, 29, 30, 31, 32, 33, 34, 35, 36, 37, 38, 39, 40, 41, 42, 43, 44, 45, 46, 47, 48, 49, 50, 51, 52, 53, 54, 55, 56, 57, 58, 59, 60, 61, 62, 63, 64, 65, 66, 67, 68, 69, 70, 71, 72, 73, 74, 75, 76, 77, 78, 79, 80, 81, 82, 83, 84, 85, 86, 87, 88, 89, 90, 91, 92, 93, 94, 95, 96, 97, 98, 99, 100, 101, 102, 103, 104, 105, 106, 107, 108, 109, 110, 111, 112, 113, 114, 115, 116, 117, 118, 119, 120, 121, 122, 123, 124, 125, 126, 127, 128, 129, 130, 131, 132, 133, 134, 135, 136, 137, 138, 139, 140, 141, 142, 143, 144, 145, 146, 147, 148, 149, 150, 151, 152, 153, 154, 155, 156, 157, 158, 159, 160, 161, 162, 163, 164, 165, 166, 167, 168, 169, 170, 171, 172, 173, 174, 175, 176, 177, 178, 179, 180, 181, 182, 183, 184, 185, 186, 187, 188, 189, 190, 191, 192, 193, 194, 195, 196, 197, 198, 199, 200, 201, 202, 203, 204, 205, 206, 207, 208, 209, 210, 211, 212, 213, 214, 215, 216, 217, 218, 219, 220, 221, 222, 223, 224, 225, 226, 227, 228, 229, 230, 231, 232, 233, 234, 235, 236, 237, 238, 239, 240, 241, 242, 243, 244, 245, 246, 247, 248, 249, 250, 251, 252, 253, 254, 255, 256, 257, 258, 259, 260, 261, 262, 263, 264, 265, 266, 267, 268, 269, 270, 271, 272, 273, 274, 275, 276, 277, 278, 279, 280, 281, 282, 283, 284, 285, 286, 287, 288, 289, 290, 291, 292, 293, 294, 295, 296, 297, 298, 299, 300, 301, 302, 303, 304, 305, 306, 307, 308, 309, 310, 311, 312, 313, 314, 315, 316, 317, 318, 319, 320, 321, 322, 323, 324, 325, 326, 327, 328, 329, 330, 331, 332, 333, 334, 335, 336, 337, 338, 339, 340, 341, 342, 343, 344, 345, 346, 347, 348, 349, 350, 351, 352, 353, 354, 355, 356, 357, 358, 359, 360, 361, 362, 363, 364, 365, 366, 367, 368, 369, 370, 371, 372, 373, 374, 375, 376, 377, 378, 379, 380, 381, 382, 383, 384, 385, 386, 387, 388, 389, 390, 391, 392, 393, 394, 395, 396, 397, 398, 399, 400, 401, 402, 403, 404, 405, 406, 407, 408, 409, 410, 411, 412, 413, 414, 415, 416, 417, 418, 419, 420, 421, 422, 423, 424, 425, 426, 427, 428, 429, 430, 431, 432, 433, 434, 435, 436, 437, 438, 439, 440, 441, 442, 443, 444, 445, 446, 447, 448, 449, 450, 451, 452, 453, 454, 455, 456, 457, 458, 459, 460, 461, 462, 463, 464, 465, 466, 467, 468, 469, 470, 471, 472, 473, 474, 475, 476, 477, 478, 479, 480, 481, 482, 483, 484, 485, 486, 487, 488, 489, 490, 491, 492, 493, 494, 495, 496, 497, 498, 499, 500, 501, 502, 503, 504, 505, 506, 507, 508, 509, 510, 511, 512, 513, 514, 515, 516, 517, 518, 519, 520, 521, 522, 523, 524, 525, 526, 527, 528, 529, 530, 531, 532, 533, 534, 535, 536, 537, 538, 539, 540, 541, 542, 543, 544, 545, 546, 547, 548, 549, 550, 551, 552, 553, 554, 555, 556, 557, 558, 559, 560, 561, 562, 563, 564, 565, 566, 567, 568, 569, 570, 571, 572, 573, 574, 575, 576, 577, 578, 579, 580, 581, 582, 583, 584, 585, 586, 587, 588, 589, 590, 591, 592, 593, 594, 595, 596, 597, 598, 599, 600, 601, 602, 603, 604, 605, 606, 607, 608, 609, 610, 611, 612, 613, 614, 615, 616, 617, 618, 619, 620, 621, 622, 623, 624, 625, 626, 627, 628, 629, 630, 631, 632, 633, 634, 635, 636, 637, 638, 639, 640, 641, 642, 643, 644, 645, 646, 647, 648, 649, 650, 651, 652, 653, 654, 655, 656, 657, 658, 659, 660, 661, 662, 663, 664, 665, 666, 667, 668, 669, 670, 671, 672, 673, 674, 675, 676, 677, 678, 679, 680, 681, 682, 683, 684, 685, 686, 687, 688, 689, 690, 691, 692, 693, 694, 695, 696, 697, 698, 699, 700, 701, 702, 703, 704, 705, 706, 707, 708, 709, 710, 711, 712, 713, 714, 715, 716, 717, 718, 719, 720, 721, 722, 723, 724, 725, 726, 727, 728, 729, 730, 731, 732, 733, 734, 735, 736, 737, 738, 739, 740, 741, 742, 743, 744, 745, 746, 747, 748, 749, 750, 751, 752, 753, 754, 755, 756, 757, 758, 759, 760, 761, 762, 763, 764, 765, 766, 767, 768, 769, 770, 771, 772, 773, 774, 775, 776, 777, 778, 779, 780, 781, 782, 783, 784, 785, 786, 787, 788, 789, 790, 791, 792, 793, 794, 795, 796, 797, 798, 799, 800, 801, 802, 803, 804, 805, 806, 807, 808, 809, 810, 811, 812, 813, 814, 815, 816, 817, 818, 819, 820, 821, 822, 823, 824, 825, 826, 827, 828, 829, 830, 831, 832, 833, 834, 835, 836, 837, 838, 839, 840, 841, 842, 843, 844, 845, 846, 847, 848, 849, 850, 851, 852, 853, 854, 855, 856, 857, 858, 859, 860, 861, 862, 863, 864, 865, 866, 867, 868, 869, 870, 871, 872, 873, 874, 875, 876, 877, 878, 879, 880, 881, 882, 883, 884, 885, 886, 887, 888, 889, 890, 891, 892, 893, 894, 895, 896, 897, 898, 899, 900, 901, 902, 903, 904, 905, 906, 907, 908, 909, 910, 911, 912, 913, 914, 915, 916, 917, 918, 919, 920, 921, 922, 923, 924, 925, 926, 927, 928, 929, 930, 931, 932, 933, 934, 935, 936, 937, 938, 939, 940, 941, 942, 943, 944, 945, 946, 947, 948, 949, 950, 951, 952, 953, 954, 955, 956, 957, 958, 959, 960, 961, 962, 963, 964, 965, 966, 967, 968, 969, 970, 971, 972, 973, 974, 975, 976, 977, 978, 979, 980, 981, 982, 983, 984, 985, 986, 987, 988, 989, 990, 991, 992, 993, 994, 995, 996, 997, 998, 999, and 1000 on the target mRNA sequence.

[0356] In some embodiments, the antisense strand and target mRNA sequences have 100% complementarity. The antisense strand may be complementary to any part of the target mRNA sequence.

[0357] In other embodiments, the antisense strand and target mRNA sequences comprise at least one mismatch. As a non-limiting example, the antisense strand and the target mRNA sequence have at least 30%, 40%, 50%, 60%, 70%, 80%, 81%, 82%, 83%, 84%, 85%, 86%, 87%, 88%, 89%, 90%, 91%, 92%, 93%, 94%, 95%, 96%, 97%, 98% or 99% or at least 20-30%, 20-40%, 20-50%, 20-60%, 20-70%, 20-80%, 20-90%, 20-95%, 20-99%, 30-40%, 30-50%, 30-60%, 30-70%, 30-80%, 30-90%, 30-95%, 30-99%, 40-50%, 40-60%, 40-70%, 40-80%, 40-90%, 40-95%, 40-99%, 50-60%, 50-70%, 50-80%, 50-90%, 50-95%, 50-99%, 60-70%, 60-80%, 60-90%, 60-95%, 60-99%, 70-80%, 70-90%, 70-95%, 70-99%, 80-90%, 80-95%, 80-99%, 90-95%, 90-99% or 95-99% complementarity.

[0358] In one embodiment, an siRNA or dsRNA includes at least two sequences that are complementary to each other.

[0359] According to the present invention, the siRNA molecule has a length from about 10-50 or more nucleotides, i.e., each strand comprising 10-50 nucleotides (or nucleotide analogs). Preferably, the siRNA molecule has a length from about 15-30, e.g., 15, 16, 17, 18, 19, 20, 21, 22, 23, 24, 25, 26, 27, 28, 29, or 30 nucleotides in each strand, wherein one of the strands is sufficiently complementarity to a target region. In one embodiment, each strand of the siRNA molecule has a length from about 19 to 25, 19 to 24 or 19 to 21 nucleotides. In one embodiment, at least one strand of the siRNA molecule is 19 nucleotides in length. In one embodiment, at least one strand of the siRNA molecule is 20 nucleotides in length. In one embodiment, at least one strand of the siRNA molecule is 21 nucleotides in length. In one embodiment, at least one strand of the siRNA molecule is 22 nucleotides in length. In one embodiment, at least one strand of the siRNA molecule is 23 nucleotides in length. In one embodiment, at least one strand of the siRNA molecule is 24 nucleotides in length. In one embodiment, at least one strand of the siRNA molecule is 25 nucleotides in length.

[0360] In some embodiments, the siRNA molecules of the present invention can be synthetic RNA duplexes comprising about 19 nucleotides to about 25 nucleotides, and two overhanging nucleotides at the 3′-end. In some aspects, the siRNA molecules may be unmodified RNA molecules. In other aspects, the siRNA molecules may contain at least one modified nucleotide, such as base, sugar or backbone modifications.

[0361] In one embodiment, the siRNA molecules of the present invention may comprise an antisense sequence and a sense sequence, or a fragment or variant thereof. As a non-limiting example, the antisense sequence and the sense sequence have at least 30%, 40%, 50%, 60%, 70%, 80%, 81%, 82%, 83%, 84%, 85%, 86%, 87%, 88%, 89%, 90%, 91%, 92%, 93%, 94%, 95%, 96%, 97%, 98% or 99% or at least 20-30%, 20-40%, 20-50%, 20-60%, 20-70%, 20-80%, 20-90%, 20-95%, 20-99%, 30-40%, 30-50%, 30-60%, 30-70%, 30-80%, 30-90%, 30-95%, 30-99%, 40-50%, 40-60%, 40-70%, 40-80%, 40-90%, 40-95%, 40-99%, 50-60%, 50-70%, 50-80%, 50-90%, 50-95%, 50-99%, 60-70%, 60-80%, 60-90%, 60-95%, 60-99%, 70-80%, 70-90%, 70-95%, 70-99%, 80-90%, 80-95%, 80-99%, 90-95%, 90-99% or 95-99% complementarity.

[0362] In other embodiments, the siRNA molecules of the present invention can be encoded in plasmid vectors, AAV particles, viral genome or other nucleic acid expression vectors for delivery to a cell. DNA expression plasmids can be used to stably express the siRNA duplexes or dsRNA of the present invention in cells and achieve long-term inhibition of the target gene expression. In one aspect, the sense and antisense strands of a siRNA duplex are typically linked by a short spacer sequence leading to the expression of a stem-loop structure termed short hairpin RNA (shRNA). The hairpin is recognized and cleaved by Dicer, thus generating mature siRNA molecules. According to the present invention, AAV particles comprising the nucleic acids encoding the siRNA molecules targeting the mRNA are produced, the AAV serotypes may be any of the serotypes listed in Table 1. Non-limiting examples of the AAV serotypes include, AAV1, AAV2, AAV3, AAV4, AAV5, AAV6, AAV7, AAV8, AAV9, AAV9.47, AAV9(hu14), AAV10, AAV11, AAV12, AAVrh8, AAVrh10, AAV-DJ8, AAV-DJ, AAV-PHP.A, AAV-PHP.B, AAVPHP.B2, AAVPHP.B3, AAVPHP.N/PHP.B-DGT, AAVPHP.B-EST, AAVPHP.B-GGT, AAVPHP.B-ATP, AAVPHP.B-ATT-T, AAVPHP.B-DGT-T, AAVPHP.B-GGT-T, AAVPHP.B-SGS, AAVPHP.B-AQP, AAVPHP.B-QQP, AAVPHP.B-SNP(3), AAVPHP.B-SNP, AAVPHP.B-QGT, AAVPHP.B-NQT, AAVPHP.B-EGS, AAVPHP.B-SGN, AAVPHP.B-EGT, AAVPHP.B-DST, AAVPHP.B-DST, AAVPHP.B-STP, AAVPHP.B-PQP, AAVPHP.B-SQP, AAVPHP.B-QLP, AAVPHP.B-TMP, AAVPHP.B-TTP, AAVPHP.S/G2A12, AAVG2A15/G2A3, AAVG2B4, AAVG2B5, and variants thereof.

[0363] In some embodiments, the siRNA duplexes or encoded dsRNA of the present invention suppress (or degrade) the target mRNA. Accordingly, the siRNA duplexes or encoded dsRNA can be used to substantially inhibit the gene expression in a cell, for example a neuron. In some aspects, the inhibition of the gene expression refers to an inhibition by at least about 20%, preferably by at least about 30%, 40%, 41%, 42%, 43%, 44%, 45%, 46%, 47%, 48%, 49%, 50%, 51%, 52%, 53%, 54%, 55%, 56%, 57%, 58%, 59%, 60%, 70%, 71%, 72%, 73%, 74%, 75%, 76%, 77%, 78%, 79%, 80%, 81%, 82%, 83%, 84%, 85%, 90%, 95% and 100%, or at least 20-30%, 20-40%, 20-50%, 20-60%, 20-70%, 20-80%, 20-90%, 20-95%, 20-100%, 30-40%, 30-50%, 30-60%, 30-70%, 30-80%, 30-90%, 30-95%, 30-100%, 40-50%, 40-60%, 40-70%, 40-80%, 40-90%, 40-95%, 40-100%, 45-50%, 45-55%, 50-60%, 50-70%, 50-80%, 50-90%, 50-95%, 50-100%, 60-70%, 60-80%, 60-90%, 60-95%, 60-100%, 70-80%, 70-90%, 70-95%, 70-100%, 80-90%, 80-95%, 80-100%, 90-95%, 90-100% or 95-100%. Accordingly, the protein product of the targeted gene may be inhibited by at least about 20%, preferably by at least about 30%, 40%, 41%, 42%, 43%, 44%, 45%, 46%, 47%, 48%, 49%, 50%, 51%, 52%, 53%, 54%, 55%, 56%, 57%, 58%, 59%, 60%, 70%, 71%, 72%, 73%, 74%, 75%, 76%, 77%, 78%, 79%, 80%, 81%, 82%, 83%, 84%, 85%, 90%, 95% and 100%, or at least 20-30%, 20-40%, 20-50%, 20-60%, 20-70%, 20-80%, 20-90%, 20-95%, 20-100%, 30-40%, 30-50%, 30-60%, 30-70%, 30-80%, 30-90%, 30-95%, 30-100%, 40-50%, 40-60%, 40-70%, 40-80%, 40-90%, 40-95%, 40-100%, 45-50%, 45-55%, 50-60%, 50-70%, 50-80%, 50-90%, 50-95%, 50-100%, 60-70%, 60-80%, 60-90%, 60-95%, 60-100%, 70-80%, 70-90%, 70-95%, 70-100%, 80-90%, 80-95%, 80-100%, 90-95%, 90-100% or 95-100%.

[0364] In one embodiment, the siRNA duplexes or encoded dsRNA of the present invention suppress (or degrade) the target mRNA in spinal cord motor neurons. In some aspects, the inhibition of the gene expression refers to an inhibition by at least about 20%, preferably by at least about 30%, 40%, 41%, 42%, 43%, 44%, 45%, 46%, 47%, 48%, 49%, 50%, 51%, 52%, 53%, 54%, 55%, 56%, 57%, 58%, 59%, 60%, 70%, 71%, 72%, 73%, 74%, 75%, 76%, 77%, 78%, 79%, 80%, 81%, 82%, 83%, 84%, 85%, 90%, 95% and 100%, or at least 20-30%, 20-40%, 20-50%, 20-60%, 20-70%, 20-80%, 20-90%, 20-95%, 20-100%, 30-40%, 30-50%, 30-60%, 30-70%, 30-80%, 30-90%, 30-95%, 30-100%, 40-50%, 40-60%, 40-70%, 40-80%, 40-90%, 40-95%, 40-100%, 45-50%, 45-55%, 50-60%, 50-70%, 50-80%, 50-90%, 50-95%, 50-100%, 60-70%, 60-80%, 60-90%, 60-95%, 60-100%, 70-80%, 70-90%, 70-95%, 70-100%, 80-90%, 80-95%, 80-100%, 90-95%, 90-100% or 95-100%.

[0365] Accordingly, the protein product of the targeted gene may be inhibited by at least about 20%, preferably by at least about 30%, 40%, 41%, 42%, 43%, 44%, 45%, 46%, 47%, 48%, 49%, 50%, 51%, 52%, 53%, 54%, 55%, 56%, 57%, 58%, 59%, 60%, 70%, 71%, 72%, 73%, 74%, 75%, 76%, 77%, 78%, 79%, 80%, 81%, 82%, 83%, 84%, 85%, 90%, 95% and 100%, or at least 20-30%, 20-40%, 20-50%, 20-60%, 20-70%, 20-80%, 20-90%, 20-95%, 20-100%, 30-40%, 30-50%, 30-60%, 30-70%, 30-80%, 30-90%, 30-95%, 30-100%, 40-50%, 40-60%, 40-70%, 40-80%, 40-90%, 40-95%, 40-100%, 45-50%, 45-55%, 50-60%, 50-70%, 50-80%, 50-90%, 50-95%, 50-100%, 60-70%, 60-80%, 60-90%, 60-95%, 60-100%, 70-80%, 70-90%, 70-95%, 70-100%, 80-90%, 80-95%, 80-100%, 90-95%, 90-100% or 95-100%.

[0366] In one embodiment, the siRNA duplexes or encoded dsRNA of the present invention suppress (or degrade) the target mRNA in spinal cord motor neurons by 78%.

[0367] In one embodiment, the siRNA duplexes or encoded dsRNA of the present invention suppress (or degrade) the target mRNA in spinal cord motor neurons by 45-55%.

[0368] In one embodiment, the siRNA duplexes or encoded dsRNA of the present invention suppress (or degrade) the target mRNA in vg+ cells of motor neuron morphology. In some aspects, the inhibition of the gene expression refers to an inhibition by at least about 20%, preferably by at least about 30%, 40%, 41%, 42%, 43%, 44%, 45%, 46%, 47%, 48%, 49%, 50%, 51%, 52%, 53%, 54%, 55%, 56%, 57%, 58%, 59%, 60%, 70%, 71%, 72%, 73%, 74%, 75%, 76%, 77%, 78%, 79%, 80%, 81%, 82%, 83%, 84%, 85%, 90%, 95% and 100%, or at least 20-30%, 20-40%, 20-50%, 20-60%, 20-70%, 20-80%, 20-90%, 20-95%, 20-100%, 30-40%, 30-50%, 30-60%, 30-70%, 30-80%, 30-90%, 30-95%, 30-100%, 40-50%, 40-60%, 40-70%, 40-80%, 40-90%, 40-95%, 40-100%, 45-50%, 45-55%, 50-60%, 50-70%, 50-80%, 50-90%, 50-95%, 50-100%, 60-70%, 60-80%, 60-90%, 60-95%, 60-100%, 70-80%, 70-90%, 70-95%, 70-100%, 80-90%, 80-95%, 80-100%, 90-95%, 90-100% or 95-100%. Accordingly, the protein product of the targeted gene may be inhibited by at least about 20%, preferably by at least about 30%, 40%, 41%, 42%, 43%, 44%, 45%, 46%, 47%, 48%, 49%, 50%, 51%, 52%, 53%, 54%, 55%, 56%, 57%, 58%, 59%, 60%, 70%, 71%, 72%, 73%, 74%, 75%, 76%, 77%, 78%, 79%, 80%, 81%, 82%, 83%, 84%, 85%, 90%, 95% and 100%, or at least 20-30%, 20-40%, 20-50%, 20-60%, 20-70%, 20-80%, 20-90%, 20-95%, 20-100%, 30-40%, 30-50%, 30-60%, 30-70%, 30-80%, 30-90%, 30-95%, 30-100%, 40-50%, 40-60%, 40-70%, 40-80%, 40-90%, 40-95%, 40-100%, 45-50%, 45-55%, 50-60%, 50-70%, 50-80%, 50-90%, 50-95%, 50-100%, 60-70%, 60-80%, 60-90%, 60-95%, 60-100%, 70-80%, 70-90%, 70-95%, 70-100%, 80-90%, 80-95%, 80-100%, 90-95%, 90-100% or 95-100%.

[0369] In one embodiment, the siRNA duplexes or encoded dsRNA of the present invention suppress (or degrade) the target mRNA in vg+ cells of motor neuron morphology by 53%.

[0370] In one embodiment, the siRNA molecules comprise a miRNA seed match for the target located in the guide strand. In another embodiment, the siRNA molecules comprise a miRNA seed match for the target located in the passenger strand. In yet another embodiment, the siRNA duplexes or encoded dsRNA targeting the gene of interest do not comprise a seed match for the target located in the guide or passenger strand.

[0371] In one embodiment, the siRNA duplexes or encoded dsRNA targeting the gene of interest may have almost no significant full-length off target effects for the guide strand. In another embodiment, the siRNA duplexes or encoded dsRNA targeting the gene of interest may have almost no significant full-length off target effects for the passenger strand. The siRNA duplexes or encoded dsRNA targeting the gene of interest may have less than 1%, 2%, 3%, 4%, 5%, 6%, 7%, 8%, 9%, 10%, 11%, 12%, 13%, 14%, 15%, 20%, 25%, 30%, 35%, 40%, 45%, 50%, 1-5%, 2-6%, 3-7%, 4-8%, 5-9%, 5-10%, 6-10%, 5-15%, 5-20%, 5-25% 5-30%, 10-20%, 10-30%, 10-40%, 10-50%, 15-30%, 15-40%, 15-45%, 20-40%, 20-50%, 25-50%, 30-40%, 30-50%, 35-50%, 40-50%, 45-50% full-length off target effects for the passenger strand. In yet another embodiment, the siRNA duplexes or encoded dsRNA targeting the gene of interest may have almost no significant full-length off target effects for the guide strand or the passenger strand. The siRNA duplexes or encoded dsRNA targeting the gene of interest may have less than 1%, 2%, 3%, 4%, 5%, 6%, 7%, 8%, 9%, 10%, 11%, 12%, 13%, 14%, 15%, 20%, 25%, 30%, 35%, 40%, 45%, 50%, 1-5%, 2-6%, 3-7%, 4-8%, 5-9%, 5-10%, 6-10%, 5-15%, 5-20%, 5-25% 5-30%, 10-20%, 10-30%, 10-40%, 10-50%, 15-30%, 15-40%, 15-45%, 20-40%, 20-50%, 25-50%, 30-40%, 30-50%, 35-50%, 40-50%, 45-50% full-length off target effects for the guide or passenger strand.

[0372] In one embodiment, the siRNA duplexes or encoded dsRNA targeting the gene of interest may have high activity in vitro. In another embodiment, the siRNA molecules may have low activity in vitro.

[0373] In yet another embodiment, the siRNA duplexes or dsRNA targeting the gene of interest may have high guide strand activity and low passenger strand activity in vitro.

[0374] In one embodiment, the siRNA molecules have a high guide strand activity and low passenger strand activity in vitro. The target knock-down (KD) by the guide strand may be at least 40%, 50%, 60%, 65%, 70%, 75%, 80%, 85%, 90%, 95%, 99%, 99.5% or 100%. The target knock-down by the guide strand may be 40-50%, 45-50%, 50-55%, 50-60%, 60-65%, 60-70%, 60-75%, 60-80%, 60-85%, 60-90%, 60-95%, 60-99%, 60-99.5%, 60-100%, 65-70%, 65-75%, 65-80%, 65-85%, 65-90%, 65-95%, 65-99%, 65-99.5%, 65-100%, 70-75%, 70-80%, 70-85%, 70-90%, 70-95%, 70-99%, 70-99.5%, 70-100%, 75-80%, 75-85%, 75-90%, 75-95%, 75-99%, 75-99.5%, 75-100%, 80-85%, 80-90%, 80-95%, 80-99%, 80-99.5%, 80-100%, 85-90%, 85-95%, 85-99%, 85-99.5%, 85-100%, 90-95%, 90-99%, 90-99.5%, 90-100%, 95-99%, 95-99.5%, 95-100%, 99-99.5%, 99-100% or 99.5-100%. As a non-limiting example, the target knock-down (KD) by the guide strand is greater than 70%. As a non-limiting example, the target knock-down (KD) by the guide strand is greater than 60%.

[0375] In one embodiment, the siRNA duplex is designed so there is no miRNA seed match for the sense or antisense sequence to the non-gene of interest sequence.

[0376] In one embodiment, the IC₅₀ of the guide strand for the nearest off target is greater than 100 multiplied by the IC₅₀ of the guide strand for the on-target gene. As a non-limiting example, if the IC₅₀ of the guide strand for the nearest off target is greater than 100 multiplied by the IC₅₀ of the guide strand for the target then the siRNA molecule is said to have high guide strand selectivity for inhibiting the gene of interest in vitro.

[0377] In one embodiment, the 5′ processing of the guide strand has a correct start (n) at the 5′ end at least 75%, 80%, 85%, 90%, 95%, 99% or 100% of the time in vitro or in vivo. As a non-limiting example, the 5′ processing of the guide strand is precise and has a correct start (n) at the 5′ end at least 99% of the time in vitro. As a non-limiting example, the 5′ processing of the guide strand is precise and has a correct start (n) at the 5′ end at least 99% of the time in vivo. As a non-limiting example, the 5′ processing of the guide strand is precise and has a correct start (n) at the 5′ end at least 90% of the time in vitro. As a non-limiting example, the 5′ processing of the guide strand is precise and has a correct start (n) at the 5′ end at least 90% of the time in vivo. As a non-limiting example, the 5′ processing of the guide strand is precise and has a correct start (n) at the 5′ end at least 85% of the time in vitro. As a non-limiting example, the 5′ processing of the guide strand is precise and has a correct start (n) at the 5′ end at least 85% of the time in vivo.

[0378] In one embodiment, the guide to passenger (G:P) (also referred to as the antisense to sense) strand ratio expressed is 1:10, 1:9, 1:8, 1:7, 1:6, 1:5, 1:4, 1:3, 1:2, 1:1, 2:10, 2:9, 2:8, 2:7, 2:6, 2:5, 2:4, 2:3, 2:2, 2:1, 3:10, 3:9, 3:8, 3:7, 3:6, 3:5, 3:4, 3:3, 3:2, 3:1, 4:10, 4:9, 4:8, 4:7, 4:6, 4:5, 4:4, 4:3, 4:2, 4:1, 5:10, 5:9, 5:8, 5:7, 5:6, 5:5, 5:4, 5:3, 5:2, 5:1, 6:10, 6:9, 6:8, 6:7, 6:6, 6:5, 6:4, 6:3, 6:2, 6:1, 7:10, 7:9, 7:8, 7:7, 7:6, 7:5, 7:4, 7:3, 7:2, 7:1, 8:10, 8:9, 8:8, 8:7, 8:6, 8:5, 8:4, 8:3, 8:2, 8:1, 9:10, 9:9, 9:8, 9:7, 9:6, 9:5, 9:4, 9:3, 9:2, 9:1, 10:10, 10:9, 10:8, 10:7, 10:6, 10:5, 10:4, 10:3, 10:2, 10:1, 1:99, 5:95, 10:90, 15:85, 20:80, 25:75, 30:70, 35:65, 40:60, 45:55, 50:50, 55:45, 60:40, 65:35, 70:30, 75:25, 80:20, 85:15, 90:10, 95:5, or 99:1 in vitro or in vivo. The guide to passenger ratio refers to the ratio of the guide strands to the passenger strands after intracellular processing of the pri-microRNA. For example, a 80:20 guide-to-passenger ratio would have 8 guide strands to every 2 passenger strands processed from the precursor. As a non-limiting example, the guide-to-passenger strand ratio is 8:2 in vitro. As a non-limiting example, the guide-to-passenger strand ratio is 8:2 in vivo. As a non-limiting example, the guide-to-passenger strand ratio is 9:1 in vitro. As a non-limiting example, the guide-to-passenger strand ratio is 9:1 in vivo.

[0379] In one embodiment, the guide to passenger (G:P) strand ratio is in a range of 1-99, 1.3-99, 5-99, 10-99, 15-99, 20-99, 25-99, 30-99, 35-99, 40-99, 45-99, 50-99, 55-99, 60-99, 65-99, 70-99, 75-99, 80-99, 85-99, 90-99, 95-99, 1-10, 1-15, 1-20, 1-25, 1-30, 1-35, 1-40, 1-45, 1-50, 1-55, 1-60, 1-65, 1-70, 1-75, 1-80, 1-85, 1-90, 1-95, 5-10, 5-15, 5-20, 5-25, 5-30, 5-35, 5-40, 5-45, 5-50, 5-55, 5-60, 5-65, 5-70, 5-75, 5-80, 5-85, 5-90, 5-95, 10-15, 10-20, 10-25, 10-30, 10-35, 10-40, 10-45, 10-50, 10-55, 10-60, 10-65, 10-70, 10-75, 10-80, 10-85, 10-90, 10-95, 15-20, 15-25, 15-30, 15-35, 15-40, 15-45, 15-50, 15-55, 15-60, 15-65, 15-70, 15-75, 15-80, 15-85, 15-90, 15-95, 20-25, 20-30, 20-35, 20-40, 20-45, 20-50, 20-55, 20-60, 20-65, 20-70, 20-75, 20-80, 20-85, 20-90, 20-95, 25-30, 25-35, 25-40, 25-45, 25-50, 25-55, 25-60, 25-65, 25-70, 25-75, 25-80, 25-85, 25-90, 25-95, 30-35, 30-40, 30-45, 30-50, 30-55, 30-60, 30-65, 30-70, 30-75, 30-80, 30-85, 30-90, 30-95, 35-40, 35-45, 35-50, 35-55, 35-60, 35-65, 35-70, 35-75, 35-80, 35-85, 35-90, 35-95, 40-45, 40-50, 40-55, 40-60, 40-65, 40-70, 40-75, 40-80, 40-85, 40-90, 40-95, 45-50, 45-55, 45-60, 45-65, 45-70, 45-75, 45-80, 45-85, 45-90, 45-95, 50-55, 50-60, 50-65, 50-70, 50-75, 50-80, 50-85, 50-90, 50-95, 55-60, 55-65, 55-70, 55-75, 55-80, 55-85, 55-90, 55-95, 60-65, 60-70, 60-75, 60-80, 60-85, 60-90, 60-95, 65-70, 65-75, 65-80, 65-85, 65-90, 65-95, 70-75, 70-80, 70-85, 70-90, 70-95, 75-80, 75-85, 75-90, 75-95, 80-85, 80-90, 80-95, 85-90, 85-95, or 90-95. As a non-limiting example, the guide to passenger ratio is a range of 1.3 to 99. As a non-limiting example, the guide to passenger ratio is a range of 10 to 99.

[0380] In one embodiment, the guide to passenger (G:P) strand ratio is 10, 10.5, 11, 11.5, 12, 12.5, 13, 13.5, 14, 14.5, 15, 15.5, 16, 16.5, 17, 17.5, 18, 18.5, 19, 19.5, 20, 20.5, 21, 21.5, 22, 22.5, 23, 23.5, 24, 24.5, 25, 25.5, 26, 26.5, 27, 27.5, 28, 28.5, 29, 29.5, 30, 30.5, 31, 31.5, 32, 32.5, 33, 33.5, 34, 34.5, 35, 35.5, 36, 36.5, 37, 37.5, 38, 38.5, 39, 39.5, 40, 40.5, 41, 41.5, 42, 42.5, 43, 43.5, 44, 44.5, 45, 45.5, 46, 46.5, 47, 47.5, 48, 48.5, 49, 49.5, 50, 50.5, 51, 51.5, 52, 52.5, 53, 53.5, 54, 54.5, 55, 55.5, 56, 56.5, 57, 57.5, 58, 58.5, 59, 59.5, 60, 60.5, 61, 61.5, 62, 62.5, 63, 63.5, 64, 64.5, 65, 65.5, 66, 66.5, 67, 67.5, 68, 68.5, 69, 69.5, 70, 70.5, 71, 71.5, 72, 72.5, 73, 73.5, 74, 74.5, 75, 75.5, 76, 76.5, 77, 77.5, 78, 78.5, 79, 79.5, 80, 80.5, 81, 81.5, 82, 82.5, 83, 83.5, 84, 84.5, 85, 85.5, 86, 86.5, 87, 87.5, 88, 88.5, 89, 89.5, 90, 90.5, 91, 91.5, 92, 92.5, 93, 93.5, 94, 94.5, 95, 95.5, 96, 96.5, 97, 97.5, 98, 98.5, or 99. As a non-limiting example, the guide to passenger (G:P) strand ratio is 11.5.

[0381] As a non-limiting example, the guide to passenger (G:P) strand ratio is 99.

[0382] In one embodiment, the guide to passenger (G:P) (also referred to as the antisense to sense) strand ratio expressed is greater than 1.

[0383] In one embodiment, the guide to passenger (G:P) (also referred to as the antisense to sense) strand ratio expressed is greater than 2.

[0384] In one embodiment, the guide to passenger (G:P) (also referred to as the antisense to sense) strand ratio expressed is greater than 5.

[0385] In one embodiment, the guide to passenger (G:P) (also referred to as the antisense to sense) strand ratio expressed is greater than 10.

[0386] In one embodiment, the guide to passenger (G:P) (also referred to as the antisense to sense) strand ratio expressed is greater than 20.

[0387] In one embodiment, the guide to passenger (G:P) (also referred to as the antisense to sense) strand ratio expressed is greater than 50.

[0388] In one embodiment, the guide to passenger (G:P) (also referred to as the antisense to sense) strand ratio expressed is at least 3:1.

[0389] In one embodiment, the guide to passenger (G:P) (also referred to as the antisense to sense) strand ratio expressed is at least 5:1.

[0390] In one embodiment, the guide to passenger (G:P) (also referred to as the antisense to sense) strand ratio expressed is at least 10:1.

[0391] In one embodiment, the guide to passenger (G:P) (also referred to as the antisense to sense) strand ratio expressed is at least 20:1.

[0392] In one embodiment, the guide to passenger (G:P) (also referred to as the antisense to sense) strand ratio expressed is at least 50:1.

[0393] In one embodiment, the passenger to guide (P:G) (also referred to as the sense to antisense) strand ratio expressed is 1:10, 1:9, 1:8, 1:7, 1:6, 1:5, 1:4, 1:3, 1:2, 1:1, 2:10, 2:9, 2:8, 2:7, 2:6, 2:5, 2:4, 2:3, 2:2, 2:1, 3:10, 3:9, 3:8, 3:7, 3:6, 3:5, 3:4, 3:3, 3:2, 3:1, 4:10, 4:9, 4:8, 4:7, 4:6, 4:5, 4:4, 4:3, 4:2, 4:1, 5:10, 5:9, 5:8, 5:7, 5:6, 5:5, 5:4, 5:3, 5:2, 5:1, 6:10, 6:9, 6:8, 6:7, 6:6, 6:5, 6:4, 6:3, 6:2, 6:1, 7:10, 7:9, 7:8, 7:7, 7:6, 7:5, 7:4, 7:3, 7:2, 7:1, 8:10, 8:9, 8:8, 8:7, 8:6, 8:5, 8:4, 8:3, 8:2, 8:1, 9:10, 9:9, 9:8, 9:7, 9:6, 9:5, 9:4, 9:3, 9:2, 9:1, 10:10, 10:9, 10:8, 10:7, 10:6, 10:5, 10:4, 10:3, 10:2, 10:1, 1:99, 5:95, 10:90, 15:85, 20:80, 25:75, 30:70, 35:65, 40:60, 45:55, 50:50, 55:45, 60:40, 65:35, 70:30, 75:25, 80:20, 85:15, 90:10, 95:5, or 99:1 in vitro or in vivo. The passenger to guide ratio refers to the ratio of the passenger strands to the guide strands after the intracellular processing of the pri-microRNA. For example, a 80:20 of passenger-to-guide ratio would have 8 passenger strands to every 2 guide strands processed from the precursor. As a non-limiting example, the passenger-to-guide strand ratio is 80:20 in vitro. As a non-limiting example, the passenger-to-guide strand ratio is 80:20 in vivo. As a non-limiting example, the passenger-to-guide strand ratio is 8:2 in vitro. As a non-limiting example, the passenger-to-guide strand ratio is 8:2 in vivo. As a non-limiting example, the passenger-to-guide strand ratio is 9:1 in vitro. As a non-limiting example, the passenger-to-guide strand ratio is 9:1 in vivo.

[0394] In one embodiment, the passenger to guide (P:G) strand ratio is in a range of 1-99, 1.3-99, 5-99, 10-99, 15-99, 20-99, 25-99, 30-99, 35-99, 40-99, 45-99, 50-99, 55-99, 60-99, 65-99, 70-99, 75-99, 80-99, 85-99, 90-99, 95-99, 1-10, 1-15, 1-20, 1-25, 1-30, 1-35, 1-40, 1-45, 1-50, 1-55, 1-60, 1-65, 1-70, 1-75, 1-80, 1-85, 1-90, 1-95, 5-10, 5-15, 5-20, 5-25, 5-30, 5-35, 5-40, 5-45, 5-50, 5-55, 5-60, 5-65, 5-70, 5-75, 5-80, 5-85, 5-90, 5-95, 10-15, 10-20, 10-25, 10-30, 10-35, 10-40, 10-45, 10-50, 10-55, 10-60, 10-65, 10-70, 10-75, 10-80, 10-85, 10-90, 10-95, 15-20, 15-25, 15-30, 15-35, 15-40, 15-45, 15-50, 15-55, 15-60, 15-65, 15-70, 15-75, 15-80, 15-85, 15-90, 15-95, 20-25, 20-30, 20-35, 20-40, 20-45, 20-50, 20-55, 20-60, 20-65, 20-70, 20-75, 20-80, 20-85, 20-90, 20-95, 25-30, 25-35, 25-40, 25-45, 25-50, 25-55, 25-60, 25-65, 25-70, 25-75, 25-80, 25-85, 25-90, 25-95, 30-35, 30-40, 30-45, 30-50, 30-55, 30-60, 30-65, 30-70, 30-75, 30-80, 30-85, 30-90, 30-95, 35-40, 35-45, 35-50, 35-55, 35-60, 35-65, 35-70, 35-75, 35-80, 35-85, 35-90, 35-95, 40-45, 40-50, 40-55, 40-60, 40-65, 40-70, 40-75, 40-80, 40-85, 40-90, 40-95, 45-50, 45-55, 45-60, 45-65, 45-70, 45-75, 45-80, 45-85, 45-90, 45-95, 50-55, 50-60, 50-65, 50-70, 50-75, 50-80, 50-85, 50-90, 50-95, 55-60, 55-65, 55-70, 55-75, 55-80, 55-85, 55-90, 55-95, 60-65, 60-70, 60-75, 60-80, 60-85, 60-90, 60-95, 65-70, 65-75, 65-80, 65-85, 65-90, 65-95, 70-75, 70-80, 70-85, 70-90, 70-95, 75-80, 75-85, 75-90, 75-95, 80-85, 80-90, 80-95, 85-90, 85-95, or 90-95.

[0395] In one embodiment, the passenger to guide (P:G) strand ratio is 10, 10.5, 11, 11.5, 12, 12.5, 13, 13.5, 14, 14.5, 15, 15.5, 16, 16.5, 17, 17.5, 18, 18.5, 19, 19.5, 20, 20.5, 21, 21.5, 22, 22.5, 23, 23.5, 24, 24.5, 25, 25.5, 26, 26.5, 27, 27.5, 28, 28.5, 29, 29.5, 30, 30.5, 31, 31.5, 32, 32.5, 33, 33.5, 34, 34.5, 35, 35.5, 36, 36.5, 37, 37.5, 38, 38.5, 39, 39.5, 40, 40.5, 41, 41.5, 42, 42.5, 43, 43.5, 44, 44.5, 45, 45.5, 46, 46.5, 47, 47.5, 48, 48.5, 49, 49.5, 50, 50.5, 51, 51.5, 52, 52.5, 53, 53.5, 54, 54.5, 55, 55.5, 56, 56.5, 57, 57.5, 58, 58.5, 59, 59.5, 60, 60.5, 61, 61.5, 62, 62.5, 63, 63.5, 64, 64.5, 65, 65.5, 66, 66.5, 67, 67.5, 68, 68.5, 69, 69.5, 70, 70.5, 71, 71.5, 72, 72.5, 73, 73.5, 74, 74.5, 75, 75.5, 76, 76.5, 77, 77.5, 78, 78.5, 79, 79.5, 80, 80.5, 81, 81.5, 82, 82.5, 83, 83.5, 84, 84.5, 85, 85.5, 86, 86.5, 87, 87.5, 88, 88.5, 89, 89.5, 90, 90.5, 91, 91.5, 92, 92.5, 93, 93.5, 94, 94.5, 95, 95.5, 96, 96.5, 97, 97.5, 98, 98.5, or 99.

[0396] In one embodiment, the passenger to guide (P:G) (also referred to as the sense to antisense) strand ratio expressed is greater than 1.

[0397] In one embodiment, the passenger to guide (P:G) (also referred to as the sense to antisense) strand ratio expressed is greater than 2.

[0398] In one embodiment, the passenger to guide (P:G) (also referred to as the sense to antisense) strand ratio expressed is greater than 5.

[0399] In one embodiment, the passenger to guide (P:G) (also referred to as the sense to antisense) strand ratio expressed is greater than 10.

[0400] In one embodiment, the passenger to guide (P:G) (also referred to as the sense to antisense) strand ratio expressed is greater than 20.

[0401] In one embodiment, the passenger to guide (P:G) (also referred to as the sense to antisense) strand ratio expressed is greater than 50.

[0402] In one embodiment, the passenger to guide (P:G) (also referred to as the sense to antisense) strand ratio expressed is at least 3:1.

[0403] In one embodiment, the passenger to guide (P:G) (also referred to as the sense to antisense) strand ratio expressed is at least 5:1.

[0404] In one embodiment, the passenger to guide (P:G) (also referred to as the sense to antisense) strand ratio expressed is at least 10:1.

[0405] In one embodiment, the passenger to guide (P:G) (also referred to as the sense to antisense) strand ratio expressed is at least 20:1.

[0406] In one embodiment, the passenger to guide (P:G) (also referred to as the sense to antisense) strand ratio expressed is at least 50:1.

[0407] In one embodiment, a passenger-guide strand duplex is considered effective when the pri- or pre-microRNAs demonstrate, but methods known in the art and described herein, greater than 2-fold guide to passenger strand ratio when processing is measured. As a non-limiting examples, the pri- or pre-microRNAs demonstrate great than 2-fold, 3-fold, 4-fold, 5-fold, 6-fold, 7-fold, 8-fold, 9-fold, 10-fold, 11-fold, 12-fold, 13-fold, 14-fold, 15-fold, or 2 to 5-fold, 2 to 10-fold, 2 to 15-fold, 3 to 5-fold, 3 to 10-fold, 3 to 15-fold, 4 to 5-fold, 4 to 10-fold, 4 to 15-fold, 5 to 10-fold, 5 to 15-fold, 6 to 10-fold, 6 to 15-fold, 7 to 10-fold, 7 to 15-fold, 8 to 10-fold, 8 to 15-fold, 9 to 10-fold, 9 to 15-fold, 10 to 15-fold, 11 to 15-fold, 12 to 15-fold, 13 to 15-fold, or 14 to 15-fold guide to passenger strand ratio when processing is measured.

[0408] In one embodiment, the vector genome encoding the dsRNA comprises a sequence which is at least 60%, 65%, 70%, 75%, 80%, 85%, 90%, 95%, 99% or more than 99% of the full length of the construct. As a non-limiting example, the vector genome comprises a sequence which is at least 80% of the full length sequence of the construct.

[0409] In one embodiment, the siRNA molecules may be used to silence wild type or mutant version of the gene of interest by targeting at least one exon on the gene of interest sequence. The exon may be exon 1, exon 2, exon 3, exon 4, exon 5, exon 6, exon 7, exon 8, exon 9, exon 10, exon 11, exon 12, exon 13, exon 14, exon 15, exon 16, exon 17, exon 18, exon 19, exon 20, exon 21, exon 22, exon 23, exon 24, exon 25, exon 26, exon 27, exon 28, exon 29, exon 30, exon 31, exon 32, exon 33, exon 34, exon 35, exon 36, exon 37, exon 38, exon 39, exon 40, exon 41, exon 42, exon 43, exon 44, exon 45, exon 46, exon 47, exon 48, exon 49, exon 50, exon 51, exon 52, exon 53, exon 54, exon 55, exon 56, exon 57, exon 58, exon 59, exon 60, exon 61, exon 62, exon 63, exon 64, exon 65, exon 66, and/or exon 67.

[0410] Design and Sequences of siRNA Duplexes Targeting SOD1 Gene

[0411] The present invention provides small interfering RNA (siRNA) duplexes (and modulatory polynucleotides encoding them) that target SOD1 mRNA to interfere with SOD1 gene expression and/or SOD1 protein production.

[0412] The encoded siRNA duplex of the present invention contains an antisense strand and a sense strand hybridized together forming a duplex structure, wherein the antisense strand is complementary to the nucleic acid sequence of the targeted SOD1 gene, and wherein the sense strand is homologous to the nucleic acid sequence of the targeted SOD1 gene. In some aspects, the 5′end of the antisense strand has a 5′ phosphate group and the 3′end of the sense strand contains a 3′hydroxyl group. In other aspects, there are none, one or 2 nucleotide overhangs at the 3′end of each strand.

[0413] Some guidelines for designing siRNAs have been proposed in the art. These guidelines generally recommend generating a 19-nucleotide duplexed region, symmetric 2-3 nucleotide 3′overhangs, 5′-phosphate and 3′-hydroxyl groups targeting a region in the gene to be silenced. Other rules that may govern siRNA sequence preference include, but are not limited to, (i) A/U at the 5′ end of the antisense strand; (ii) G/C at the 5′ end of the sense strand; (iii) at least five A/U residues in the 5′ terminal one-third of the antisense strand; and (iv) the absence of any GC stretch of more than 9 nucleotides in length. In accordance with such consideration, together with the specific sequence of a target gene, highly effective siRNA molecules essential for suppressing the SOD1 gene expression may be readily designed.

[0414] According to the present invention, siRNA molecules (e.g., siRNA duplexes or encoded dsRNA) that target the SOD1 gene are designed. Such siRNA molecules can specifically, suppress SOD1 gene expression and protein production. In some aspects, the siRNA molecules are designed and used to selectively “knock out” SOD1 gene variants in cells, i.e., mutated SOD1 transcripts that are identified in patients with ALS disease. In some aspects, the siRNA molecules are designed and used to selectively “knock down” SOD1 gene variants in cells. In other aspects, the siRNA molecules are able to inhibit or suppress both the wild type and mutated SOD1 gene.

[0415] In one embodiment, an siRNA molecule of the present invention comprises a sense strand and a complementary antisense strand in which both strands are hybridized together to form a duplex structure. The antisense strand has sufficient complementarity to the SOD1 mRNA sequence to direct target-specific RNAi, i.e., the siRNA molecule has a sequence sufficient to trigger the destruction of the target mRNA by the RNAi machinery or process.

[0416] In one embodiment, an siRNA molecule of the present invention comprises a sense strand and a complementary antisense strand in which both strands are hybridized together to form a duplex structure and where the start site of the hybridization to the SOD1 mRNA is between nucleotide 15 and 1000 on the SOD1 mRNA sequence. As a non-limiting example, the start site may be between nucleotide 15-25, 15-50, 15-75, 15-100, 100-150, 150-200, 200-250, 250-300, 300-350, 350-400, 400-450, 450-500, 500-550, 550-600, 600-650, 650-700, 700-70, 750-800, 800-850, 850-900, 900-950, and 950-1000 on the SOD1 mRNA sequence. As yet another non-limiting example, the start site may be nucleotide 26, 27, 28, 29, 30, 32, 33, 34, 35, 36, 37, 74, 76, 77, 78, 149, 153, 157, 160, 177, 192, 193, 195, 196, 197, 198, 199, 206, 209, 210, 239, 241, 261, 263, 264, 268, 269, 276, 278, 281, 284, 290, 291, 295, 296, 316, 317, 329, 330, 337, 350, 351, 352, 354, 357, 358, 364, 375, 378, 383, 384, 390, 392, 395, 404, 406, 417, 418, 469, 470, 475, 476, 480, 487, 494, 496, 497, 501, 504, 515, 518, 522, 523, 524, 552, 554, 555, 562, 576, 577, 578, 579, 581, 583, 584, 585, 587, 588, 589, 593, 594, 595, 596, 597, 598, 599, 602, 607, 608, 609, 610, 611, 612, 613, 616, 621, 633, 635, 636, 639, 640, 641, 642, 643, 644, 645, 654, 660, 661, 666, 667, 668, 669, 673, 677, 692, 698, 699, 700, 701, 706, 749, 770, 772, 775, 781, 800, 804, 819, 829, 832, 833, 851, 854, 855, 857, 858, 859, 861, 869, 891, 892, 906, 907, 912, 913, 934, 944, and 947 on the SOD1 mRNA sequence.

[0417] In some embodiments, the antisense strand and target SOD1 mRNA sequences have 100% complementarity. The antisense strand may be complementary to any part of the target SOD1 mRNA sequence.

[0418] In other embodiments, the antisense strand and target SOD1 mRNA sequences comprise at least one mismatch. As a non-limiting example, the antisense strand and the target SOD1 mRNA sequence have at least 30%, 40%, 50%, 60%, 70%, 80%, 81%, 82%, 83%, 84%, 85%, 86%, 87%, 88%, 89%, 90%, 91%, 92%, 93%, 94%, 95%, 96%, 97%, 98% or 99% or at least 20-30%, 20-40%, 20-50%, 20-60%, 20-70%, 20-80%, 20-90%, 20-95%, 20-99%, 30-40%, 30-50%, 30-60%, 30-70%, 30-80%, 30-90%, 30-95%, 30-99%, 40-50%, 40-60%, 40-70%, 40-80%, 40-90%, 40-95%, 40-99%, 50-60%, 50-70%, 50-80%, 50-90%, 50-95%, 50-99%, 60-70%, 60-80%, 60-90%, 60-95%, 60-99%, 70-80%, 70-90%, 70-95%, 70-99%, 80-90%, 80-95%, 80-99%, 90-95%, 90-99% or 95-99% complementarity.

[0419] In one embodiment, an siRNA or dsRNA targeting SOD1 includes at least two sequences that are complementary to each other.

[0420] According to the present invention, the siRNA molecule targeting SOD1 has a length from about 10-50 or more nucleotides, i.e., each strand comprising 10-50 nucleotides (or nucleotide analogs). Preferably, the siRNA molecule has a length from about 15-30, e.g., 15, 16, 17, 18, 19, 20, 21, 22, 23, 24, 25, 26, 27, 28, 29, or 30 nucleotides in each strand, wherein one of the strands is sufficiently complementarity to a target region. In one embodiment, each strand of the siRNA molecule has a length from about 19 to 25, 19 to 24 or 19 to 21 nucleotides. In one embodiment, at least one strand of the siRNA molecule is 19 nucleotides in length. In one embodiment, at least one strand of the siRNA molecule is 20 nucleotides in length. In one embodiment, at least one strand of the siRNA molecule is 21 nucleotides in length. In one embodiment, at least one strand of the siRNA molecule is 22 nucleotides in length. In one embodiment, at least one strand of the siRNA molecule is 23 nucleotides in length. In one embodiment, at least one strand of the siRNA molecule is 24 nucleotides in length. In one embodiment, at least one strand of the siRNA molecule is 25 nucleotides in length.

[0421] In some embodiments, the siRNA molecules of the present invention targeting SOD1 can be synthetic RNA duplexes comprising about 19 nucleotides to about 25 nucleotides, and two overhanging nucleotides at the 3′-end. In some aspects, the siRNA molecules may be unmodified RNA molecules. In other aspects, the siRNA molecules may contain at least one modified nucleotide, such as base, sugar or backbone modifications.

[0422] In one embodiment, the siRNA molecules of the present invention targeting SOD1 may comprise a nucleotide sequence such as, but not limited to, the antisense (guide) sequences in Table 2 or a fragment or variant thereof. As a non-limiting example, the antisense sequence used in the siRNA molecule of the present invention is at least 30%, 40%, 50%, 60%, 70%, 80%, 81%, 82%, 83%, 84%, 85%, 86%, 87%, 88%, 89%, 90%, 91%, 92%, 93%, 94%, 95%, 96%, 97%, 98% or 99% or at least 20-30%, 20-40%, 20-50%, 20-60%, 20-70%, 20-80%, 20-90%, 20-95%, 20-99%, 30-40%, 30-50%, 30-60%, 30-70%, 30-80%, 30-90%, 30-95%, 30-99%, 40-50%, 40-60%, 40-70%, 40-80%, 40-90%, 40-95%, 40-99%, 50-60%, 50-70%, 50-80%, 50-90%, 50-95%, 50-99%, 60-70%, 60-80%, 60-90%, 60-95%, 60-99%, 70-80%, 70-90%, 70-95%, 70-99%, 80-90%, 80-95%, 80-99%, 90-95%, 90-99% or 95-99% of a nucleotide sequence in Table 2. As another non-limiting example, the antisense sequence used in the siRNA molecule of the present invention comprises at least 3, 4, 5, 6, 7, 8, 9, 10, 11, 12, 13, 14, 15, 16, 17, 18, 19, 20, 21 or more than 21 consecutive nucleotides of a nucleotide sequence in Table 2. As yet another non-limiting example, the antisense sequence used in the siRNA molecule of the present invention comprises nucleotides 1 to 22, 1 to 21, 1 to 20, 1 to 19, 1 to 18, 1 to 17, 1 to 16, 1 to 15, 1 to 14, 1 to 13, 1 to 12, 1 to 11, 1 to 10, 1 to 9, 1 to 8, 2 to 22, 2 to 21, 2 to 20, 2 to 19, 2 to 18, 2 to 17, 2 to 16, 2 to 15, 2 to 14, 2 to 13, 2 to 12, 2 to 11, 2 to 10, 2 to 9, 2 to 8, 3 to 22, 3 to 21, 3 to 20, 3 to 19, 3 to 18, 3 to 17, 3 to 16, 3 to 15, 3 to 14, 3 to 13, 3 to 12, 3 to 11, 3 to 10, 3 to 9, 3 to 8, 4 to 22, 4 to 21, 4 to 20, 4 to 19, 4 to 18, 4 to 17, 4 to 16, 4 to 15, 4 to 14, 4 to 13, 4 to 12, 4 to 11, 4 to 10, 4 to 9, 4 to 8, 5 to 22, 5 to 21, 5 to 20, 5 to 19, 5 to 18, 5 to 17, 5 to 16, 5 to 15, 5 to 14, 5 to 13, 5 to 12, 5 to 11, 5 to 10, 5 to 9, 5 to 8, 6 to 22, 6 to 21, 6 to 20, 6 to 19, 6 to 18, 6 to 17, 6 to 16, 6 to 15, 6 to 14, 6 to 13, 6 to 12, 6 to 11, 6 to 10, 7 to 22, 7 to 21, 7 to 20, 7 to 19, 7 to 18, 7 to 17, 7 to 16, 7 to 15, 7 to 14, 7 to 13, 7 to 12, 8 to 22, 8 to 21, 8 to 20, 8 to 19, 8 to 18, 8 to 17, 8 to 16, 8 to 15, 8 to 14, 8 to 13, 8 to 12, 9 to 22, 9 to 21, 9 to 20, 9 to 19, 9 to 18, 9 to 17, 9 to 16, 9 to 15, 9 to 14, 10 to 22, 10 to 21, 10 to 20, 10 to 19, 10 to 18, 10 to 17, 10 to 16, 10 to 15, 10 to 14, 11 to 22, 11 to 21, 11 to 20, 11 to 19, 11 to 18, 11 to 17, 11 to 16, 11 to 15, 11 to 14, 12 to 22, 12 to 21, 12 to 20, 12 to 19, 12 to 18, 12 to 17, 12 to 16, 13 to 22, 13 to 21, 13 to 20, 13 to 19, 13 to 18, 13 to 17, 13 to 16, 14 to 22, 14 to 21, 14 to 20, 14 to 19, 14 to 18, 14 to 17, 15 to 22, 15 to 21, 15 to 20, 15 to 19, 15 to 18, 16 to 22, 16 to 21, 16 to 20, 17 to 22, 17 to 21, or 18 to 22 of the sequences in Table 2.

TABLE 2
Antisense Sequences

| | | SEQ |
|---|---|---|
| Antisense | | ID |
| ID | Sequence | NO |
| A-3000 | UUUAUAGGCCAGACCUCCGdTdT | 916 |
| A-3001 | UUUUAUAGGCCAGACCUCCdTdT | 917 |
| A-3002 | UCUUUAUAGGCCAGACCUCdTdT | 918 |
| A-3003 | UACUUUAUAGGCCAGACCUdTdT | 919 |
| A-3004 | UUACUUUAUAGGCCAGACCdTdT | 920 |
| A-3005 | UACUACUUUAUAGGCCAGAdTdT | 921 |
| A-3006 | UGACUACUUUAUAGGCCAGdTdT | 922 |
| A-3007 | UCGACUACUUUAUAGGCCAdTdT | 923 |
| A-3008 | UGCGACUACUUUAUAGGCCdTdT | 924 |
| A-3009 | UCGCGACUACUUUAUAGGCdTdT | 925 |
| A-3010 | UCCGCGACUACUUUAUAGGdTdT | 926 |
| A-3011 | UGCUGCAGGAGACUACGACdTdT | 927 |
| A-3012 | UACGCUGCAGGAGACUACGdTdT | 928 |
| A-3013 | UGACGCUGCAGGAGACUACdTdT | 929 |
| A-3014 | UAGACGCUGCAGGAGACUAdTdT | 930 |
| A-3015 | UCACGGCCUUCGUCGCCAUdTdT | 931 |
| A-3016 | UCGCACACGGCCUUCGUCGdTdT | 932 |
| A-3017 | UAGCACGCACACGGCCUUCdTdT | 933 |
| A-3018 | UUUCAGCACGCACACGGCCdTdT | 934 |
| A-3019 | UGCACUGGGCCGUCGCCCUdTdT | 935 |
| A-3020 | UAAUUGAUGAUGCCCUGCAdTdT | 936 |
| A-3021 | UAAAUUGAUGAUGCCCUGCdTdT | 937 |
| A-3022 | UCGAAAUUGAUGAUGCCCUdTdT | 938 |
| A-3023 | UUCGAAAUUGAUGAUGCCCdTdT | 939 |
| A-3024 | UCUCGAAAUUGAUGAUGCCdTdT | 940 |
| A-3025 | UGCUCGAAAUUGAUGAUGCdTdT | 941 |
| A-3026 | UUGCUCGAAAUUGAUGAUGdTdT | 942 |
| A-3027 | UUUCCUUCUGCUCGAAAUUdTdT | 943 |
| A-3028 | UACUUUCCUUCUGCUCGAAdTdT | 944 |
| A-3029 | UUACUUUCCUUCUGCUCGAdTdT | 945 |
| A-3030 | UAAUGCUUCCCCACACCUUdTdT | 946 |
| A-3031 | UUUAAUGCUUCCCCACACCdTdT | 947 |
| A-3032 | UGCAGGCCUUCAGUCAGUCdTdT | 948 |
| A-3033 | UAUGCAGGCCUUCAGUCAGdTdT | 949 |
| A-3034 | UCAUGCAGGCCUUCAGUCAdTdT | 950 |
| A-3035 | UAAUCCAUGCAGGCCUUCAdTdT | 951 |
| A-3036 | UGAAUCCAUGCAGGCCUUCdTdT | 952 |
| A-3037 | UGAACAUGGAAUCCAUGCAdTdT | 953 |
| A-3038 | UAUGAACAUGGAAUCCAUGdTdT | 954 |
| A-3039 | UCUCAUGAACAUGGAAUCCdTdT | 955 |
| A-3040 | UAAACUCAUGAACAUGGAAdTdT | 956 |
| A-3041 | UAUCUCCAAACUCAUGAACdTdT | 957 |
| A-3042 | UUAUCUCCAAACUCAUGAAdTdT | 958 |
| A-3043 | UGUAUUAUCUCCAAACUCAdTdT | 959 |
| A-3044 | UUGUAUUAUCUCCAAACUCdTdT | 960 |
| A-3045 | UCCUGCACUGGUACAGCCUdTdT | 961 |
| A-3046 | UACCUGCACUGGUACAGCCdTdT | 962 |
| A-3047 | UAUUAAAGUGAGGACCUGCdTdT | 963 |
| A-3048 | UGAUUAAAGUGAGGACCUGdTdT | 964 |
| A-3049 | UGAUAGAGGAUUAAAGUGAdTdT | 965 |
| A-3050 | UACCGUGUUUUCUGGAUAGdTdT | 966 |
| A-3051 | UCACCGUGUUUUCUGGAUAdTdT | 967 |
| A-3052 | UCCACCGUGUUUUCUGGAUdTdT | 968 |
| A-3053 | UGCCCACCGUGUUUUCUGGdTdT | 969 |
| A-3054 | UUUGGCCCACCGUGUUUUCdTdT | 970 |
| A-3055 | UUUUGGCCCACCGUGUUUUdTdT | 971 |
| A-3056 | UUCAUCCUUUGGCCCACCGdTdT | 972 |
| A-3057 | UCAUGCCUCUCUUCAUCCUdTdT | 973 |
| A-3058 | UCAACAUGCCUCUCUUCAUdTdT | 974 |
| A-3059 | UGUCUCCAACAUGCCUCUCdTdT | 975 |
| A-3060 | UAGUCUCCAACAUGCCUCUdTdT | 976 |
| A-3061 | UUGCCCAAGUCUCCAACAUdTdT | 977 |
| A-3062 | UAUUGCCCAAGUCUCCAACdTdT | 978 |
| A-3063 | UCACAUUGCCCAAGUCUCCdTdT | 979 |
| A-3064 | UGUCAGCAGUCACAUUGCCdTdT | 980 |
| A-3065 | UUUGUCAGCAGUCACAUUGdTdT | 981 |
| A-3066 | UCCACACCAUCUUUGUCAGdTdT | 982 |
| A-3067 | UGCCACACCAUCUUUGUCAdTdT | 983 |
| A-3068 | UAUGCAAUGGUCUCCUGAGdTdT | 984 |
| A-3069 | UGAUGCAAUGGUCUCCUGAdTdT | 985 |
| A-3070 | UCCAAUGAUGCAAUGGUCUdTdT | 986 |
| A-3071 | UGCCAAUGAUGCAAUGGUCdTdT | 987 |
| A-3072 | UUGCGGCCAAUGAUGCAAUdTdT | 988 |
| A-3073 | UACCAGUGUGCGGCCAAUGdTdT | 989 |
| A-3074 | UAUGGACCACCAGUGUGCGdTdT | 990 |
| A-3075 | UUCAUGGACCACCAGUGUGdTdT | 991 |
| A-3076 | UUUCAUGGACCACCAGUGUdTdT | 992 |
| A-3077 | UCUUUUUCAUGGACCACCAdTdT | 993 |
| A-3078 | UCUGCUUUUUCAUGGACCAdTdT | 994 |
| A-3079 | UGCCCAAGUCAUCUGCUUUdTdT | 995 |
| A-3080 | UUUUGCCCAAGUCAUCUGCdTdT | 996 |
| A-3081 | UCACCUUUGCCCAAGUCAUdTdT | 997 |
| A-3082 | UCCACCUUUGCCCAAGUCAdTdT | 998 |
| A-3083 | UUCCACCUUUGCCCAAGUCdTdT | 999 |
| A-3084 | UCGUUUCCUGUCUUUGUACdTdT | 1000 |
| A-3085 | UAGCGUUUCCUGUCUUUGUdTdT | 1001 |
| A-3086 | UCAGCGUUUCCUGUCUUUGdTdT | 1002 |
| A-3087 | UCGACUUCCAGCGUUUCCUdTdT | 1003 |
| A-3088 | UCACCACAAGCCAAACGACdTdT | 1004 |
| A-3089 | UACACCACAAGCCAAACGAdTdT | 1005 |
| A-3090 | UUACACCACAAGCCAAACGdTdT | 1006 |
| A-3091 | UUUACACCACAAGCCAAACdTdT | 1007 |
| A-3092 | UAAUUACACCACAAGCCAAdTdT | 1008 |
| A-3093 | UCCAAUUACACCACAAGCCdTdT | 1009 |
| A-3094 | UCCCAAUUACACCACAAGCdTdT | 1010 |
| A-3095 | UUCCCAAUUACACCACAAGdTdT | 1011 |
| A-3096 | UGAUCCCAAUUACACCACAdTdT | 1012 |
| A-3097 | UCGAUCCCAAUUACACCACdTdT | 1013 |
| A-3098 | UGCGAUCCCAAUUACACCAdTdT | 1014 |
| A-3099 | UUUGGGCGAUCCCAAUUACdTdT | 1015 |
| A-3100 | UAUUGGGCGAUCCCAAUUAdTdT | 1016 |
| A-3101 | UUAUUGGGCGAUCCCAAUUdTdT | 1017 |
| A-3102 | UUUAUUGGGCGAUCCCAAUdTdT | 1018 |
| A-3103 | UUUUAUUGGGCGAUCCCAAdTdT | 1019 |
| A-3104 | UGUUUAUUGGGCGAUCCCAdTdT | 1020 |
| A-3105 | UUGUUUAUUGGGCGAUCCCdTdT | 1021 |
| A-3106 | UGAAUGUUUAUUGGGCGAUdTdT | 1022 |
| A-3107 | UCAAGGGAAUGUUUAUUGGdTdT | 1023 |
| A-3108 | UCCAAGGGAAUGUUUAUUGdTdT | 1024 |
| A-3109 | UUCCAAGGGAAUGUUUAUUdTdT | 1025 |
| A-3110 | UAUCCAAGGGAAUGUUUAUdTdT | 1026 |
| A-3111 | UCAUCCAAGGGAAUGUUUAdTdT | 1027 |
| A-3112 | UACAUCCAAGGGAAUGUUUdTdT | 1028 |
| A-3113 | UUACAUCCAAGGGAAUGUUdTdT | 1029 |
| A-3114 | UGACUACAUCCAAGGGAAUdTdT | 1030 |
| A-3115 | UCCUCAGACUACAUCCAAGdTdT | 1031 |
| A-3116 | UUGAGUUAAGGGGCCUCAGdTdT | 1032 |
| A-3117 | UGAUGAGUUAAGGGGCCUCdTdT | 1033 |
| A-3118 | UAGAUGAGUUAAGGGGCCUdTdT | 1034 |
| A-3119 | UAACAGAUGAGUUAAGGGGdTdT | 1035 |
| A-3120 | UUAACAGAUGAGUUAAGGGdTdT | 1036 |
| A-3121 | UAUAACAGAUGAGUUAAGGdTdT | 1037 |
| A-3122 | UGAUAACAGAUGAGUUAAGdTdT | 1038 |
| A-3123 | UGGAUAACAGAUGAGUUAAdTdT | 1039 |
| A-3124 | UAGGAUAACAGAUGAGUUAdTdT | 1040 |
| A-3125 | UCAGGAUAACAGAUGAGUUdTdT | 1041 |
| A-3126 | UUACAGCUAGCAGGAUAACdTdT | 1042 |
| A-3127 | UCAUUUCUACAGCUAGCAGdTdT | 1043 |
| A-3128 | UACAUUUCUACAGCUAGCAdTdT | 1044 |
| A-3129 | UAGGAUACAUUUCUACAGCdTdT | 1045 |
| A-3130 | UCAGGAUACAUUUCUACAGdTdT | 1046 |
| A-3131 | UUCAGGAUACAUUUCUACAdTdT | 1047 |
| A-3132 | UAUCAGGAUACAUUUCUACdTdT | 1048 |
| A-3133 | UGUUUAUCAGGAUACAUUUdTdT | 1049 |
| A-3134 | UUAAUGUUUAUCAGGAUACdTdT | 1050 |
| A-3135 | UUAAGAUUACAGUGUUUAAdTdT | 1051 |
| A-3136 | UCACUUUUAAGAUUACAGUdTdT | 1052 |
| A-3137 | UACACUUUUAAGAUUACAGdTdT | 1053 |
| A-3138 | UUACACUUUUAAGAUUACAdTdT | 1054 |
| A-3139 | UUUACACUUUUAAGAUUACdTdT | 1055 |
| A-3140 | UCACAAUUACACUUUUAAGdTdT | 1056 |
| A-3141 | UAGUUUCUCACUACAGGUAdTdT | 1057 |
| A-3142 | UUCUUCCAAGUGAUCAUAAdTdT | 1058 |
| A-3143 | UAAUCUUCCAAGUGAUCAUdTdT | 1059 |
| A-3144 | UACAAAUCUUCCAAGUGAUdTdT | 1060 |
| A-3145 | UAACUAUACAAAUCUUCCAdTdT | 1061 |
| A-3146 | UUUUUAACUGAGUUUUAUAdTdT | 1062 |
| A-3147 | UGACAUUUUAACUGAGUUUdTdT | 1063 |
| A-3148 | UCAGGUCAUUGAAACAGACdTdT | 1064 |
| A-3149 | UUGGCAAAAUACAGGUCAUdTdT | 1065 |
| A-3150 | UGUCUGGCAAAAUACAGGUdTdT | 1066 |
| A-3151 | UAGUCUGGCAAAAUACAGGdTdT | 1067 |
| A-3152 | UAUACCCAUCUGUGAUUUAdTdT | 1068 |
| A-3153 | UUUAAUACCCAUCUGUGAUdTdT | 1069 |
| A-3154 | UUUUAAUACCCAUCUGUGAdTdT | 1070 |
| A-3155 | UAGUUUAAUACCCAUCUGUdTdT | 1071 |
| A-3156 | UAAGUUUAAUACCCAUCUGdTdT | 1072 |
| A-3157 | UCAAGUUUAAUACCCAUCUdTdT | 1073 |
| A-3158 | UGACAAGUUUAAUACCCAUdTdT | 1074 |
| A-3159 | UGAAAUUCUGACAAGUUUAdTdT | 1075 |
| A-3160 | UAUUCACAGGCUUGAAUGAdTdT | 1076 |
| A-3161 | UUAUUCACAGGCUUGAAUGdTdT | 1077 |
| A-3162 | UCCAUACAGGGUUUUUAUUdTdT | 1078 |
| A-3163 | UGCCAUACAGGGUUUUUAUdTdT | 1079 |
| A-3164 | UUAAGUGCCAUACAGGGUUdTdT | 1080 |
| A-3165 | UAUAAGUGCCAUACAGGGUdTdT | 1081 |
| A-3166 | UGAUUCUUUUAAUAGCCUCdTdT | 1082 |
| A-3167 | UUUUGAAUUUGGAUUCUUUdTdT | 1083 |
| A-3168 | UUAGUUUGAAUUUGGAUUCdTdT | 1084 |

[0423] In one embodiment, the siRNA molecules of the present invention targeting SOD1 may comprise a nucleotide sequence such as, but not limited to, the sense (passenger) sequences in Table 3 or a fragment or variant thereof. As a non-limiting example, the sense sequence used in the siRNA molecule of the present invention is at least 30%, 40%, 50%, 60%, 70%, 80%, 81%, 82%, 83%, 84%, 85%, 86%, 87%, 88%, 89%, 90%, 91%, 92%, 93%, 94%, 95%, 96%, 97%, 98% or 99% or at least 20-30%, 20-40%, 20-50%, 20-60%, 20-70%, 20-80%, 20-90%, 20-95%, 20-99%, 30-40%, 30-50%, 30-60%, 30-70%, 30-80%, 30-90%, 30-95%, 30-99%, 40-50%, 40-60%, 40-70%, 40-80%, 40-90%, 40-95%, 40-99%, 50-60%, 50-70%, 50-80%, 50-90%, 50-95%, 50-99%, 60-70%, 60-80%, 60-90%, 60-95%, 60-99%, 70-80%, 70-90%, 70-95%, 70-99%, 80-90%, 80-95%, 80-99%, 90-95%, 90-99% or 95-99% of a nucleotide sequence in Table 3. As another non-limiting example, the sense sequence used in the siRNA molecule of the present invention comprises at least 3, 4, 5, 6, 7, 8, 9, 10, 11, 12, 13, 14, 15, 16, 17, 18, 19, 20, 21 or more than 21 consecutive nucleotides of a nucleotide sequence in Table 3. As yet another non-limiting example, the sense sequence used in the siRNA molecule of the present invention comprises nucleotides 1 to 22, 1 to 21, 1 to 20, 1 to 19, 1 to 18, 1 to 17, 1 to 16, 1 to 15, 1 to 14, 1 to 13, 1 to 12, 1 to 11, 1 to 10, 1 to 9, 1 to 8, 2 to 22, 2 to 21, 2 to 20, 2 to 19, 2 to 18, 2 to 17, 2 to 16, 2 to 15, 2 to 14, 2 to 13, 2 to 12, 2 to 11, 2 to 10, 2 to 9, 2 to 8, 3 to 22, 3 to 21, 3 to 20, 3 to 19, 3 to 18, 3 to 17, 3 to 16, 3 to 15, 3 to 14, 3 to 13, 3 to 12, 3 to 11, 3 to 10, 3 to 9, 3 to 8, 4 to 22, 4 to 21, 4 to 20, 4 to 19, 4 to 18, 4 to 17, 4 to 16, 4 to 15, 4 to 14, 4 to 13, 4 to 12, 4 to 11, 4 to 10, 4 to 9, 4 to 8, 5 to 22, 5 to 21, 5 to 20, 5 to 19, 5 to 18, 5 to 17, 5 to 16, 5 to 15, 5 to 14, 5 to 13, 5 to 12, 5 to 11, 5 to 10, 5 to 9, 5 to 8, 6 to 22, 6 to 21, 6 to 20, 6 to 19, 6 to 18, 6 to 17, 6 to 16, 6 to 15, 6 to 14, 6 to 13, 6 to 12, 6 to 11, 6 to 10, 7 to 22, 7 to 21, 7 to 20, 7 to 19, 7 to 18, 7 to 17, 7 to 16, 7 to 15, 7 to 14, 7 to 13, 7 to 12, 8 to 22, 8 to 21, 8 to 20, 8 to 19, 8 to 18, 8 to 17, 8 to 16, 8 to 15, 8 to 14, 8 to 13, 8 to 12, 9 to 22, 9 to 21, 9 to 20, 9 to 19, 9 to 18, 9 to 17, 9 to 16, 9 to 15, 9 to 14, 10 to 22, 10 to 21, 10 to 20, 10 to 19, 10 to 18, 10 to 17, 10 to 16, 10 to 15, 10 to 14, 11 to 22, 11 to 21, 11 to 20, 11 to 19, 11 to 18, 11 to 17, 11 to 16, 11 to 15, 11 to 14, 12 to 22, 12 to 21, 12 to 20, 12 to 19, 12 to 18, 12 to 17, 12 to 16, 13 to 22, 13 to 21, 13 to 20, 13 to 19, 13 to 18, 13 to 17, 13 to 16, 14 to 22, 14 to 21, 14 to 20, 14 to 19, 14 to 18, 14 to 17, 15 to 22, 15 to 21, 15 to 20, 15 to 19, 15 to 18, 16 to 22, 16 to 21, 16 to 20, 17 to 22, 17 to 21, or 18 to 22 of the sequences in Table 3.

TABLE 3
Sense Sequences

| | | SEQ |
|---|---|---|
| Sense | | ID |
| ID | Sequence | NO |
| S-3000 | CGGAGGUCUGGCCUAUAACdTdT | 1085 |
| S-3001 | GGAGGUCUGGCCUAUAAACdTdT | 1086 |
| S-3002 | GAGGUCUGGCCUAUAAAGCdTdT | 1087 |
| S-3003 | AGGUCUGGCCUAUAAAGUCdTdT | 1088 |
| S-3004 | GGUCUGGCCUAUAAAGUACdTdT | 1089 |
| S-3005 | UCUGGCCUAUAAAGUAGUCdTdT | 1090 |
| S-3006 | CUGGCCUAUAAAGUAGUCCdTdT | 1091 |
| S-3007 | UGGCCUAUAAAGUAGUCGCdTdT | 1092 |
| S-3008 | GGCCUAUAAAGUAGUCGCCdTdT | 1093 |
| S-3009 | GCCUAUAAAGUAGUCGCGCdTdT | 1094 |
| S-3010 | CCUAUAAAGUAGUCGCGGCdTdT | 1095 |
| S-3011 | GUCGUAGUCUCCUGCAGCCdTdT | 1096 |
| S-3012 | CGUAGUCUCCUGCAGCGUCdTdT | 1097 |
| S-3013 | GUAGUCUCCUGCAGCGUCCdTdT | 1098 |
| S-3014 | UAGUCUCCUGCAGCGUCUCdTdT | 1099 |
| S-3015 | AUGGCGACGAAGGCCGUGCdTdT | 1100 |
| S-3016 | CGACGAAGGCCGUGUGCGCdTdT | 1101 |
| S-3017 | GAAGGCCGUGUGCGUGCUCdTdT | 1102 |
| S-3018 | GGCCGUGUGCGUGCUGAACdTdT | 1103 |
| S-3019 | AGGGCGACGGCCCAGUGCCdTdT | 1104 |
| S-3020 | UGCAGGGCAUCAUCAAUUCdTdT | 1105 |
| S-3021 | GCAGGGCAUCAUCAAUUUCdTdT | 1106 |
| S-3022 | AGGGCAUCAUCAAUUUCGCdTdT | 1107 |
| S-3023 | GGGCAUCAUCAAUUUCGACdTdT | 1108 |
| S-3024 | GGCAUCAUCAAUUUCGAGCdTdT | 1109 |
| S-3025 | GCAUCAUCAAUUUCGAGCCdTdT | 1110 |
| S-3026 | CAUCAUCAAUUUCGAGCACdTdT | 1111 |
| S-3027 | AAUUUCGAGCAGAAGGAACdTdT | 1112 |
| S-3028 | UUCGAGCAGAAGGAAAGUCdTdT | 1113 |
| S-3029 | UCGAGCAGAAGGAAAGUACdTdT | 1114 |
| S-3030 | AAGGUGUGGGGAAGCAUUCdTdT | 1115 |
| S-3031 | GGUGUGGGGAAGCAUUAACdTdT | 1116 |
| S-3032 | GACUGACUGAAGGCCUGCCdTdT | 1117 |
| S-3033 | CUGACUGAAGGCCUGCAUCdTdT | 1118 |
| S-3034 | UGACUGAAGGCCUGCAUGCdTdT | 1119 |
| S-3035 | UGAAGGCCUGCAUGGAUUCdTdT | 1120 |
| S-3036 | GAAGGCCUGCAUGGAUUCCdTdT | 1121 |
| S-3037 | UGCAUGGAUUCCAUGUUCCdTdT | 1122 |
| S-3038 | CAUGGAUUCCAUGUUCAUCdTdT | 1123 |
| S-3039 | GGAUUCCAUGUUCAUGAGCdTdT | 1124 |
| S-3040 | UUCCAUGUUCAUGAGUUUCdTdT | 1125 |
| S-3041 | GUUCAUGAGUUUGGAGAUCdTdT | 1126 |
| S-3042 | UUCAUGAGUUUGGAGAUACdTdT | 1127 |
| S-3043 | UGAGUUUGGAGAUAAUACCdTdT | 1128 |
| S-3044 | GAGUUUGGAGAUAAUACACdTdT | 1129 |
| S-3045 | AGGCUGUACCAGUGCAGGCdTdT | 1130 |
| S-3046 | GGCUGUACCAGUGCAGGUCdTdT | 1131 |
| S-3047 | GCAGGUCCUCACUUUAAUCdTdT | 1132 |
| S-3048 | CAGGUCCUCACUUUAAUCCdTdT | 1133 |
| S-3049 | UCACUUUAAUCCUCUAUCCdTdT | 1134 |
| S-3050 | CUAUCCAGAAAACACGGUCdTdT | 1135 |
| S-3051 | UAUCCAGAAAACACGGUGCdTdT | 1136 |
| S-3052 | AUCCAGAAAACACGGUGGCdTdT | 1137 |
| S-3053 | CCAGAAAACACGGUGGGCCdTdT | 1138 |
| S-3054 | GAAAACACGGUGGGCCAACdTdT | 1139 |
| S-3055 | AAAACACGGUGGGCCAAACdTdT | 1140 |
| S-3056 | CGGUGGGCCAAAGGAUGACdTdT | 1141 |
| S-3057 | AGGAUGAAGAGAGGCAUGCdTdT | 1142 |
| S-3058 | AUGAAGAGAGGCAUGUUGCdTdT | 1143 |
| S-3059 | GAGAGGCAUGUUGGAGACCdTdT | 1144 |
| S-3060 | AGAGGCAUGUUGGAGACUCdTdT | 1145 |
| S-3061 | AUGUUGGAGACUUGGGCACdTdT | 1146 |
| S-3062 | GUUGGAGACUUGGGCAAUCdTdT | 1147 |
| S-3063 | GGAGACUUGGGCAAUGUGCdTdT | 1148 |
| S-3064 | GGCAAUGUGACUGCUGACCdTdT | 1149 |
| S-3065 | CAAUGUGACUGCUGACAACdTdT | 1150 |
| S-3066 | CUGACAAAGAUGGUGUGGCdTdT | 1151 |
| S-3067 | UGACAAAGAUGGUGUGGCCdTdT | 1152 |
| S-3068 | CUCAGGAGACCAUUGCAUCdTdT | 1153 |
| S-3069 | UCAGGAGACCAUUGCAUCCdTdT | 1154 |
| S-3070 | AGACCAUUGCAUCAUUGGCdTdT | 1155 |
| S-3071 | GACCAUUGCAUCAUUGGCCdTdT | 1156 |
| S-3072 | AUUGCAUCAUUGGCCGCACdTdT | 1157 |
| S-3073 | CAUUGGCCGCACACUGGUCdTdT | 1158 |
| S-3074 | CGCACACUGGUGGUCCAUCdTdT | 1159 |
| S-3075 | CACACUGGUGGUCCAUGACdTdT | 1160 |
| S-3076 | ACACUGGUGGUCCAUGAACdTdT | 1161 |
| S-3077 | UGGUGGUCCAUGAAAAAGCdTdT | 1162 |
| S-3078 | UGGUCCAUGAAAAAGCAGCdTdT | 1163 |
| S-3079 | AAAGCAGAUGACUUGGGCCdTdT | 1164 |
| S-3080 | GCAGAUGACUUGGGCAAACdTdT | 1165 |
| S-3081 | AUGACUUGGGCAAAGGUGCdTdT | 1166 |
| S-3082 | UGACUUGGGCAAAGGUGGCdTdT | 1167 |
| S-3083 | GACUUGGGCAAAGGUGGACdTdT | 1168 |
| S-3084 | GUACAAAGACAGGAAACGCdTdT | 1169 |
| S-3085 | ACAAAGACAGGAAACGCUCdTdT | 1170 |
| S-3086 | CAAAGACAGGAAACGCUGCdTdT | 1171 |
| S-3087 | AGGAAACGCUGGAAGUCGCdTdT | 1172 |
| S-3088 | GUCGUUUGGCUUGUGGUGCdTdT | 1173 |
| S-3089 | UCGUUUGGCUUGUGGUGUCdTdT | 1174 |
| S-3090 | CGUUUGGCUUGUGGUGUACdTdT | 1175 |
| S-3091 | GUUUGGCUUGUGGUGUAACdTdT | 1176 |
| S-3092 | UUGGCUUGUGGUGUAAUUCdTdT | 1177 |
| S-3093 | GGCUUGUGGUGUAAUUGGCdTdT | 1178 |
| S-3094 | GCUUGUGGUGUAAUUGGGCdTdT | 1179 |
| S-3095 | CUUGUGGUGUAAUUGGGACdTdT | 1180 |
| S-3096 | UGUGGUGUAAUUGGGAUCCdTdT | 1181 |
| S-3097 | GUGGUGUAAUUGGGAUCGCdTdT | 1182 |
| S-3098 | UGGUGUAAUUGGGAUCGCCdTdT | 1183 |
| S-3099 | GUAAUUGGGAUCGCCCAACdTdT | 1184 |
| S-3100 | UAAUUGGGAUCGCCCAAUCdTdT | 1185 |
| S-3101 | AAUUGGGAUCGCCCAAUACdTdT | 1186 |
| S-3102 | AUUGGGAUCGCCCAAUAACdTdT | 1187 |
| S-3103 | UUGGGAUCGCCCAAUAAACdTdT | 1188 |
| S-3104 | UGGGACCGCCCAAUAAACCdTdT | 1189 |
| S-3105 | GGGAUCGCCCAAUAAACACdTdT | 1190 |
| S-3106 | AUCGCCCAAUAAACAUUCCdTdT | 1191 |
| S-3107 | CCAAUAAACAUUCCCUUGCdTdT | 1192 |
| S-3108 | CAAUAAACAUUCCCUUGGCdTdT | 1193 |
| S-3109 | AAUAAACAUUCCCUUGGACdTdT | 1194 |
| S-3110 | AUAAACAUUCCCUUGGAUCdTdT | 1195 |
| S-3111 | UAAACAUUCCCUUGGAUGCdTdT | 1196 |
| S-3112 | AAACAUUCCCUUGGAUGUCdTdT | 1197 |
| S-3113 | AACAUUCCCUUGGAUGUACdTdT | 1198 |
| S-3114 | AUUCCCUUGGAUGUAGUCCdTdT | 1199 |
| S-3115 | CUUGGAUGUAGUCUGAGGCdTdT | 1200 |
| S-3116 | CUGAGGCCCCUUAACUCACdTdT | 1201 |
| S-3117 | GAGGCCCCUUAACUCAUCCdTdT | 1202 |
| S-3118 | AGGCCCCUUAACUCAUCUCdTdT | 1203 |
| S-3119 | CCCCUUAACUCAUCUGUUCdTdT | 1204 |
| S-3120 | CCCUUAACUCAUCUGUUACdTdT | 1205 |
| S-3121 | CCUUAACUCAUCUGUUAUCdTdT | 1206 |
| S-3122 | CUUAACUCAUCUGUUAUCCdTdT | 1207 |
| S-3123 | UUAACUCAUCUGUUAUCCCdTdT | 1208 |
| S-3124 | UAACUCAUCUGUUAUCCUCdTdT | 1209 |
| S-3125 | AACUCAUCUGUUAUCCUGCdTdT | 1210 |
| S-3126 | GUUAUCCUGCUAGCUGUACdTdT | 1211 |
| S-3127 | CUGCUAGCUGUAGAAAUGCdTdT | 1212 |
| S-3128 | UGCUAGCUGUAGAAAUGUCdTdT | 1213 |
| S-3129 | GCUGUAGAAAUGUAUCCUCdTdT | 1214 |
| S-3130 | CUGUAGAAAUGUAUCCUGCdTdT | 1215 |
| S-3131 | UGUAGAAAUGUAUCCUGACdTdT | 1216 |
| S-3132 | GUAGAAAUGUAUCCUGAUCdTdT | 1217 |
| S-3133 | AAAUGUAUCCUGAUAAACCdTdT | 1218 |
| S-3134 | GUAUCCUGAUAAACAUUACdTdT | 1219 |
| S-3135 | UUAAACACUGUAAUCUUACdTdT | 1220 |
| S-3136 | ACUGUAAUCUUAAAAGUGCdTdT | 1221 |
| S-3137 | CUGUAAUCUUAAAAGUGUCdTdT | 1222 |
| S-3138 | UGUAAUCUUAAAAGUGUACdTdT | 1223 |
| S-3139 | GUAAUCUUAAAAGUGUAACdTdT | 1224 |
| S-3140 | CUUAAAAGUGUAAUUGUGCdTdT | 1225 |
| S-3141 | UACCUGUAGUGAGAAACUCdTdT | 1226 |
| S-3142 | UUAUGAUCACUUGGAAGACdTdT | 1227 |
| S-3143 | AUGAUCACUUGGAAGAUUCdTdT | 1228 |
| S-3144 | AUCACUUGGAAGAUUUGUCdTdT | 1229 |
| S-3145 | UGGAAGAUUUGUAUAGUUCdTdT | 1230 |
| S-3146 | UAUAAAACUCAGUUAAAACdTdT | 1231 |
| S-3147 | AAACUCAGUUAAAAUGUCCdTdT | 1232 |
| S-3148 | GUCUGUUUCAAUGACCUGCdTdT | 1233 |
| S-3149 | AUGACCUGUAUUUUGCCACdTdT | 1234 |
| S-3150 | ACCUGUAUUUUGCCAGACCdTdT | 1235 |
| S-3151 | CCUGUAUUUUGCCAGACUCdTdT | 1236 |
| S-3152 | UAAAUCACAGAUGGGUAUCdTdT | 1237 |
| S-3153 | AUCACAGAUGGGUAUUAACdTdT | 1238 |
| S-3154 | UCACAGAUGGGUAUUAAACdTdT | 1239 |
| S-3155 | ACAGAUGGGUAUUAAACUCdTdT | 1240 |
| S-3156 | CAGAUGGGUAUUAAACUUCdTdT | 1241 |
| S-3157 | AGAUGGGUAUUAAACUUGCdTdT | 1242 |
| S-3158 | AUGGGUAUUAAACUUGUCCdTdT | 1243 |
| S-3159 | UAAACUUGUCAGAAUUUCCdTdT | 1244 |
| S-3160 | UCAUUCAAGCCUGUGAAUCdTdT | 1245 |
| S-3161 | CAUUCAAGCCUGUGAAUACdTdT | 1246 |
| S-3162 | AAUAAAAACCCUGUAUGGCdTdT | 1247 |
| S-3163 | AUAAAAACCCUGUAUGGCCdTdT | 1248 |
| S-3164 | AACCCUGUAUGGCACUUACdTdT | 1249 |
| S-3165 | ACCCUGUAUGGCACUUAUCdTdT | 1250 |
| S-3166 | GAGGCUAUUAAAAGAAUCCdTdT | 1251 |
| S-3167 | AAAGAAUCCAAAUUCAAACdTdT | 1252 |
| S-3168 | GAAUCCAAAUUCAAACUACdTdT | 1253 |

[0424] In one embodiment, the siRNA molecules of the present invention targeting SOD1 may comprise an antisense sequence from Table 2 and a sense sequence from Table 3, or a fragment or variant thereof. As a non-limiting example, the antisense sequence and the sense sequence have at least 30%, 40%, 50%, 60%, 70%, 80%, 81%, 82%, 83%, 84%, 85%, 86%, 87%, 88%, 89%, 90%, 91%, 92%, 93%, 94%, 95%, 96%, 97%, 98% or 99% or at least 20-30%, 20-40%, 20-50%, 20-60%, 20-70%, 20-80%, 20-90%, 20-95%, 20-99%, 30-40%, 30-50%, 30-60%, 30-70%, 30-80%, 30-90%, 30-95%, 30-99%, 40-50%, 40-60%, 40-70%, 40-80%, 40-90%, 40-95%, 40-99%, 50-60%, 50-70%, 50-80%, 50-90%, 50-95%, 50-99%, 60-70%, 60-80%, 60-90%, 60-95%, 60-99%, 70-80%, 70-90%, 70-95%, 70-99%, 80-90%, 80-95%, 80-99%, 90-95%, 90-99% or 95-99% complementarity.

[0425] In one embodiment, the siRNA molecules of the present invention targeting SOD1 may comprise the sense and antisense siRNA duplex as described in Table 4. As a non-limiting example, these siRNA duplexes may be tested for in vitro inhibitory activity on endogenous SOD1 gene expression. The start site for the sense and antisense sequence is compared to SOD1 gene sequence known as NM_000454.4 (SEQ ID NO: 1254) from NCBI.

TABLE 4
Sense and antisense strand sequences of SOD1
dsRNA

| siRNA | | Sense | | | Antisense | AS |
|---|---|---|---|---|---|---|
| Du- | | Strand | SS | | Strand | |
| plex | SS | Sequence | SEQ | AS | Sequence | SEQ |
| ID | ID | (5′-3′) | ID | ID | (5′-3′) | ID |
| D- | S- | CGGAGGUCUGGC | 1085 | A- | UUUAUAGGCCA | 916 |
| 2741 | 3000 | CUAUAACdTdT | | 3000 | GACCUCCGdTdT | |
| D- | S- | GGAGGUCUGGCC | 1086 | A- | UUUUAUAGGCC | 917 |
| 2742 | 3001 | UAUAAACdTdT | | 3001 | AGACCUCCdTdT | |
| D- | S- | GAGGUCUGGCCU | 1087 | A- | UCUUUAUAGGC | 918 |
| 2743 | 3002 | AUAAAGCdTdT | | 3002 | CAGACCUCdTdT | |
| D- | S- | AGGUCUGGCCUA | 1088 | A- | UACUUUAUAGG | 919 |
| 2744 | 3003 | UAAAGUCdTdT | | 3003 | CCAGACCUdTdT | |
| D- | S- | GGUCUGGCCUAU | 1089 | A- | UUACUUUAUAG | 920 |
| 2745 | 3004 | AAAGUACdTdT | | 3004 | GCCAGACCdTdT | |
| D- | S- | UCUGGCCUAUAA | 1090 | A- | UACUACUUUAU | 921 |
| 2746 | 3005 | AGUAGUCdTdT | | 3005 | AGGCCAGAdTdT | |
| D- | S- | CUGGCCUAUAAA | 1091 | A- | UGACUACUUUA | 922 |
| 2747 | 3006 | GUAGUCCdTdT | | 3006 | UAGGCCAGdTdT | |
| D- | S- | UGGCCUAUAAAG | 1092 | A- | UCGACUACUUU | 923 |
| 2748 | 3007 | UAGUCGCdTdT | | 3007 | AUAGGCCAdTdT | |
| D- | S- | GGCCUAUAAAGU | 1093 | A- | UGCGACUACUU | 924 |
| 2749 | 3008 | AGUCGCCdTdT | | 3008 | UAUAGGCCdTdT | |
| D- | S- | GCCUAUAAAGUA | 1094 | A- | UCGCGACUACU | 925 |
| 2750 | 3009 | GUCGCGCdTdT | | 3009 | UUAUAGGCdTdT | |
| D- | S- | CCUAUAAAGUAG | 1095 | A- | UCCGCGACUAC | 926 |
| 2751 | 3010 | UCGCGGCdTdT | | 3010 | UUUAUAGGdTdT | |
| D- | S- | GUCGUAGUCUCC | 1096 | A- | UGCUGCAGGAG | 927 |
| 2752 | 3011 | UGCAGCCdTdT | | 3011 | ACUACGACdTdT | |
| D- | S- | CGUAGUCUCCUG | 1097 | A- | UACGCUGCAGG | 928 |
| 2753 | 3012 | CAGCGUCdTdT | | 3012 | AGACUACGdTdT | |
| D- | S- | GUAGUCUCCUGC | 1098 | A- | UGACGCUGCAG | 929 |
| 2754 | 3013 | AGCGUCCdTdT | | 3013 | GAGACUACdTdT | |
| D- | S- | UAGUCUCCUGCA | 1099 | A- | UAGACGCUGCA | 930 |
| 2755 | 3014 | GCGUCUCdTdT | | 3014 | GGAGACUAdTdT | |
| D- | S- | AUGGCGACGAAG | 1100 | A- | UCACGGCCUUC | 931 |
| 2756 | 3015 | GCCGUGCdTdT | | 3015 | GUCGCCAUdTdT | |
| D- | S- | CGACGAAGGCCG | 1101 | A- | UCGCACACGGCC | 932 |
| 2757 | 3016 | UGUGCGCdTdT | | 3016 | UUCGUCGdTdT | |
| D- | S- | GAAGGCCGUGUG | 1102 | A- | UAGCACGCACA | 933 |
| 2758 | 3017 | CGUGCUCdTdT | | 3017 | CGGCCUUCdTdT | |
| D- | S- | GGCCGUGUGCGU | 1103 | A- | UUUCAGCACGC | 934 |
| 2759 | 3018 | GCUGAACdTdT | | 3018 | ACACGGCCdTdT | |
| D- | S- | AGGGCGACGGCC | 1104 | A- | UGCACUGGGCC | 935 |
| 2760 | 3019 | CAGUGCCdTdT | | 3019 | GUCGCCCUdTdT | |
| D- | S- | UGCAGGGCAUCA | 1105 | A- | UAAUUGAUGAU | 936 |
| 2761 | 3020 | UCAAUUCdTdT | | 3020 | GCCCUGCAdTdT | |
| D- | S- | GCAGGGCAUCAU | 1106 | A- | UAAAUUGAUGA | 937 |
| 2762 | 3021 | CAAUUUCdTdT | | 3021 | UGCCCUGCdTdT | |
| D- | S- | AGGGCAUCAUCA | 1107 | A- | UCGAAAUUGAU | 938 |
| 2763 | 3022 | AUUUCGCdTdT | | 3022 | GAUGCCCUdTdT | |
| D- | S- | GGGCAUCAUCAA | 1108 | A- | UUCGAAAUUGA | 939 |
| 2764 | 3023 | UUUCGACdTdT | | 3023 | UGAUGCCCdTdT | |
| D- | S- | GGCAUCAUCAAU | 1109 | A- | UCUCGAAAUUG | 940 |
| 2765 | 3024 | UUCGAGCdTdT | | 3024 | AUGAUGCCdTdT | |
| D- | S- | GCAUCAUCAAUU | 1110 | A- | UGCUCGAAAUU | 941 |
| 2766 | 3025 | UCGAGCCdTdT | | 3025 | GAUGAUGCdTdT | |
| D- | S- | CAUCAUCAAUUU | 1111 | A- | UUGCUCGAAAU | 942 |
| 2767 | 3026 | CGAGCACdTdT | | 3026 | UGAUGAUGdTdT | |
| D- | S- | AAUUUCGAGCAG | 1112 | A- | UUUCCUUCUGC | 943 |
| 2768 | 3027 | AAGGAACdTdT | | 3027 | UCGAAAUUdTdT | |
| D- | S- | UUCGAGCAGAAG | 1113 | A- | UACUUUCCUUC | 944 |
| 2769 | 3028 | GAAAGUCdTdT | | 3028 | UGCUCGAAdTdT | |
| D- | S- | UCGAGCAGAAGG | 1114 | A- | UUACUUUCCUU | 945 |
| 2770 | 3029 | AAAGUACdTdT | | 3029 | CUGCUCGAdTdT | |
| D- | S- | AAGGUGUGGGGA | 1115 | A- | UAAUGCUUCCC | 946 |
| 2771 | 3030 | AGCAUUCdTdT | | 3030 | CACACCUUdTdT | |
| D- | S- | GGUGUGGGGAAG | 1116 | A- | UUUAAUGCUUC | 947 |
| 2772 | 3031 | CAUUAACdTdT | | 3031 | CCCACACCdTdT | |
| D- | S- | GACUGACUGAAG | 1117 | A- | UGCAGGCCUUC | 948 |
| 2773 | 3032 | GCCUGCCdTdT | | 3032 | AGUCAGUCdTdT | |
| D- | S- | CUGACUGAAGGC | 1118 | A- | UAUGCAGGCCU | 949 |
| 2774 | 3033 | CUGCAUCdTdT | | 3033 | UCAGUCAGdTdT | |
| D- | S- | UGACUGAAGGCC | 1119 | A- | UCAUGCAGGCC | 950 |
| 2775 | 3034 | UGCAUGCdTdT | | 3034 | UUCAGUCAdTdT | |
| D- | S- | UGAAGGCCUGCA | 1120 | A- | UAAUCCAUGCA | 951 |
| 2776 | 3035 | UGGAUUCdTdT | | 3035 | GGCCUUCAdTdT | |
| D- | S- | GAAGGCCUGCAU | 1121 | A- | UGAAUCCAUGC | 952 |
| 2777 | 3036 | GGAUUCCdTdT | | 3036 | AGGCCUUCdTdT | |
| D- | S- | UGCAUGGAUUCC | 1122 | A- | UGAACAUGGAA | 953 |
| 2778 | 3037 | AUGUUCCdTdT | | 3037 | UCCAUGCAdTdT | |
| D- | S- | CAUGGAUUCCAU | 1123 | A- | UAUGAACAUGG | 954 |
| 2779 | 3038 | GUUCAUCdTdT | | 3038 | AAUCCAUGdTdT | |
| D- | S- | GGAUUCCAUGUU | 1124 | A- | UCUCAUGAACA | 955 |
| 2780 | 3039 | CAUGAGCdTdT | | 3039 | UGGAAUCCdTdT | |
| D- | S- | UUCCAUGUUCAU | 1125 | A- | UAAACUCAUGA | 956 |
| 2781 | 3040 | GAGUUUCdTdT | | 3040 | ACAUGGAAdTdT | |
| D- | S- | GUUCAUGAGUUU | 1126 | A- | UAUCUCCAAAC | 957 |
| 2782 | 3041 | GGAGAUCdTdT | | 3041 | UCAUGAACdTdT | |
| D- | S- | UUCAUGAGUUUG | 1127 | A- | UUAUCUCCAAA | 958 |
| 2783 | 3042 | GAGAUACdTdT | | 3042 | CUCAUGAAdTdT | |
| D- | S- | UGAGUUUGGAGA | 1128 | A- | UGUAUUAUCUC | 959 |
| 2784 | 3043 | UAAUACCdTdT | | 3043 | CAAACUCAdTdT | |
| D- | S- | GAGUUUGGAGAU | 1129 | A- | UUGUAUUAUCU | 960 |
| 2785 | 3044 | AAUACACdTdT | | 3044 | CCAAACUCdTdT | |
| D- | S- | AGGCUGUACCAG | 1130 | A- | UCCUGCACUGG | 961 |
| 2786 | 3045 | UGCAGGCdTdT | | 3045 | UACAGCCUdTdT | |
| D- | S- | GGCUGUACCAGU | 1131 | A- | UACCUGCACUG | 962 |
| 2787 | 3046 | GCAGGUCdTdT | | 3046 | GUACAGCCdTdT | |
| D- | S- | GCAGGUCCUCAC | 1132 | A- | UAUUAAAGUGA | 963 |
| 2788 | 3047 | UUUAAUCdTdT | | 3047 | GGACCUGCdTdT | |
| D- | S- | CAGGUCCUCACU | 1133 | A- | UGAUUAAAGUG | 964 |
| 2789 | 3048 | UUAAUCCdTdT | | 3048 | AGGACCUGdTdT | |
| D- | S- | UCACUUUAAUCC | 1134 | A- | UGAUAGAGGAU | 965 |
| 2790 | 3049 | UCUAUCCdTdT | | 3049 | UAAAGUGAdTdT | |
| D- | S- | CUAUCCAGAAAA | 1135 | A- | UACCGUGUUUU | 966 |
| 2791 | 3050 | CACGGUCdTdT | | 3050 | CUGGAUAGdTdT | |
| D- | S- | UAUCCAGAAAAC | 1136 | A- | UCACCGUGUUU | 967 |
| 2792 | 3051 | ACGGUGCdTdT | | 3051 | UCUGGAUAdTdT | |
| D- | S- | AUCCAGAAAACA | 1137 | A- | UCCACCGUGUU | 968 |
| 2793 | 3052 | CGGUGGCdTdT | | 3052 | UUCUGGAUdTdT | |
| D- | S- | CCAGAAAACACG | 1138 | A- | UGCCCACCGUG | 969 |
| 2794 | 3053 | GUGGGCCdTdT | | 3053 | UUUUCUGGdTdT | |
| D- | S- | GAAAACACGGUG | 1139 | A- | UUUGGCCCACC | 970 |
| 2795 | 3054 | GGCCAACdTdT | | 3054 | GUGUUUUCdTdT | |
| D- | S- | AAAACACGGUGG | 1140 | A- | UUUUGGCCCAC | 971 |
| 2796 | 3055 | GCCAAACdTdT | | 3055 | CGUGUUUUdTdT | |
| D- | S- | CGGUGGGCCAAA | 1141 | A- | UUCAUCCUUUG | 972 |
| 2797 | 3056 | GGAUGACdTdT | | 3056 | GCCCACCGdTdT | |
| D- | S- | AGGAUGAAGAGA | 1142 | A- | UCAUGCCUCUC | 973 |
| 2798 | 3057 | GGCAUGCdTdT | | 3057 | UUCAUCCUdTdT | |
| D- | S- | AUGAAGAGAGGC | 1143 | A- | UCAACAUGCCU | 974 |
| 2799 | 3058 | AUGUUGCdTdT | | 3058 | CUCUUCAUdTdT | |
| D- | S- | GAGAGGCAUGUU | 1144 | A- | UGUCUCCAACA | 975 |
| 2800 | 3059 | GGAGACCdTdT | | 3059 | UGCCUCUCdTdT | |
| D- | S- | AGAGGCAUGUUG | 1145 | A- | UAGUCUCCAAC | 976 |
| 2801 | 3060 | GAGACUCdTdT | | 3060 | AUGCCUCUdTdT | |
| D- | S- | AUGUUGGAGACU | 1146 | A- | UUGCCCAAGUC | 977 |
| 2802 | 3061 | UGGGCACdTdT | | 3061 | UCCAACAUdTdT | |
| D- | S- | GUUGGAGACUUG | 1147 | A- | UAUUGCCCAAG | 978 |
| 2803 | 3062 | GGCAAUCdTdT | | 3062 | UCUCCAACdTdT | |
| D- | S- | GGAGACUUGGGC | 1148 | A- | UCACAUUGCCC | 979 |
| 2804 | 3063 | AAUGUGCdTdT | | 3063 | AAGUCUCCdTdT | |
| D- | S- | GGCAAUGUGACU | 1149 | A- | UGUCAGCAGUC | 980 |
| 2805 | 3064 | GCUGACCdTdT | | 3064 | ACAUUGCCdTdT | |
| D- | S- | CAAUGUGACUGC | 1150 | A- | UUUGUCAGCAG | 981 |
| 2806 | 3065 | UGACAACdTdT | | 3065 | UCACAUUGdTdT | |
| D- | S- | CUGACAAAGAUG | 1151 | A- | UCCACACCAUCU | 982 |
| 2807 | 3066 | GUGUGGCdTdT | | 3066 | UUGUCAGdTdT | |
| D- | S- | UGACAAAGAUGG | 1152 | A- | UGCCACACCAUC | 983 |
| 2808 | 3067 | UGUGGCCdTdT | | 3067 | UUUGUCAdTdT | |
| D- | S- | CUCAGGAGACCA | 1153 | A- | UAUGCAAUGGU | 984 |
| 2809 | 3068 | UUGCAUCdTdT | | 3068 | CUCCUGAGdTdT | |
| D- | S- | UCAGGAGACCAU | 1154 | A- | UGAUGCAAUGG | 985 |
| 2810 | 3069 | UGCAUCCdTdT | | 3069 | UCUCCUGAdTdT | |
| D- | S- | AGACCAUUGCAU | 1155 | A- | UCCAAUGAUGC | 986 |
| 2811 | 3070 | CAUUGGCdTdT | | 3070 | AAUGGUCUdTdT | |
| D- | S- | GACCAUUGCAUC | 1156 | A- | UGCCAAUGAUG | 987 |
| 2812 | 3071 | AUUGGCCdTdT | | 3071 | CAAUGGUCdTdT | |
| D- | S- | AUUGCAUCAUUG | 1157 | A- | UUGCGGCCAAU | 988 |
| 2813 | 3072 | GCCGCACdTdT | | 3072 | GAUGCAAUdTdT | |
| D- | S- | CAUUGGCCGCAC | 1158 | A- | UACCAGUGUGC | 989 |
| 2814 | 3073 | ACUGGUCdTdT | | 3073 | GGCCAAUGdTdT | |
| D- | S- | CGCACACUGGUG | 1159 | A- | UAUGGACCACC | 990 |
| 2815 | 3074 | GUCCAUCdTdT | | 3074 | AGUGUGCGdTdT | |
| D- | S- | CACACUGGUGGU | 1160 | A- | UUCAUGGACCA | 991 |
| 2816 | 3075 | CCAUGACdTdT | | 3075 | CCAGUGUGdTdT | |
| D- | S- | ACACUGGUGGUC | 1161 | A- | UUUCAUGGACC | 992 |
| 2817 | 3076 | CAUGAACdTdT | | 3076 | ACCAGUGUdTdT | |
| D- | S- | UGGUGGUCCAUG | 1162 | A- | UCUUUUUCAUG | 993 |
| 2818 | 3077 | AAAAAGCdTdT | | 3077 | GACCACCAdTdT | |
| D- | S- | UGGUCCAUGAAA | 1163 | A- | UCUGCUUUUUC | 994 |
| 2819 | 3078 | AAGCAGCdTdT | | 3078 | AUGGACCAdTdT | |
| D- | S- | AAAGCAGAUGAC | 1164 | A- | UGCCCAAGUCA | 995 |
| 2820 | 3079 | UUGGGCCdTdT | | 3079 | UCUGCUUUdTdT | |
| D- | S- | GCAGAUGACUUG | 1165 | A- | UUUUGCCCAAG | 996 |
| 2821 | 3080 | GGCAAACdTdT | | 3080 | UCAUCUGCdTdT | |
| D- | S- | AUGACUUGGGCA | 1166 | A- | UCACCUUUGCCC | 997 |
| 2822 | 3081 | AAGGUGCdTdT | | 3081 | AAGUCAUdTdT | |
| D- | S- | UGACUUGGGCAA | 1167 | A- | UCCACCUUUGCC | 998 |
| 2823 | 3082 | AGGUGGCdTdT | | 3082 | CAAGUCAdTdT | |
| D- | S- | GACUUGGGCAAA | 1168 | A- | UUCCACCUUUG | 999 |
| 2824 | 3083 | GGUGGACdTdT | | 3083 | CCCAAGUCdTdT | |
| D- | S- | GUACAAAGACAG | 1169 | A- | UCGUUUCCUGU | 1000 |
| 2825 | 3084 | GAAACGCdTdT | | 3084 | CUUUGUACdTdT | |
| D- | S- | ACAAAGACAGGA | 1170 | A- | UAGCGUUUCCU | 1001 |
| 2826 | 3085 | AACGCUCdTdT | | 3085 | GUCUUUGUdTdT | |
| D- | S- | CAAAGACAGGAA | 1171 | A- | UCAGCGUUUCC | 1002 |
| 2827 | 3086 | ACGCUGCdTdT | | 3086 | UGUCUUUGdTdT | |
| D- | S- | AGGAAACGCUGG | 1172 | A- | UCGACUUCCAG | 1003 |
| 2828 | 3087 | AAGUCGCdTdT | | 3087 | CGUUUCCUdTdT | |
| D- | S- | GUCGUUUGGCUU | 1173 | A- | UCACCACAAGCC | 1004 |
| 2829 | 3088 | GUGGUGCdTdT | | 3088 | AAACGACdTdT | |
| D- | S- | UCGUUUGGCUUG | 1174 | A- | UACACCACAAG | 1005 |
| 2830 | 3089 | UGGUGUCdTdT | | 3089 | CCAAACGAdTdT | |
| D- | S- | CGUUUGGCUUGU | 1175 | A- | UUACACCACAA | 1006 |
| 2831 | 3090 | GGUGUACdTdT | | 3090 | GCCAAACGdTdT | |
| D- | S- | GUUUGGCUUGUG | 1176 | A- | UUUACACCACA | 1007 |
| 2832 | 3091 | GUGUAACdTdT | | 3091 | AGCCAAACdTdT | |
| D- | S- | UUGGCUUGUGGU | 1177 | A- | UAAUUACACCA | 1008 |
| 2833 | 3092 | GUAAUUCdTdT | | 3092 | CAAGCCAAdTdT | |
| D- | S- | GGCUUGUGGUGU | 1178 | A- | UCCAAUUACAC | 1009 |
| 2834 | 3093 | AAUUGGCdTdT | | 3093 | CACAAGCCdTdT | |
| D- | S- | GCUUGUGGUGUA | 1179 | A- | UCCCAAUUACA | 1010 |
| 2835 | 3094 | AUUGGGCdTdT | | 3094 | CCACAAGCdTdT | |
| D- | S- | CUUGUGGUGUAA | 1180 | A- | UUCCCAAUUAC | 1011 |
| 2836 | 3095 | UUGGGACdTdT | | 3095 | ACCACAAGdTdT | |
| D- | S- | UGUGGUGUAAUU | 1181 | A- | UGAUCCCAAUU | 1012 |
| 2837 | 3096 | GGGAUCCdTdT | | 3096 | ACACCACAdTdT | |
| D- | S- | GUGGUGUAAUUG | 1182 | A- | UCGAUCCCAAU | 1013 |
| 2838 | 3097 | GGAUCGCdTdT | | 3097 | UACACCACdTdT | |
| D- | S- | UGGUGUAAUUGG | 1183 | A- | UGCGAUCCCAA | 1014 |
| 2839 | 3098 | GAUCGCCdTdT | | 3098 | UUACACCAdTdT | |
| D- | S- | GUAAUUGGGAUC | 1184 | A- | UUUGGGCGAUC | 1015 |
| 2840 | 3099 | GCCCAACdTdT | | 3099 | CCAAUUACdTdT | |
| D- | S- | UAAUUGGGAUCG | 1185 | A- | UAUUGGGCGAU | 1016 |
| 2841 | 3100 | CCCAAUCdTdT | | 3100 | CCCAAUUAdTdT | |
| D- | S- | AAUUGGGAUCGC | 1186 | A- | UUAUUGGGCGA | 1017 |
| 2842 | 3101 | CCAAUACdTdT | | 3101 | UCCCAAUUdTdT | |
| D- | S- | AUUGGGAUCGCC | 1187 | A- | UUUAUUGGGCG | 1018 |
| 2843 | 3102 | CAAUAACdTdT | | 3102 | AUCCCAAUdTdT | |
| D- | S- | UUGGGAUCGCCC | 1188 | A- | UUUUAUUGGGC | 1019 |
| 2844 | 3103 | AAUAAACdTdT | | 3103 | GAUCCCAAdTdT | |
| D- | S- | UGGGAUCGCCCA | 1189 | A- | UGUUUAUUGGG | 1020 |
| 2845 | 3104 | AUAAACCdTdT | | 3104 | CGAUCCCAdTdT | |
| D- | S- | GGGAUCGCCCAA | 1190 | A- | UUGUUUAUUGG | 1021 |
| 2846 | 3105 | UAAACACdTdT | | 3105 | GCGAUCCCdTdT | |
| D- | S- | AUCGCCCAAUAA | 1191 | A- | UGAAUGUUUAU | 1022 |
| 2847 | 3106 | ACAUUCCdTdT | | 3106 | UGGGCGAUdTdT | |
| D- | S- | CCAAUAAACAUU | 1192 | A- | UCAAGGGAAUG | 1023 |
| 2848 | 3107 | CCCUUGCdTdT | | 3107 | UUUAUUGGdTdT | |
| D- | S- | CAAUAAACAUUC | 1193 | A- | UCCAAGGGAAU | 1024 |
| 2849 | 3108 | CCUUGGCdTdT | | 3108 | GUUUAUUGdTdT | |
| D- | S- | AAUAAACAUUCC | 1194 | A- | UUCCAAGGGAA | 1025 |
| 2850 | 3109 | CUUGGACdTdT | | 3109 | UGUUUAUUdTdT | |
| D- | S- | AUAAACAUUCCC | 1195 | A- | UAUCCAAGGGA | 1026 |
| 2851 | 3110 | UUGGAUCdTdT | | 3110 | AUGUUUAUdTdT | |
| D- | S- | UAAACAUUCCCU | 1196 | A- | UCAUCCAAGGG | 1027 |
| 2852 | 3111 | UGGAUGCdTdT | | 3111 | AAUGUUUAdTdT | |
| D- | S- | AAACAUUCCCUU | 1197 | A- | UACAUCCAAGG | 1028 |
| 2853 | 3112 | GGAUGUCdTdT | | 3112 | GAAUGUUUdTdT | |
| D- | S- | AACAUUCCCUUG | 1198 | A- | UUACAUCCAAG | 1029 |
| 2854 | 3113 | GAUGUACdTdT | | 3113 | GGAAUGUUdTdT | |
| D- | S- | AUUCCCUUGGAU | 1199 | A- | UGACUACAUCC | 1030 |
| 2855 | 3114 | GUAGUCCdTdT | | 3114 | AAGGGAAUdTdT | |
| D- | S- | CUUGGAUGUAGU | 1200 | A- | UCCUCAGACUA | 1031 |
| 2856 | 3115 | CUGAGGCdTdT | | 3115 | CAUCCAAGdTdT | |
| D- | S- | CUGAGGCCCCUU | 1201 | A- | UUGAGUUAAGG | 1032 |
| 2857 | 3116 | AACUCACdTdT | | 3116 | GGCCUCAGdTdT | |
| D- | S- | GAGGCCCCUUAA | 1202 | A- | UGAUGAGUUAA | 1033 |
| 2858 | 3117 | CUCAUCCdTdT | | 3117 | GGGGCCUCdTdT | |
| D- | S- | AGGCCCCUUAAC | 1203 | A- | UAGAUGAGUUA | 1034 |
| 2859 | 3118 | UCAUCUCdTdT | | 3118 | AGGGGCCUdTdT | |
| D- | S- | CCCCUUAACUCA | 1204 | A- | UAACAGAUGAG | 1035 |
| 2860 | 3119 | UCUGUUCdTdT | | 3119 | UUAAGGGGdTdT | |
| D- | S- | CCCUUAACUCAU | 1205 | A- | UUAACAGAUGA | 1036 |
| 2861 | 3120 | CUGUUACdTdT | | 3120 | GUUAAGGGdTdT | |
| D- | S- | CCUUAACUCAUC | 1206 | A- | UAUAACAGAUG | 1037 |
| 2862 | 3121 | UGUUAUCdTdT | | 3121 | AGUUAAGGdTdT | |
| D- | S- | CUUAACUCAUCU | 1207 | A- | UGAUAACAGAU | 1038 |
| 2863 | 3122 | GUUAUCCdTdT | | 3122 | GAGUUAAGdTdT | |
| D- | S- | UUAACUCAUCUG | 1208 | A- | UGGAUAACAGA | 1039 |
| 2864 | 3123 | UUAUCCCdTdT | | 3123 | UGAGUUAAdTdT | |
| D- | S- | UAACUCAUCUGU | 1209 | A- | UAGGAUAACAG | 1040 |
| 2865 | 3124 | UAUCCUCdTdT | | 3124 | AUGAGUUAdTdT | |
| D- | S- | AACUCAUCUGUU | 1210 | A- | UCAGGAUAACA | 1041 |
| 2866 | 3125 | AUCCUGCdTdT | | 3125 | GAUGAGUUdTdT | |
| D- | S- | GUUAUCCUGCUA | 1211 | A- | UUACAGCUAGC | 1042 |
| 2867 | 3126 | GCUGUACdTdT | | 3126 | AGGAUAACdTdT | |
| D- | S- | CUGCUAGCUGUA | 1212 | A- | UCAUUUCUACA | 1043 |
| 2868 | 3127 | GAAAUGCdTdT | | 3127 | GCUAGCAGdTdT | |
| D- | S- | UGCUAGCUGUAG | 1213 | A- | UACAUUUCUAC | 1044 |
| 2869 | 3128 | AAAUGUCdTdT | | 3128 | AGCUAGCAdTdT | |
| D- | S- | GCUGUAGAAAUG | 1214 | A- | UAGGAUACAUU | 1045 |
| 2870 | 3129 | UAUCCUCdTdT | | 3129 | UCUACAGCdTdT | |
| D- | S- | CUGUAGAAAUGU | 1215 | A- | UCAGGAUACAU | 1046 |
| 2871 | 3130 | AUCCUGCdTdT | | 3130 | UUCUACAGdTdT | |
| D- | S- | UGUAGAAAUGUA | 1216 | A- | UUCAGGAUACA | 1047 |
| 2872 | 3131 | UCCUGACdTdT | | 3131 | UUUCUACAdTdT | |
| D- | S- | GUAGAAAUGUAU | 1217 | A- | UAUCAGGAUAC | 1048 |
| 2873 | 3132 | CCUGAUCdTdT | | 3132 | AUUUCUACdTdT | |
| D- | S- | AAAUGUAUCCUG | 1218 | A- | UGUUUAUCAGG | 1049 |
| 2874 | 3133 | AUAAACCdTdT | | 3133 | AUACAUUUdTdT | |
| D- | S- | GUAUCCUGAUAA | 1219 | A- | UUAAUGUUUAU | 1050 |
| 2875 | 3134 | ACAUUACdTdT | | 3134 | CAGGAUACdTdT | |
| D- | S- | UUAAACACUGUA | 1220 | A- | UUAAGAUUACA | 1051 |
| 2876 | 3135 | AUCUUACdTdT | | 3135 | GUGUUUAAdTdT | |
| D- | S- | ACUGUAAUCUUA | 1221 | A- | UCACUUUUAAG | 1052 |
| 2877 | 3136 | AAAGUGCdTdT | | 3136 | AUUACAGUdTdT | |
| D- | S- | CUGUAAUCUUAA | 1222 | A- | UACACUUUUAA | 1053 |
| 2878 | 3137 | AAGUGUCdTdT | | 3137 | GAUUACAGdTdT | |
| D- | S- | UGUAAUCUUAAA | 1223 | A- | UUACACUUUUA | 1054 |
| 2879 | 3138 | AGUGUACdTdT | | 3138 | AGAUUACAdTdT | |
| D- | S- | GUAAUCUUAAAA | 1224 | A- | UUUACACUUUU | 1055 |
| 2880 | 3139 | GUGUAACdTdT | | 3139 | AAGAUUACdTdT | |
| D- | S- | CUUAAAAGUGUA | 1225 | A- | UCACAAUUACA | 1056 |
| 2881 | 3140 | AUUGUGCdTdT | | 3140 | CUUUUAAGdTdT | |
| D- | S- | UACCUGUAGUGA | 1226 | A- | UAGUUUCUCAC | 1057 |
| 2882 | 3141 | GAAACUCdTdT | | 3141 | UACAGGUAdTdT | |
| D- | S- | UUAUGAUCACUU | 1227 | A- | UUCUUCCAAGU | 1058 |
| 2883 | 3142 | GGAAGACdTdT | | 3142 | GAUCAUAAdTdT | |
| D- | S- | AUGAUCACUUGG | 1228 | A- | UAAUCUUCCAA | 1059 |
| 2884 | 3143 | AAGAUUCdTdT | | 3143 | GUGAUCAUdTdT | |
| D- | S- | AUCACUUGGAAG | 1229 | A- | UACAAAUCUUC | 1060 |
| 2885 | 3144 | AUUUGUCdTdT | | 3144 | CAAGUGAUdTdT | |
| D- | S- | UGGAAGAUUUGU | 1230 | A- | UAACUAUACAA | 1061 |
| 2886 | 3145 | AUAGUUCdTdT | | 3145 | AUCUUCCAdTdT | |
| D- | S- | UAUAAAACUCAG | 1231 | A- | UUUUUAACUGA | 1062 |
| 2887 | 3146 | UUAAAACdTdT | | 3146 | GUUUUAUAdTdT | |
| D- | S- | AAACUCAGUUAA | 1232 | A- | UGACAUUUUAA | 1063 |
| 2888 | 3147 | AAUGUCCdTdT | | 3147 | CUGAGUUUdTdT | |
| D- | S- | GUCUGUUUCAAU | 1233 | A- | UCAGGUCAUUG | 1064 |
| 2889 | 3148 | GACCUGCdTdT | | 3148 | AAACAGACdTdT | |
| D- | S- | AUGACCUGUAUU | 1234 | A- | UUGGCAAAAUA | 1065 |
| 2890 | 3149 | UUGCCACdTdT | | 3149 | CAGGUCAUdTdT | |
| D- | S- | ACCUGUAUUUUG | 1235 | A- | UGUCUGGCAAA | 1066 |
| 2891 | 3150 | CCAGACCdTdT | | 3150 | AUACAGGUdTdT | |
| D- | S- | CCUGUAUUUUGC | 1236 | A- | UAGUCUGGCAA | 1067 |
| 2892 | 3151 | CAGACUCdTdT | | 3151 | AAUACAGGdTdT | |
| D- | S- | UAAAUCACAGAU | 1237 | A- | UAUACCCAUCU | 1068 |
| 2893 | 3152 | GGGUAUCdTdT | | 3152 | GUGAUUUAdTdT | |
| D- | S- | AUCACAGAUGGG | 1238 | A- | UUUAAUACCCA | 1069 |
| 2894 | 3153 | UAUUAACdTdT | | 3153 | UCUGUGAUdTdT | |
| D- | S- | UCACAGAUGGGU | 1239 | A- | UUUUAAUACCC | 1070 |
| 2895 | 3154 | AUUAAACdTdT | | 3154 | AUCUGUGAdTdT | |
| D- | S- | ACAGAUGGGUAU | 1240 | A- | UAGUUUAAUAC | 1071 |
| 2896 | 3155 | UAAACUCdTdT | | 3155 | CCAUCUGUdTdT | |
| D- | S- | CAGAUGGGUAUU | 1241 | A- | UAAGUUUAAUA | 1072 |
| 2897 | 3156 | AAACUUCATdT | | 3156 | CCCAUCUGdTdT | |
| D- | S- | AGAUGGGUAUUA | 1242 | A- | UCAAGUUUAAU | 1073 |
| 2898 | 3157 | AACUUGCdTdT | | 3157 | ACCCAUCUdTdT | |
| D- | S- | AUGGGUAUUAAA | 1243 | A- | UGACAAGUUUA | 1074 |
| 2899 | 3158 | CUUGUCCdTdT | | 3158 | AUACCCAUdTdT | |
| D- | S- | UAAACUUGUCAG | 1244 | A- | UGAAAUUCUGA | 1075 |
| 2900 | 3159 | AAUUUCCdTdT | | 3159 | CAAGUUUAdTdT | |
| D- | S- | UCAUUCAAGCCU | 1245 | A- | UAUUCACAGGC | 1076 |
| 2901 | 3160 | GUGAAUCdTdT | | 3160 | UUGAAUGAdTdT | |
| D- | S- | CAUUCAAGCCUG | 1246 | A- | UUAUUCACAGG | 1077 |
| 2902 | 3161 | UGAAUACdTdT | | 3161 | CUUGAAUGdTdT | |
| D- | S- | AAUAAAAACCCU | 1247 | A- | UCCAUACAGGG | 1078 |
| 2903 | 3162 | GUAUGGCdTdT | | 3162 | UUUUUAUUdTdT | |
| D- | S- | AUAAAAACCCUG | 1248 | A- | UGCCAUACAGG | 1079 |
| 2904 | 3163 | UAUGGCCdTdT | | 3163 | GUUUUUAUdTdT | |
| D- | S- | AACCCUGUAUGG | 1249 | A- | UUAAGUGCCAU | 1080 |
| 2905 | 3164 | CACUUACdTdT | | 3164 | ACAGGGUUdTdT | |
| D- | S- | ACCCUGUAUGGC | 1250 | A- | UAUAAGUGCCA | 1081 |
| 2906 | 3165 | ACUUAUCdTdT | | 3165 | UACAGGGUdTdT | |
| D- | S- | GAGGCUAUUAAA | 1251 | A- | UGAUUCUUUUA | 1082 |
| 2907 | 3166 | AGAAUCCdTdT | | 3166 | AUAGCCUCdTdT | |
| D- | S- | AAAGAAUCCAAA | 1252 | A- | UUUUGAAUUUG | 1083 |
| 2908 | 3167 | UUCAAACdTdT | | 3167 | GAUUCUUUdTdT | |
| D- | S- | GAAUCCAAAUUC | 1253 | A- | UUAGUUUGAAU | 1084 |
| 2909 | 3168 | AAACUACdTdT | | 3168 | UUGGAUUCdTdT | |

[0426] In other embodiments, the siRNA molecules of the present invention targeting SOD1 can be encoded in plasmid vectors, AAV particles, viral genome or other nucleic acid expression vectors for delivery to a cell.

[0427] DNA expression plasmids can be used to stably express the siRNA duplexes or dsRNA of the present invention targeting SOD1 in cells and achieve long-term inhibition of the target gene expression. In one aspect, the sense and antisense strands of a siRNA duplex are typically linked by a short spacer sequence leading to the expression of a stem-loop structure termed short hairpin RNA (shRNA). The hairpin is recognized and cleaved by Dicer, thus generating mature siRNA molecules.

[0428] According to the present invention, AAV particles comprising the nucleic acids encoding the siRNA molecules targeting SOD1 mRNA are produced, the AAV serotypes may be any of the serotypes listed in Table 1. Non-limiting examples of the AAV serotypes include, AAV1, AAV2, AAV3, AAV4, AAV5, AAV6, AAV7, AAV8, AAV9, AAV9.47, AAV9(hu14), AAV10, AAV11, AAV12, AAVrh8, AAVrh10, AAV-DJ8, AAV-DJ, AAV-PHP.A, and/or AAV-PHP.B, AAVPHP.B2, AAVPHP.B3, AAVPHP.N/PHP.B-DGT, AAVPHP.B-EST, AAVPHP.B-GGT, AAVPHP.B-ATP, AAVPHP.B-ATT-T, AAVPHP.B-DGT-T, AAVPHP.B-GGT-T, AAVPHP.B-SGS, AAVPHP.B-AQP, AAVPHP.B-QQP, AAVPHP.B-SNP(3), AAVPHP.B-SNP, AAVPHP.B-QGT, AAVPHP.B-NQT, AAVPHP.B-EGS, AAVPHP.B-SGN, AAVPHP.B-EGT, AAVPHP.B-DST, AAVPHP.B-DST, AAVPHP.B-STP, AAVPHP.B-PQP, AAVPHP.B-SQP, AAVPHP.B-QLP, AAVPHP.B-TMP, AAVPHP.B-TTP, AAVPHP.S/G2A12, AAVG2A15/G2A3, AAVG2B4, AAVG2B5, and variants thereof.

[0429] In some embodiments, the siRNA duplexes or encoded dsRNA of the present invention suppress (or degrade) SOD1 mRNA. Accordingly, the siRNA duplexes or encoded dsRNA can be used to substantially inhibit SOD1 gene expression in a cell. In some aspects, the inhibition of SOD1 gene expression refers to an inhibition by at least about 20%, preferably by at least about 30%, 40%, 50%, 60%, 70%, 80%, 85%, 90%, 95% and 100%, or at least 20-30%, 20-40%, 20-50%, 20-60%, 20-70%, 20-80%, 20-90%, 20-95%, 20-100%, 30-40%, 30-50%, 30-60%, 30-70%, 30-80%, 30-90%, 30-95%, 30-100%, 40-50%, 40-60%, 40-70%, 40-80%, 40-90%, 40-95%, 40-100%, 50-60%, 50-70%, 50-80%, 50-90%, 50-95%, 50-100%, 60-70%, 60-80%, 60-90%, 60-95%, 60-100%, 70-80%, 70-90%, 70-95%, 70-100%, 80-90%, 80-95%, 80-100%, 90-95%, 90-100% or 95-100%.

[0430] Accordingly, the protein product of the targeted gene may be inhibited by at least about 20%, preferably by at least about 30%, 40%, 50%, 60%, 70%, 80%, 85%, 90%, 95% and 100%, or at least 20-30%, 20-40%, 20-50%, 20-60%, 20-70%, 20-80%, 20-90%, 20-95%, 20-100%, 30-40%, 30-50%, 30-60%, 30-70%, 30-80%, 30-90%, 30-95%, 30-100%, 40-50%, 40-60%, 40-70%, 40-80%, 40-90%, 40-95%, 40-100%, 50-60%, 50-70%, 50-80%, 50-90%, 50-95%, 50-100%, 60-70%, 60-80%, 60-90%, 60-95%, 60-100%, 70-80%, 70-90%, 70-95%, 70-100%, 80-90%, 80-95%, 80-100%, 90-95%, 90-100% or 95-100%.

[0431] According to the present invention, the siRNA molecules are designed and tested for their ability in reducing SOD1 mRNA levels in cultured cells. Such siRNA molecules may form a duplex such as, but not limited to, include those listed in Table 4. As a non-limiting example, the siRNA duplexes may be siRNA duplex IDs: D-2741 to D-2909.

[0432] In one embodiment, the siRNA molecules comprise a miRNA seed match for SOD1 located in the guide strand. In another embodiment, the siRNA molecules comprise a miRNA seed match for SOD1 located in the passenger strand. In yet another embodiment, the siRNA duplexes or encoded dsRNA targeting SOD1 gene do not comprise a seed match for SOD1 located in the guide or passenger strand.

[0433] In one embodiment, the siRNA duplexes or encoded dsRNA targeting SOD1 gene may have almost no significant full-length off target effects for the guide strand. In another embodiment, the siRNA duplexes or encoded dsRNA targeting SOD1 gene may have almost no significant full-length off target effects for the passenger strand. The siRNA duplexes or encoded dsRNA targeting SOD1 gene may have less than 1%, 2%, 3%, 4%, 5%, 6%, 7%, 8%, 9%, 10%, 11%, 12%, 13%, 14%, 15%, 20%, 25%, 30%, 35%, 40%, 45%, 50%, 1-5%, 2-6%, 3-7%, 4-8%, 5-9%, 5-10%, 6-10%, 5-15%, 5-20%, 5-25% 5-30%, 10-20%, 10-30%, 10-40%, 10-50%, 15-30%, 15-40%, 15-45%, 20-40%, 20-50%, 25-50%, 30-40%, 30-50%, 35-50%, 40-50%, 45-50% full-length off target effects for the passenger strand. In yet another embodiment, the siRNA duplexes or encoded dsRNA targeting SOD1 gene may have almost no significant full-length off target effects for the guide strand or the passenger strand. The siRNA duplexes or encoded dsRNA targeting SOD1 gene may have less than 1%, 2%, 3%, 4%, 5%, 6%, 7%, 8%, 9%, 10%, 11%, 12%, 13%, 14%, 15%, 20%, 25%, 30%, 35%, 40%, 45%, 50%, 1-5%, 2-6%, 3-7%, 4-8%, 5-9%, 5-10%, 6-10%, 5-15%, 5-20%, 5-25% 5-30%, 10-20%, 10-30%, 10-40%, 10-50%, 15-30%, 15-40%, 15-45%, 20-40%, 20-50%, 25-50%, 30-40%, 30-50%, 35-50%, 40-50%, 45-50% full-length off target effects for the guide or passenger strand.

[0434] In one embodiment, the siRNA duplexes or encoded dsRNA targeting SOD1 gene may have high activity in vitro. In another embodiment, the siRNA molecules may have low activity in vitro. In yet another embodiment, the siRNA duplexes or dsRNA targeting the SOD1 gene may have high guide strand activity and low passenger strand activity in vitro.

[0435] In one embodiment, the siRNA molecules targeting SOD1 have a high guide strand activity and low passenger strand activity in vitro. The target knock-down (KD) by the guide strand may be at least 40%, 50%, 60%, 65%, 70%, 75%, 80%, 85%, 90%, 95%, 99%, 99.5% or 100%. The target knock-down by the guide strand may be 40-50%, 45-50%, 50-55%, 50-60%, 60-65%, 60-70%, 60-75%, 60-80%, 60-85%, 60-90%, 60-95%, 60-99%, 60-99.5%, 60-100%, 65-70%, 65-75%, 65-80%, 65-85%, 65-90%, 65-95%, 65-99%, 65-99.5%, 65-100%, 70-75%, 70-80%, 70-85%, 70-90%, 70-95%, 70-99%, 70-99.5%, 70-100%, 75-80%, 75-85%, 75-90%, 75-95%, 75-99%, 75-99.5%, 75-100%, 80-85%, 80-90%, 80-95%, 80-99%, 80-99.5%, 80-100%, 85-90%, 85-95%, 85-99%, 85-99.5%, 85-100%, 90-95%, 90-99%, 90-99.5%, 90-100%, 95-99%, 95-99.5%, 95-100%, 99-99.5%, 99-100% or 99.5-100%. As a non-limiting example, the target knock-down (KD) by the guide strand is greater than 70%. As a non-limiting example, the target knock-down (KD) by the guide strand is greater than 60%.

[0436] In one embodiment, the siRNA duplex target SOD1 is designed so there is no miRNA seed match for the sense or antise sequence to the non-SOD1 sequence.

[0437] In one embodiment, the IC₅₀ of the guide strand in the siRNA duplex targeting SOD1 for the nearest off target is greater than 100 multiplied by the IC₅₀ of the guide strand for the on-target gene, SOD1. As a non-limiting example, if the IC₅₀ of the guide strand for the nearest off target is greater than 100 multiplied by the IC₅₀ of the guide strand for the target then the siRNA molecules is said to have high guide strand selectivity for inhibiting SOD1 in vitro.

[0438] In one embodiment, the 5′ processing of the guide strand of the siRNA duplex targeting SOD1 has a correct start (n) at the 5′ end at least 75%, 80%, 85%, 90%, 95%, 99% or 100% of the time in vitro or in vivo. As a non-limiting example, the 5′ processing of the guide strand is precise and has a correct start (n) at the 5′ end at least 99% of the time in vitro. As a non-limiting example, the 5′ processing of the guide strand is precise and has a correct start (n) at the 5′ end at least 99% of the time in vivo. As a non-limiting example, the 5′ processing of the guide strand is precise and has a correct start (n) at the 5′ end at least 90% of the time in vitro. As a non-limiting example, the 5′ processing of the guide strand is precise and has a correct start (n) at the 5′ end at least 90% of the time in vivo. As a non-limiting example, the 5′ processing of the guide strand is precise and has a correct start (n) at the 5′ end at least 85% of the time in vitro. As a non-limiting example, the 5′ processing of the guide strand is precise and has a correct start (n) at the 5′ end at least 85% of the time in vivo.

[0439] In one embodiment, the 5′ processing of the guide strand of the siRNA duplex targeting SOD1 has a correct start (n) at the 5′ end in a range of 75-95%, 75-90%, 75-85%, 75-80%, 80-95%, 80-90%, 80-85%, 85-95%, 85-90%, or 90-95%. As a non-limiting example, the 5′ processing of the guide strand of the siRNA duplex targeting SOD1 has a correct start (n) at the 5′ end in a range of 75-95%.

[0440] In one embodiment, the 5′ processing of the guide strand of the siRNA duplex targeting SOD1 has a correct start (n) at the 5′ end for 75%, 75.1%, 75.2%, 75.3%, 75.4%, 75.5%, 75.6%, 75.7%, 75.8%, 75.9%, 76%, 76.1%, 76.2%, 76.3%, 76.4%, 76.5%, 76.6%, 76.7%, 76.8%, 76.9%, 77%, 77.1%, 77.2%, 77.3%, 77.4%, 77.5%, 77.6%, 77.7%, 77.8%, 77.9%, 78%, 78.1%, 78.2%, 78.3%, 78.4%, 78.5%, 78.6%, 78.7%, 78.8%, 78.9%, 79%, 79.1%, 79.2%, 79.3%, 79.4%, 79.5%, 79.6%, 79.7%, 79.8%, 79.9%, 80%, 80.1%, 80.2%, 80.3%, 80.4%, 80.5%, 80.6%, 80.7%, 80.8%, 80.9%, 81%, 81.1%, 81.2%, 81.3%, 81.4%, 81.5%, 81.6%, 81.7%, 81.8%, 81.9%, 82%, 82.1%, 82.2%, 82.3%, 82.4%, 82.5%, 82.6%, 82.7%, 82.8%, 82.9%, 83%, 83.1%, 83.2%, 83.3%, 83.4%, 83.5%, 83.6%, 83.7%, 83.8%, 83.9%, 84%, 84.1%, 84.2%, 84.3%, 84.4%, 84.5%, 84.6%, 84.7%, 84.8%, 84.9%, 85%, 85.1%, 85.2%, 85.3%, 85.4%, 85.5%, 85.6%, 85.7%, 85.8%, 85.9%, 86%, 86.1%, 86.2%, 86.3%, 86.4%, 86.5%, 86.6%, 86.7%, 86.8%, 86.9%, 87%, 87.1%, 87.2%, 87.3%, 87.4%, 87.5%, 87.6%, 87.7%, 87.8%, 87.9%, 88%, 88.1%, 88.2%, 88.3%, 88.4%, 88.5%, 88.6%, 88.7%, 88.8%, 88.9%, 89%, 89.1%, 89.2%, 89.3%, 89.4%, 89.5%, 89.6%, 89.7%, 89.8%, 89.9%, 90%, 90.1%, 90.2%, 90.3%, 90.4%, 90.5%, 90.6%, 90.7%, 90.8%, 90.9%, 91%, 91.1%, 91.2%, 91.3%, 91.4%, 91.5%, 91.6%, 91.7%, 91.8%, 91.9%, 92%, 92.1%, 92.2%, 92.3%, 92.4%, 92.5%, 92.6%, 92.7%, 92.8%, 92.9%, 93%, 93.1%, 93.2%, 93.3%, 93.4%, 93.5%, 93.6%, 93.7%, 93.8%, 93.9%, 94%, 94.1%, 94.2%, 94.3%, 94.4%, 94.5%, 94.6%, 94.7%, 94.8%, 94.9%, or 95% of the constructs expressed. As a non-limiting example, the 5′ processing of the guide strand of the siRNA duplex targeting SOD1 has a correct start (n) at the 5′ end for 81% of the constructs expressed. As a non-limiting example, the 5′ processing of the guide strand of the siRNA duplex targeting SOD1 has a correct start (n) at the 5′ end for 90% of the constructs expressed.

[0441] In one embodiment, a passenger-guide strand duplex for SOD1 is considered effective when the pri- or pre-microRNAs demonstrate, by methods known in the art and described herein, greater than 2-fold guide to passenger strand ratio when processing is measured. As a non-limiting examples, the pri- or pre-microRNAs demonstrate great than 2-fold, 3-fold, 4-fold, 5-fold, 6-fold, 7-fold, 8-fold, 9-fold, 10-fold, 11-fold, 12-fold, 13-fold, 14-fold, 15-fold, or 2 to 5-fold, 2 to 10-fold, 2 to 15-fold, 3 to 5-fold, 3 to 10-fold, 3 to 15-fold, 4 to 5-fold, 4 to 10-fold, 4 to 15-fold, 5 to 10-fold, 5 to 15-fold, 6 to 10-fold, 6 to 15-fold, 7 to 10-fold, 7 to 15-fold, 8 to 10-fold, 8 to 15-fold, 9 to 10-fold, 9 to 15-fold, 10 to 15-fold, 11 to 15-fold, 12 to 15-fold, 13 to 15-fold, or 14 to 15-fold guide to passenger strand ratio when processing is measured.

[0442] In one embodiment, the siRNA molecules may be used to silence wild type or mutant SOD1 by targeting at least one exon on the SOD1 sequence. The exon may be exon 1, exon 2, exon 3, exon 4, exon 5, exon 6, exon 7, exon 8, exon 9, exon 10, exon 11, exon 12, exon 13, exon 14, exon 15, exon 16, exon 17, exon 18, exon 19, exon 20, exon 21, exon 22, exon 23, exon 24, exon 25, exon 26, exon 27, exon 28, exon 29, exon 30, exon 31, exon 32, exon 33, exon 34, exon 35, exon 36, exon 37, exon 38, exon 39, exon 40, exon 41, exon 42, exon 43, exon 44, exon 45, exon 46, exon 47, exon 48, exon 49, exon 50, exon 51, exon 52, exon 53, exon 54, exon 55, exon 56, exon 57, exon 58, exon 59, exon 60, exon 61, exon 62, exon 63, exon 64, exon 65, exon 66, and/or exon 67.

[0443] In one embodiment, the range of guide strands to the total endogenous pool of miRNAs is 0.001-0.6%, 0.005-0.6%, 0.01-0.6%, 0.015-0.6%, 0.02-0.6%, 0.025-0.6%, 0.03-0.6%, 0.035-0.6%, 0.04-0.6%, 0.045-0.6%, 0.05-0.6%, 0.055-0.6%, 0.06-0.6%, 0.065-0.6%, 0.07-0.6%, 0.075-0.6%, 0.08-0.6%, 0.085-0.6%, 0.09-0.6%, 0.095-0.6%, 0.1-0.6%, 0.15-0.6%, 0.2-0.6%, 0.25-0.6%, 0.3-0.6%, 0.35-0.6%, 0.4-0.6%, 0.45-0.6%, 0.5-0.6%, 0.55-0.6%, 0.001-0.5%, 0.005-0.5%, 0.01-0.5%, 0.015-0.5%, 0.02-0.5%, 0.025-0.5%, 0.03-0.5%, 0.035-0.5%, 0.04-0.5%, 0.045-0.5%, 0.05-0.5%, 0.055-0.5%, 0.06-0.5%, 0.065-0.5%, 0.07-0.5%, 0.075-0.5%, 0.08-0.5%, 0.085-0.5%, 0.09-0.5%, 0.095-0.5%, 0.1-0.5%, 0.15-0.5%, 0.2-0.5%, 0.25-0.5%, 0.3-0.5%, 0.35-0.5%, 0.4-0.5%, 0.45-0.5%, 0.001-0.4%, 0.005-0.4%, 0.01-0.4%, 0.015-0.4%, 0.02-0.4%, 0.025-0.4%, 0.03-0.4%, 0.035-0.4%, 0.04-0.4%, 0.045-0.4%, 0.05-0.4%, 0.055-0.4%, 0.06-0.4%, 0.065-0.4%, 0.07-0.4%, 0.075-0.4%, 0.08-0.4%, 0.085-0.4%, 0.09-0.4%, 0.095-0.4%, 0.1-0.4%, 0.15-0.4%, 0.2-0.4%, 0.25-0.4%, 0.3-0.4%, 0.35-0.4%, 0.001-0.3%, 0.005-0.3%, 0.01-0.3%, 0.015-0.3%, 0.02-0.3%, 0.025-0.3%, 0.03-0.3%, 0.035-0.3%, 0.04-0.3%, 0.045-0.3%, 0.05-0.3%, 0.055-0.3%, 0.06-0.3%, 0.065-0.3%, 0.07-0.3%, 0.075-0.3%, 0.08-0.3%, 0.085-0.3%, 0.09-0.3%, 0.095-0.3%, 0.1-0.3%, 0.15-0.3%, 0.2-0.3%, 0.25-0.3%, 0.001-0.2%, 0.005-0.2%, 0.01-0.2%, 0.015-0.2%, 0.02-0.2%, 0.025-0.2%, 0.03-0.2%, 0.035-0.2%, 0.04-0.2%, 0.045-0.2%, 0.05-0.2%, 0.055-0.2%, 0.06-0.2%, 0.065-0.2%, 0.07-0.2%, 0.075-0.2%, 0.08-0.2%, 0.085-0.2%, 0.09-0.2%, 0.095-0.2%, 0.1-0.2%, 0.15-0.2%, 0.001-0.1%, 0.005-0.1%, 0.01-0.1%, 0.015-0.1%, 0.02-0.1%, 0.025-0.1%, 0.03-0.1%, 0.035-0.1%, 0.04-0.1%, 0.045-0.1%, 0.05-0.1%, 0.055-0.1%, 0.06-0.1%, 0.065-0.1%, 0.07-0.1%, 0.075-0.1%, 0.08-0.1%, 0.085-0.1%, 0.09-0.1%, or 0.095-0.1%. As a non-limiting example, the range is 0.06-0.6%. As a non-limiting example, the range is 0.4-0.5%.

[0444] In one embodiment, the percent of guide strands to the total endogenous pool of miRNAs is 0.001%, 0.002%, 0.003%, 0.004%, 0.005%, 0.006%, 0.007%, 0.008%, 0.009%, 0.01%, 0.02%, 0.03%, 0.04%, 0.05%, 0.06%, 0.07%, 0.08%, 0.09%, 0.1%, 0.2%, 0.3%, 0.4%, 0.5%, or 0.6%. As a non-limiting example, the percent is 0.06%. As a non-limiting example, the percent is 0.4%. As a non-limiting example, the percent is 0.5%.

[0445] siRNA Modification

[0446] In some embodiments, the siRNA molecules of the present invention, when not delivered as a precursor or DNA, may be chemically modified to modulate some features of RNA molecules, such as, but not limited to, increasing the stability of siRNAs in vivo. The chemically modified siRNA molecules can be used in human therapeutic applications, and are improved without compromising the RNAi activity of the siRNA molecules. As a non-limiting example, the siRNA molecules modified at both the 3′ and the 5′ end of both the sense strand and the antisense strand.

[0447] In some aspects, the siRNA duplexes of the present invention may contain one or more modified nucleotides such as, but not limited to, sugar modified nucleotides, nucleobase modifications and/or backbone modifications. In some aspects, the siRNA molecule may contain combined modifications, for example, combined nucleobase and backbone modifications.

[0448] In one embodiment, the modified nucleotide may be a sugar-modified nucleotide. Sugar modified nucleotides include, but are not limited to 2′-fluoro, 2′-amino and 2′-thio modified ribonucleotides, e.g. 2′-fluoro modified ribonucleotides. Modified nucleotides may be modified on the sugar moiety, as well as nucleotides having sugars or analogs thereof that are not ribosyl. For example, the sugar moieties may be, or be based on, mannoses, arabinoses, glucopyranoses, galactopyranoses, 4′-thioribose, and other sugars, heterocycles, or carbocycles.

[0449] In one embodiment, the modified nucleotide may be a nucleobase-modified nucleotide.

[0450] In one embodiment, the modified nucleotide may be a backbone-modified nucleotide. In some embodiments, the siRNA duplexes of the present invention may further comprise other modifications on the backbone. A normal “backbone”, as used herein, refers to the repeating alternating sugar-phosphate sequences in a DNA or RNA molecule. The deoxyribose/ribose sugars are joined at both the 3′-hydroxyl and 5′-hydroxyl groups to phosphate groups in ester links, also known as “phosphodiester” bonds/linker (PO linkage). The PO backbones may be modified as “phosphorothioate backbone (PS linkage). In some cases, the natural phosphodiester bonds may be replaced by amide bonds but the four atoms between two sugar units are kept. Such amide modifications can facilitate the solid phase synthesis of oligonucleotides and increase the thermodynamic stability of a duplex formed with siRNA complement. See e.g. Mesmaeker et al., Pure & Appl. Chem., 1997, 3, 437-440; the content of which is incorporated herein by reference in its entirety.

[0451] Modified bases refer to nucleotide bases such as, for example, adenine, guanine, cytosine, thymine, uracil, xanthine, inosine, and queuosine that have been modified by the replacement or addition of one or more atoms or groups. Some examples of modifications on the nucleobase moieties include, but are not limited to, alkylated, halogenated, thiolated, aminated, amidated, or acetylated bases, individually or in combination. More specific examples include, for example, 5-propynyluridine, 5-propynylcytidine, 6-methyladenine, 6-methylguanine, N,N,-dimethyladenine, 2-propyladenine, 2-propylguanine, 2-aminoadenine, 1-methylinosine, 3-methyluridine, 5-methylcytidine, 5-methyluridine and other nucleotides having a modification at the 5 position, 5-(2-amino)propyl uridine, 5-halocytidine, 5-halouridine, 4-acetylcytidine, 1-methyladenosine, 2-methyladenosine, 3-methylcytidine, 6-methyluridine, 2-methylguanosine, 7-methylguanosine, 2,2-dimethylguanosine, 5-methylaminoethyluridine, 5-methyloxyuridine, deazanucleotides such as 7-deaza-adenosine, 6-azouridine, 6-azocytidine, 6-azothymidine, 5-methyl-2-thiouridine, other thio bases such as 2-thiouridine and 4-thiouridine and 2-thiocytidine, dihydrouridine, pseudouridine, queuosine, archaeosine, naphthyl and substituted naphthyl groups, any O- and N-alkylated purines and pyrimidines such as N6-methyladenosine, 5-methylcarbonylmethyluridine, uridine 5-oxyacetic acid, pyridine-4-one, pyridine-2-one, phenyl and modified phenyl groups such as aminophenol or 2,4,6-trimethoxy benzene, modified cytosines that act as G-clamp nucleotides, 8-substituted adenines and guanines, 5-substituted uracils and thymines, azapyrimidines, carboxyhydroxyalkyl nucleotides, carboxyalkylaminoalkyl nucleotides, and alkylcarbonylalkylated nucleotides.

[0452] In one embodiment, the modified nucleotides may be on just the sense strand.

[0453] In another embodiment, the modified nucleotides may be on just the antisense strand.

[0454] In some embodiments, the modified nucleotides may be in both the sense and antisense strands.

[0455] In some embodiments, the chemically modified nucleotide does not affect the ability of the antisense strand to pair with the target mRNA sequence.

[0456] In one embodiment, the AAV particle comprising a nucleic acid sequence encoding the siRNA molecules of the present invention may encode siRNA molecules which are polycistronic molecules. The siRNA molecules may additionally comprise one or more linkers between regions of the siRNA molecules.

[0457] Molecular Scaffold

[0458] In one embodiment, the siRNA molecules may be encoded in a modulatory polynucleotide which also comprises a molecular scaffold. As used herein a “molecular scaffold” is a framework or starting molecule that forms the sequence or structural basis against which to design or make a subsequent molecule.

[0459] In one embodiment, the molecular scaffold comprises at least one 5′ flanking region. As a non-limiting example, the 5′ flanking region may comprise a 5′ flanking sequence which may be of any length and may be derived in whole or in part from wild type microRNA sequence or be a completely artificial sequence.

[0460] In one embodiment, the molecular scaffold comprises at least one 3′ flanking region. As a non-limiting example, the 3′ flanking region may comprise a 3′ flanking sequence which may be of any length and may be derived in whole or in part from wild type microRNA sequence or be a completely artificial sequence.

[0461] In one embodiment, the molecular scaffold comprises at least one loop motif region. As a non-limiting example, the loop motif region may comprise a sequence which may be of any length.

[0462] In one embodiment, the molecular scaffold comprises a 5′ flanking region, a loop motif region and/or a 3′ flanking region.

[0463] In one embodiment, at least one siRNA, miRNA or other RNAi agent described herein, may be encoded by a modulatory polynucleotide which may also comprise at least one molecular scaffold.

[0464] The molecular scaffold may comprise a 5′ flanking sequence which may be of any length and may be derived in whole or in part from wild type microRNA sequence or be completely artificial. The 3′ flanking sequence may mirror the 5′ flanking sequence and/or a 3′ flanking sequence in size and origin. Either flanking sequence may be absent. The 3′ flanking sequence may optionally contain one or more CNNC motifs, where “N” represents any nucleotide.

[0465] Forming the stem of a stem loop structure is a minimum of the modulatory polynucleotide encoding at least one siRNA, miRNA or other RNAi agent described herein. In some embodiments, the siRNA, miRNA or other RNAi agent described herein comprises at least one nucleic acid sequence which is in part complementary or will hybridize to a target sequence. In some embodiments the payload is an siRNA molecule or fragment of an siRNA molecule.

[0466] In some embodiments, the 5′ arm of the stem loop structure of the modulatory polynucleotide comprises a nucleic acid sequence encoding a sense sequence. Non-limiting examples of sense sequences, or fragments or variants thereof, which may be encoded by the modulatory polynucleotide are described in Table 3.

[0467] In some embodiments, the 3′ arm of the stem loop of the modulatory polynucleotide comprises a nucleic acid sequence encoding an antisense sequence. The antisense sequence, in some instances, comprises a “G” nucleotide at the 5′ most end. Non-limiting examples of antisense sequences, or fragments or variants thereof, which may be encoded by the modulatory polynucleotide are described in Table 2.

[0468] In other embodiments, the sense sequence may reside on the 3′ arm while the antisense sequence resides on the 5′ arm of the stem of the stem loop structure of the modulatory polynucleotide. Non-limiting examples of sense and antisense sequences which may be encoded by the modulatory polynucleotide are described in Tables 2 and 3.

[0469] In one embodiment, the sense and antisense sequences may be completely complementary across a substantial portion of their length. In other embodiments the sense sequence and antisense sequence may be at least 70, 80, 90, 95 or 99% complementarity across independently at least 50, 60, 70, 80, 85, 90, 95, or 99% of the length of the strands.

[0470] Neither the identity of the sense sequence nor the homology of the antisense sequence need to be 100% complementarity to the target sequence.

[0471] In one embodiment, separating the sense and antisense sequence of the stem loop structure of the modulatory polynucleotide is a loop sequence (also known as a loop motif, linker or linker motif).

[0472] The loop sequence may be of any length, between 4-30 nucleotides, between 4-20 nucleotides, between 4-15 nucleotides, between 5-15 nucleotides, between 6-12 nucleotides, 6 nucleotides, 7 nucleotides, 8 nucleotides, 9 nucleotides, 10 nucleotides, 11 nucleotides, 12 nucleotides, 13 nucleotides, 14 nucleotides, and/or 15 nucleotides.

[0473] In some embodiments, the loop sequence comprises a nucleic acid sequence encoding at least one UGUG motif. In some embodiments, the nucleic acid sequence encoding the UGUG motif is located at the 5′ terminus of the loop sequence.

[0474] In one embodiment, spacer regions may be present in the modulatory polynucleotide to separate one or more modules (e.g., 5′ flanking region, loop motif region, 3′ flanking region, sense sequence, antisense sequence) from one another. There may be one or more such spacer regions present.

[0475] In one embodiment, a spacer region of between 8-20, i.e., 8, 9, 10, 11, 12, 13, 14, 15, 16, 17, 18, 19, or 20 nucleotides may be present between the sense sequence and a flanking region sequence.

[0476] In one embodiment, the length of the spacer region is 13 nucleotides and is located between the 5′ terminus of the sense sequence and the 3′ terminus of the flanking sequence. In one embodiment, a spacer is of sufficient length to form approximately one helical turn of the sequence.

[0477] In one embodiment, a spacer region of between 8-20, i.e., 8, 9, 10, 11, 12, 13, 14, 15, 16, 17, 18, 19, or 20 nucleotides may be present between the antisense sequence and a flanking sequence.

[0478] In one embodiment, the spacer sequence is between 10-13, i.e., 10, 11, 12 or 13 nucleotides and is located between the 3′ terminus of the antisense sequence and the 5′ terminus of a flanking sequence. In one embodiment, a spacer is of sufficient length to form approximately one helical turn of the sequence.

[0479] In one embodiment, the molecular scaffold of the modulatory polynucleotide comprises in the 5′ to 3′ direction, a 5′ flanking sequence, a 5′ arm, a loop motif, a 3′ arm and a 3′ flanking sequence. As a non-limiting example, the 5′ arm may comprise a nucleic acid sequence encoding a sense sequence and the 3′ arm comprises a nucleic acid sequence encoding the antisense sequence. In another non-limiting example, the 5′ arm comprises a nucleic acid sequence encoding the antisense sequence and the 3′ arm comprises a nucleic acid sequence encoding the sense sequence.

[0480] In one embodiment, the 5′ arm, sense and/or antisense sequence, loop motif and/or 3′ arm sequence may be altered (e.g., substituting 1 or more nucleotides, adding nucleotides and/or deleting nucleotides). The alteration may cause a beneficial change in the function of the construct (e.g., increase knock-down of the target sequence, reduce degradation of the construct, reduce off target effect, increase efficiency of the payload, and reduce degradation of the payload).

[0481] In one embodiment, the molecular scaffold of the modulatory polynucleotides is aligned in order to have the rate of excision of the guide strand (also referred to herein as the antisense strand) be greater than the rate of excision of the passenger strand (also referred to herein as the sense strand). The rate of excision of the guide or passenger strand may be, independently, 1%, 2%, 3%, 4%, 5%, 10%, 15%, 20%, 25%, 30%, 35%, 40%, 45%, 50%, 55%, 60%, 65%, 70%, 75%, 80%, 85%, 90%, 95%, 99% or more than 99%. As a non-limiting example, the rate of excision of the guide strand is at least 80%. As another non-limiting example, the rate of excision of the guide strand is at least 90%.

[0482] In one embodiment, the rate of excision of the guide strand is greater than the rate of excision of the passenger strand. In one aspect, the rate of excision of the guide strand may be at least 1%, 2%, 3%, 4%, 5%, 10%, 15%, 20%, 25%, 30%, 35%, 40%, 45%, 50%, 55%, 60%, 65%, 70%, 75%, 80%, 85%, 90%, 95%, 99% or more than 99% greater than the passenger strand.

[0483] In one embodiment, the efficiency of excision of the guide strand is at least 60%, 65%, 70%, 75%, 80%, 85%, 90%, 95%, 99% or more than 99%. As a non-limiting example, the efficiency of the excision of the guide strand is greater than 80%.

[0484] In one embodiment, the efficiency of the excision of the guide strand is greater than the excision of the passenger strand from the molecular scaffold. The excision of the guide strand may be 2, 3, 4, 5, 6, 7, 8, 9, 10 or more than 10 times more efficient than the excision of the passenger strand from the molecular scaffold.

[0485] In one embodiment, the molecular scaffold comprises a dual-function targeting modulatory polynucleotide. As used herein, a “dual-function targeting” modulatory polynucleotide is a polynucleotide where both the guide and passenger strands knock down the same target or the guide and passenger strands knock down different targets.

[0486] In one embodiment, the molecular scaffold of the modulatory polynucleotides described herein may comprise a 5′ flanking region, a loop motif region and a 3′ flanking region. Non-limiting examples of the sequences for the 5′ flanking region, loop motif region (may also be referred to as a linker region) and the 3′ flanking region which may be used, or fragments thereof used, in the modulatory polynucleotides described herein are shown in Tables 5-7.

TABLE 5
5′ Flanking, Regions for Molecular Scaffold

| 5′ | | 5′ |
|---|---|---|
| Flanking | | Flanking |
| Region | | Region |
| Name | 5′ Flanking Region Sequence | SEQ ID |
| 5F1 | GTGCTGGGCGGGGGGCGGCGGGCCCTCCCGC | 1255 |
| | AGAACACCATGCGCTCTTCGGAA | |
| 5F2 | GAAGCAAAGAAGGGGCAGAGGGAGCCCGTG | 1256 |
| | AGCTGAGTGGGCCAGGGACTGGGAGAAGGAG | |
| | TGAGGAGGCAGGGCCGGCATGCCTCTGCTGC | |
| | TGGCCAGA | |
| 5F3 | GTGCTGGGCGGGGGGCGGCGGGCCCTCCCGC | 1257 |
| | AGAACACCATGCGCTCCACGGAA | |
| 5F4 | GGGCCCTCCCGCAGAACACCATGCGCTCCAC | 1258 |
| | GGAA | |
| 5F5 | CTCCCGCAGAACACCATGCGCTCCACGGAA | 1259 |
| 5F6 | GTGCTGGGCGGGGGGCGGCGGGCCCTCCCGC | 1260 |
| | AGAACACCATGCGCTCCACGGAAG | |
| 5F7 | GTGCTGGGCGGGGGGCGGCGGGCCCTCCCGC | 1261 |
| | AGAACACCATGCGCTCCTCGGAA | |
| 5F8 | TTTATGCCTCATCCTCTGAGTGCTGAAGGCTT | 1262 |
| | GCTGTAGGCTGTATGCTG | |
| 5F9 | GTGCTGGGCGGGGGGCGGCGGGCCCTCCCGC | 1263 |
| | AGAACACCATGCGCTCTTCGGGA | |

TABLE 6
Loop Motif Regions for Molecular Scaffold

| Loop | | Loop |
|---|---|---|
| Motif | | Motif |
| Region | Loop Motif | Region |
| Name | Region Sequence | SEQ ID |
| L1 | TGTGACCTGG | 1264 |
| L2 | TGTGATTTGG | 1265 |
| L3 | GTCTGCACCTGTCACTAG | 1266 |
| L4 | GTGACCCAAG | 1267 |
| L5 | GTGGCCACTGAGAAG | 1268 |
| L6 | GTGACCCAAT | 1269 |
| L7 | GTGACCCAAC | 1270 |
| L8 | GTGGCCACTGAGAAA | 1271 |
| L9 | TATAATTTGG | 1272 |
| L10 | CCTGACCCAGT | 1273 |

TABLE 7
3′ Flanking Regions for Molecular Scaffold

| 3′ | | 3′ |
|---|---|---|
| Flanking | | Flanking |
| Region | | Region |
| Name | 3′ Flanking Region Sequence | SEQ ID |
| 3F1 | CTGAGGAGCGCCTTGACAGCAGCCATGGGAG | 1274 |
| | GGCCGCCCCCTACCTCAGTGA | |
| 3F2 | CTGTGGAGCGCCTTGACAGCAGCCATGGGAG | 1275 |
| | GGCCGCCCCCTACCTCAGTGA | |
| 3F3 | TGGCCGTGTAGTGCTACCCAGCGCTGGCTGCC | 1276 |
| | TCCTCAGCATTGCAATTCCTCTCCCATCTGGG | |
| | CACCAGTCAGCTACCCTGGTGGGAATCTGGGT | |
| | AGCC | |
| 3F4 | CTGAGGAGCGCCTTGACAGCAGCCATGGGAG | 1277 |
| | GGCC | |
| 3F5 | CTGCGGAGCGCCTTGACAGCAGCCATGGGAG | 1278 |
| | GGCCGCCCCCTACCTCAGTGA | |
| 3F6 | AGTGTATGATGCCTGTTACTAGCATTCACATG | 1279 |
| | GAACAAATTGCTGCCGTG | |
| 3F7 | TCCTGAGGAGCGCCTTGACAGCAGCCATGGG | 1280 |
| | AGGGCCGCCCCCTACCTCAGTGA | |

[0487] In one embodiment, the molecular scaffold may comprise at least one 5′ flanking region, fragment or variant thereof listed in Table 5. As a non-limiting example, the 5′ flanking region may be 51F1, 5F2, 5F3, 5F4, 5F5, 5F6, 5F7, 5F8, or 5F9.

[0488] In one embodiment, the molecular scaffold may comprise at least one 51F1 flanking region.

[0489] In one embodiment, the molecular scaffold may comprise at least one 51F2 flanking region.

[0490] In one embodiment, the molecular scaffold may comprise at least one 51F3 flanking region.

[0491] In one embodiment, the molecular scaffold may comprise at least one 51F4 flanking region.

[0492] In one embodiment, the molecular scaffold may comprise at least one 5F5 flanking region.

[0493] In one embodiment, the molecular scaffold may comprise at least one 5F6 flanking region.

[0494] In one embodiment, the molecular scaffold may comprise at least one 5F7 flanking region.

[0495] In one embodiment, the molecular scaffold may comprise at least one 5F8 flanking region.

[0496] In one embodiment, the molecular scaffold may comprise at least one 5F9 flanking region.

[0497] In one embodiment, the molecular scaffold may comprise at least one loop motif region, fragment or variant thereof listed in Table 6. As a non-limiting example, the loop motif region may be L1, L2, L3, L4, L5, L6, L7, L8, L9, or L10.

[0498] In one embodiment, the molecular scaffold may comprise at least one L1 loop motif region.

[0499] In one embodiment, the molecular scaffold may comprise at least one L2 loop motif region.

[0500] In one embodiment, the molecular scaffold may comprise at least one L3 loop motif region.

[0501] In one embodiment, the molecular scaffold may comprise at least one L4 loop motif region.

[0502] In one embodiment, the molecular scaffold may comprise at least one L5 loop motif region.

[0503] In one embodiment, the molecular scaffold may comprise at least one L6 loop motif region.

[0504] In one embodiment, the molecular scaffold may comprise at least one L7 loop motif region.

[0505] In one embodiment, the molecular scaffold may comprise at least one L8 loop motif region.

[0506] In one embodiment, the molecular scaffold may comprise at least one L9 loop motif region.

[0507] In one embodiment, the molecular scaffold may comprise at least one L10 loop motif region.

[0508] In one embodiment, the molecular scaffold may comprise at least one 3′ flanking region, fragment or variant thereof listed in Table 7. As a non-limiting example, the 3′ flanking region may be 3F1, 3F2, 3F3, 3F4, 3F5, 3F6, or 3F7.

[0509] In one embodiment, the molecular scaffold may comprise at least one 3F1 flanking region.

[0510] In one embodiment, the molecular scaffold may comprise at least one 3F2 flanking region.

[0511] In one embodiment, the molecular scaffold may comprise at least one 3F3 flanking region.

[0512] In one embodiment, the molecular scaffold may comprise at least one 3F4 flanking region.

[0513] In one embodiment, the molecular scaffold may comprise at least one 3F5 flanking region.

[0514] In one embodiment, the molecular scaffold may comprise at least one 3F6 flanking region.

[0515] In one embodiment, the molecular scaffold may comprise at least one 3F7 flanking region.

[0516] In one embodiment, the molecular scaffold may comprise at least one 5′ flanking region, fragment or variant thereof, and at least one loop motif region, fragment or variant thereof, as described in Tables 5 and 6. As a non-limiting example, the 5′ flanking region and the loop motif region may be 5F1 and L1, 5F1 and L2, 5F1 and L3, 5F1 and L4, 5F1 and L5, 5F1 and L6, 5F1 and L7, 5F1 and L8, 5F1 and L9, 5F1 and L10, 5F2 and L1, 5F2 and L2, 5F2 and L3, 5F2 and L4, 5F2 and L5, 5F2 and L6, 5F2 and L7, 5F2 and L8, 5F2 and L9, 5F2 and L10, 5F3 and L1, 5F3 and L2, 5F3 and L3, 5F3 and L4, 5F3 and L5, 5F3 and L6, 5F3 and L7, 5F3 and L8, 5F3 and L9, 5F3 and L10, 5F4 and L1, 5F4 and L2, 5F4 and L3, 5F4 and L4, 5F4 and L5, 5F4 and L6, 5F4 and L7, 5F4 and L8, 5F4 and L9, 5F4 and L10, 5F5 and L1, 5F5 and L2, 5F5 and L3, 5F5 and L4, 5F5 and L5, 5F5 and L6, 5F5 and L7, 5F5 and L8, 5F5 and L9, 5F5 and L10, 5F6 and L1, 5F6 and L2, 5F6 and L3, 5F6 and L4, 5F6 and L5, 5F6 and L6, 5F6 and L7, 5F6 and L8, 5F6 and L9, 5F6 and L10, 5F7 and L1, 5F7 and L2, 5F7 and L3, 5F7 and L4, 5F7 and L5, 5F7 and L6, 5F7 and L7, 5F7 and L8, 5F7 and L9, 5F7 and L10, 5F8 and L1, 5F8 and L2, 5F8 and L3, 5F8 and L4, 5F8 and L5, 5F8 and L6, 5F8 and L7, 5F8 and L8, 5F8 and L9, 5F8 and L10, 5F9 and L1, 5F9 and L2, 5F9 and L3, 5F9 and L4, 5F9 and L5, 5F9 and L6, 5F9 and L7, 5F9 and L8, 5F9 and L9, and 5F9 and L10.

[0517] In one embodiment, the molecular scaffold may comprise at least one 5F2 flanking region and at least one L1 loop motif region.

[0518] In one embodiment, the molecular scaffold may comprise at least one 5F1 flanking region and at least one L4 loop motif region.

[0519] In one embodiment, the molecular scaffold may comprise at least one 5F7 flanking region and at least one L8 loop motif region.

[0520] In one embodiment, the molecular scaffold may comprise at least one 5F3 flanking region and at least one L4 loop motif region.

[0521] In one embodiment, the molecular scaffold may comprise at least one 5F3 flanking region and at least one L5 loop motif region.

[0522] In one embodiment, the molecular scaffold may comprise at least one 5F4 flanking region and at least one L4 loop motif region.

[0523] In one embodiment, the molecular scaffold may comprise at least one 5F3 flanking region and at least one L7 loop motif region.

[0524] In one embodiment, the molecular scaffold may comprise at least one 5F5 flanking region and at least one L4 loop motif region.

[0525] In one embodiment, the molecular scaffold may comprise at least one 5F6 flanking region and at least one L4 loop motif region.

[0526] In one embodiment, the molecular scaffold may comprise at least one 5F3 flanking region and at least one L6 loop motif region.

[0527] In one embodiment, the molecular scaffold may comprise at least one 5F7 flanking region and at least one L4 loop motif region.

[0528] In one embodiment, the molecular scaffold may comprise at least one 5F2 flanking region and at least one L2 loop motif region.

[0529] In one embodiment, the molecular scaffold may comprise at least one 5F1 flanking region and at least one L1 loop motif region.

[0530] In one embodiment, the molecular scaffold may comprise at least one 5F1 flanking region and at least one L2 loop motif region.

[0531] In one embodiment, the molecular scaffold may comprise at least one 3′ flanking region, fragment or variant thereof, and at least one motif region, fragment or variant thereof, as described in Tables 6 and 7. As a non-limiting example, the 3′ flanking region and the loop motif region may be 3F1 and L1, 3F1 and L2, 3F1 and L3, 3F1 and L4, 3F1 and L5, 3F1 and L6, 3F1 and L7, 3F1 and L8, 3F1 and L9, 3F1 and L10, 3F2 and L1, 3F2 and L2, 3F2 and L3, 3F2 and L4, 3F2 and L5, 3F2 and L6, 3F2 and L7, 3F2 and L8, 3F2 and L9, 3F2 and L10, 3F3 and L1, 3F3 and L2, 3F3 and L3, 3F3 and L4, 3F3 and L5, 3F3 and L6, 3F3 and L7, 3F3 and L8, 3F3 and L9, 3F3 and L10, 3F4 and L1, 3F4 and L2, 3F4 and L3, 3F4 and L4, 3F4 and L5, 3F4 and L6, 3F4 and L7, 3F4 and L8, 3F4 and L9, 3F4 and L10, 3F5 and L1, 3F5 and L2, 3F5 and L3, 3F5 and L4, 3F5 and L5, 3F5 and L6, 3F5 and L7, 3F5 and L8, 3F5 and L9, 3F5 and L10, 3F6 and L1, 3F6 and L2, 3F6 and L3, 3F6 and L4, 3F6 and L5, 3F6 and L6, 3F6 and L7, 3F6 and L8, 3F6 and L9, 3F6 and L10, 3F7 and L1, 3F7 and L2, 3F7 and L3, 3F7 and L4, 3F7 and L5, 3F7 and L6, 3F7 and L7, 3F7 and L8, 3F7 and L9, and 3F7 and L10.

[0532] In one embodiment, the molecular scaffold may comprise at least one L1 loop motif region and at least one 3F2 flanking region.

[0533] In one embodiment, the molecular scaffold may comprise at least one L4 loop motif region and at least one 3F1 flanking region.

[0534] In one embodiment, the molecular scaffold may comprise at least one L8 loop motif region and at least one 3F5 flanking region.

[0535] In one embodiment, the molecular scaffold may comprise at least one L5 loop motif region and at least 3F1 flanking region.

[0536] In one embodiment, the molecular scaffold may comprise at least one L4 loop motif region and at least one 3F4 flanking region.

[0537] In one embodiment, the molecular scaffold may comprise at least one L7 loop motif region and at least one 3F1 flanking region.

[0538] In one embodiment, the molecular scaffold may comprise at least one L6 loop motif region and at least one 3F1 flanking region.

[0539] In one embodiment, the molecular scaffold may comprise at least one L4 loop motif region and at least one 3F5 flanking region.

[0540] In one embodiment, the molecular scaffold may comprise at least one L2 loop motif region and at least one 3F2 flanking region.

[0541] In one embodiment, the molecular scaffold may comprise at least one L1 loop motif region and at least one 3F3 flanking region.

[0542] In one embodiment, the molecular scaffold may comprise at least one L5 loop motif region and at least one 3F4 flanking region.

[0543] In one embodiment, the molecular scaffold may comprise at least one L1 loop motif region and at least one 3F1 flanking region.

[0544] In one embodiment, the molecular scaffold may comprise at least one L2 loop motif region and at least one 3F1 flanking region.

[0545] In one embodiment, the molecular scaffold may comprise at least one 5′ flanking region, fragment or variant thereof, and at least one 3′ flanking region, fragment or variant thereof, as described in Tables 5 and 7. As a non-limiting example, the flanking regions may be 5F1 and 3F1, 5F1 and 3F2, 5F1 and 3F3, 5F1 and 3F4, 5F1 and 3F5, 5F1 and 3F6, 5F1 and 3F7, 5F2 and 3F1, 5F2 and 3F2, 5F2 and 3F3, 5F2 and 3F4, 5F2 and 3F5, 5F2 and 3F6, 5F2 and 3F7, 5F3 and 3F1, 5F3 and 3F2, 5F3 and 3F3, 5F3 and 3F4, 5F3 and 3F5, 5F3 and 3F6, 5F3 and 3F7, 5F4 and 3F1, 5F4 and 3F2, 5F4 and 3F3, 5F4 and 3F4, 5F4 and 3F5, 5F4 and 3F6, 5F4 and 3F7, 5F5 and 3F1, 5F5 and 3F2, 5F5 and 3F3, 5F5 and 3F4, 5F5 and 3F5, 5F5 and 3F6, 5F5 and 3F7, 5F6 and 3F1, 5F6 and 3F2, 5F6 and 3F3, 5F6 and 3F4, 5F6 and 3F5, 5F6 and 3F6, 5F6 and 3F7, 5F7 and 3F1, 5F7 and 3F2, 5F7 and 3F3, 5F7 and 3F4, 5F7 and 3F5, 5F7 and 3F6, 5F7 and 3F7, 5F8 and 3F1, 5F8 and 3F2, 5F8 and 3F3, 5F8 and 3F4, 5F8 and 3F5, 5F8 and 3F6, and 5F8 and 3F7. 5F9 and 3F1, 5F9 and 3F2, 5F9 and 3F3, 5F9 and 3F4, 5F9 and 3F5, 5F9 and 3F6, and 5F9 and 3F7

[0546] In one embodiment, the molecular scaffold may comprise at least one 5F2 5′ flanking region and at least one 3F2 3′ flanking region.

[0547] In one embodiment, the molecular scaffold may comprise at least one 5F1 5′ flanking region and at least one 3F1 3′ flanking region.

[0548] In one embodiment, the molecular scaffold may comprise at least one 5F7 5′ flanking region and at least one 3F5 3′ flanking region.

[0549] In one embodiment, the molecular scaffold may comprise at least one 5F3 5′ flanking region and at least one 3F1 3′ flanking region.

[0550] In one embodiment, the molecular scaffold may comprise at least one 5F4 5′ flanking region and at least one 3F4 3′ flanking region.

[0551] In one embodiment, the molecular scaffold may comprise at least one 5F5 5′ flanking region and at least one 3F4 3′ flanking region.

[0552] In one embodiment, the molecular scaffold may comprise at least one 5F6 5′ flanking region and at least one 3F1 3′ flanking region.

[0553] In one embodiment, the molecular scaffold may comprise at least one 5F2 5′ flanking region and at least one 3F3 3′ flanking region.

[0554] In one embodiment, the molecular scaffold may comprise at least one 5F3 5′ flanking region and at least one 3F4 3′ flanking region.

[0555] In one embodiment, the molecular scaffold may comprise at least one 5F1 5′ flanking region and at least one 3F2 3′ flanking region.

[0556] In one embodiment, the molecular scaffold may comprise at least one 5′ flanking region, fragment or variant thereof, at least one loop motif region, fragment or variant thereof, and at least one 3′ flanking region as described in Tables 5-7. As a non-limiting example, the flanking and loop motif regions may be 5F1, L1 and 3F1; 5F1, L1 and 3F2; 5F1, L1 and 3F3; 5F1, L1 and 3F4; 5F1, L1 and 3F5; 5F1, L1 and 3F6; 5F1, L1 and 3F7; 5F2, L1 and 3F1; 5F2, L1 and 3F2; 5F2, L1 and 3F3; 5F2, L1 and 3F4; 5F2, L1 and 3F5; 5F2, L1 and 3F6; 5F2, L1 and 3F7; 5F3, L1 and 3F1; 5F3, L1 and 3F2; 5F3, L1 and 3F3; 5F3, L1 and 3F4; 5F3, L1 and 3F5; 5F3, L1 and 3F6; 5F3, L1 and 3F7; 5F4, L1 and 3F1; 5F4, L1 and 3F2; 5F4, L1 and 3F3; 5F4, L1 and 3F4; 5F4, L1 and 3F5; 5F4, L1 and 3F6; 5F4, L1 and 3F7; 5F5, L1 and 3F1; 5F5, L1 and 3F2; 5F5, L1 and 3F3; 5F5, L1 and 3F4; 5F5, L1 and 3F5; 5F5, L1 and 3F6; 5F5, L1 and 3F7; 5F6, L1 and 3F1; 5F6, L1 and 3F2; 5F6, L1 and 3F3; 5F6, L1 and 3F4; 5F6, L1 and 3F5; 5F6, L1 and 3F6; 5F6, L1 and 3F7; 5F7, L1 and 3F1; 5F7, L1 and 3F2; 5F7, L1 and 3F3; 5F7, L1 and 3F4; 5F7, L1 and 3F5; 5F7, L1 and 3F6; 5F7, L1 and 3F7; 5F8, L1 and 3F1; 5F8, L1 and 3F2; 5F8, L1 and 3F3; 5F8, L1 and 3F4; 5F8, L1 and 3F5; 5F8, L1 and 3F6; 5F8, L1 and 3F7; 5F9, L1 and 3F1; 5F9, L1 and 3F2; 5F9, L1 and 3F3; 5F9, L1 and 3F4; 5F9, L1 and 3F5; 5F9, L1 and 3F6; 5F9, L1 and 3F7; 5F1, L2 and 3F1; 5F1, L2 and 3F2; 5F1, L2 and 3F3; 5F1, L2 and 3F4; 5F1, L2 and 3F5; 5F1, L2 and 3F6; 5F1, L2 and 3F7; 5F2, L2 and 3F1; 5F2, L2 and 3F2; 5F2, L2 and 3F3; 5F2, L2 and 3F4; 5F2, L2 and 3F5; 5F2, L2 and 3F6; 5F2, L2 and 3F7; 5F3, L2 and 3F1; 5F3, L2 and 3F2; 5F3, L2 and 3F3; 5F3, L2 and 3F4; 5F3, L2 and 3F5; 5F3, L2 and 3F6; 5F3, L2 and 3F7; 5F4, L2 and 3F1; 5F4, L2 and 3F2; 5F4, L2 and 3F3; 5F4, L2 and 3F4; 5F4, L2 and 3F5; 5F4, L2 and 3F6; 5F4, L2 and 3F7; 5F5, L2 and 3F1; 5F5, L2 and 3F2; 5F5, L2 and 3F3; 5F5, L2 and 3F4; 5F5, L2 and 3F5; 5F5, L2 and 3F6; 5F5, L2 and 3F7; 5F6, L2 and 3F1; 5F6, L2 and 3F2; 5F6, L2 and 3F3; 5F6, L2 and 3F4; 5F6, L2 and 3F5; 5F6, L2 and 3F6; 5F6, L2 and 3F7; 5F7, L2 and 3F1; 5F7, L2 and 3F2; 5F7, L2 and 3F3; 5F7, L2 and 3F4; 5F7, L2 and 3F5; 5F7, L2 and 3F6; 5F7, L2 and 3F7; 5F8, L2 and 3F1; 5F8, L2 and 3F2; 5F8, L2 and 3F3; 5F8, L2 and 3F4; 5F8, L2 and 3F5; 5F8, L2 and 3F6; 5F8, L2 and 3F7; 5F9, L2 and 3F1; 5F9, L2 and 3F2; 5F9, L2 and 3F3; 5F9, L2 and 3F4; 5F9, L2 and 3F5; 5F9, L2 and 3F6; 5F9, L2 and 3F7; 5F1, L3 and 3F1; 5F1, L3 and 3F2; 5F1, L3 and 3F3; 5F1, L3 and 3F4; 5F1, L3 and 3F5; 5F1, L3 and 3F6; 5F1, L3 and 3F7; 5F2, L3 and 3F1; 5F2, L3 and 3F2; 5F2, L3 and 3F3; 5F2, L3 and 3F4; 5F2, L3 and 3F5; 5F2, L3 and 3F6; 5F2, L3 and 3F7; 5F3, L3 and 3F1; 5F3, L3 and 3F2; 5F3, L3 and 3F3; 5F3, L3 and 3F4; 5F3, L3 and 3F5; 5F3, L3 and 3F6; 5F3, L3 and 3F7; 5F4, L3 and 3F1; 5F4, L3 and 3F2; 5F4, L3 and 3F3; 5F4, L3 and 3F4; 5F4, L3 and 3F5; 5F4, L3 and 3F6; 5F4, L3 and 3F7; 5F5, L3 and 3F1; 5F5, L3 and 3F2; 5F5, L3 and 3F3; 5F5, L3 and 3F4; 5F5, L3 and 3F5; 5F5, L3 and 3F6; 5F5, L3 and 3F7; 5F6, L3 and 3F1; 5F6, L3 and 3F2; 5F6, L3 and 3F3; 5F6, L3 and 3F4; 5F6, L3 and 3F5; 5F6, L3 and 3F6; 5F6, L3 and 3F7; 5F7, L3 and 3F1; 5F7, L3 and 3F2; 5F7, L3 and 3F3; 5F7, L3 and 3F4; 5F7, L3 and 3F5; 5F7, L3 and 3F6; 5F7, L3 and 3F7; 5F8, L3 and 3F1; 5F8, L3 and 3F2; 5F8, L3 and 3F3; 5F8, L3 and 3F4; 5F8, L3 and 3F5; 5F8, L3 and 3F6; 5F8, L3 and 3F7; 5F9, L3 and 3F1; 5F9, L3 and 3F2; 5F9, L3 and 3F3; 5F9, L3 and 3F4; 5F9, L3 and 3F5; 5F9, L3 and 3F6; 5F9, L3 and 3F7; 5F1, L4 and 3F1; 5F1, L4 and 3F2; 5F1, L4 and 3F3; 5F1, L4 and 3F4; 5F1, L4 and 3F5; 5F1, L4 and 3F6; 5F1, L4 and 3F7; 5F2, L4 and 3F1; 5F2, L4 and 3F2; 5F2, L4 and 3F3; 5F2, L4 and 3F4; 5F2, L4 and 3F5; 5F2, L4 and 3F6; 5F2, L4 and 3F7; 5F3, L4 and 3F1; 5F3, L4 and 3F2; 5F3, L4 and 3F3; 5F3, L4 and 3F4; 5F3, L4 and 3F5; 5F3, L4 and 3F6; 5F3, L4 and 3F7; 5F4, L4 and 3F1; 5F4, L4 and 3F2; 5F4, L4 and 3F3; 5F4, L4 and 3F4; 5F4, L4 and 3F5; 5F4, L4 and 3F6; 5F4, L4 and 3F7; 5F5, L4 and 3F1; 5F5, L4 and 3F2; 5F5, L4 and 3F3; 5F5, L4 and 3F4; 5F5, L4 and 3F5; 5F5, L4 and 3F6; 5F5, L4 and 3F7; 5F6, L4 and 3F1; 5F6, L4 and 3F2; 5F6, L4 and 3F3; 5F6, L4 and 3F4; 5F6, L4 and 3F5; 5F6, L4 and 3F6; 5F6, L4 and 3F7; 5F7, L4 and 3F1; 5F7, L4 and 3F2; 5F7, L4 and 3F3; 5F7, L4 and 3F4; 5F7, L4 and 3F5; 5F7, L4 and 3F6; 5F7, L4 and 3F7; 5F8, L4 and 3F1; 5F8, L4 and 3F2; 5F8, L4 and 3F3; 5F8, L4 and 3F4; 5F8, L4 and 3F5; 5F8, L4 and 3F6; 5F8, L4 and 3F7; 5F9, L4 and 3F1; 5F9, L4 and 3F2; 5F9, L4 and 3F3; 5F9, L4 and 3F4; 5F9, L4 and 3F5; 5F9, L4 and 3F6; 5F9, L4 and 3F7; 5F1, L5 and 3F1; 5F1, L5 and 3F2; 5F1, L5 and 3F3; 5F1, L5 and 3F4; 5F1, L5 and 3F5; 5F1, L5 and 3F6; 5F1, L5 and 3F7; 5F2, L5 and 3F1; 5F2, L5 and 3F2; 5F2, L5 and 3F3; 5F2, L5 and 3F4; 5F2, L5 and 3F5; 5F2, L5 and 3F6; 5F2, L5 and 3F7; 5F3, L5 and 3F1; 5F3, L5 and 3F2; 5F3, L5 and 3F3; 5F3, L5 and 3F4; 5F3, L5 and 3F5; 5F3, L5 and 3F6; 5F3, L5 and 3F7; 5F4, L5 and 3F1; 5F4, L5 and 3F2; 5F4, L5 and 3F3; 5F4, L5 and 3F4; 5F4, L5 and 3F5; 5F4, L5 and 3F6; 5F4, L5 and 3F7; 5F5, L5 and 3F1; 5F5, L5 and 3F2; 5F5, L5 and 3F3; 5F5, L5 and 3F4; 5F5, L5 and 3F5; 5F5, L5 and 3F6; 5F5, L5 and 3F7; 5F6, L5 and 3F1; 5F6, L5 and 3F2; 5F6, L5 and 3F3; 5F6, L5 and 3F4; 5F6, L5 and 3F5; 5F6, L5 and 3F6; 5F6, L5 and 3F7; 5F7, L5 and 3F1; 5F7, L5 and 3F2; 5F7, L5 and 3F3; 5F7, L5 and 3F4; 5F7, L5 and 3F5; 5F7, L5 and 3F6; 5F7, L5 and 3F7; 5F8, L5 and 3F1; 5F8, L5 and 3F2; 5F8, L5 and 3F3; 5F8, L5 and 3F4; 5F8, L5 and 3F5; 5F8, L5 and 3F6; 5F8, L5 and 3F7; 5F9, L5 and 3F1; 5F9, L5 and 3F2; 5F9, L5 and 3F3; 5F9, L5 and 3F4; 5F9, L5 and 3F5; 5F9, L5 and 3F6; 5F9, L5 and 3F7; 5F1, L6 and 3F1; 5F1, L6 and 3F2; 5F1, L6 and 3F3; 5F1, L6 and 3F4; 5F1, L6 and 3F5; 5F1, L6 and 3F6; 5F1, L6 and 3F7; 5F2, L6 and 3F1; 5F2, L6 and 3F2; 5F2, L6 and 3F3; 5F2, L6 and 3F4; 5F2, L6 and 3F5; 5F2, L6 and 3F6; 5F2, L6 and 3F7; 5F3, L6 and 3F1; 5F3, L6 and 3F2; 5F3, L6 and 3F3; 5F3, L6 and 3F4; 5F3, L6 and 3F5; 5F3, L6 and 3F6; 5F3, L6 and 3F7; 5F4, L6 and 3F1; 5F4, L6 and 3F2; 5F4, L6 and 3F3; 5F4, L6 and 3F4; 5F4, L6 and 3F5; 5F4, L6 and 3F6; 5F4, L6 and 3F7; 5F5, L6 and 3F1; 5F5, L6 and 3F2; 5F5, L6 and 3F3; 5F5, L6 and 3F4; 5F5, L6 and 3F5; 5F5, L6 and 3F6; 5F5, L6 and 3F7; 5F6, L6 and 3F1; 5F6, L6 and 3F2; 5F6, L6 and 3F3; 5F6, L6 and 3F4; 5F6, L6 and 3F5; 5F6, L6 and 3F6; 5F6, L6 and 3F7; 5F7, L6 and 3F1; 5F7, L6 and 3F2; 5F7, L6 and 3F3; 5F7, L6 and 3F4; 5F7, L6 and 3F5; 5F7, L6 and 3F6; 5F7, L6 and 3F7; 5F8, L6 and 3F1; 5F8, L6 and 3F2; 5F8, L6 and 3F3; 5F8, L6 and 3F4; 5F8, L6 and 3F5; 5F8, L6 and 3F6; 5F8, L6 and 3F7; 5F9, L6 and 3F1; 5F9, L6 and 3F2; 5F9, L6 and 3F3; 5F9, L6 and 3F4; 5F9, L6 and 3F5; 5F9, L6 and 3F6; 5F9, L6 and 3F7; 5F1, L7 and 3F1; 5F1, L7 and 3F2; 5F1, L7 and 3F3; 5F1, L7 and 3F4; 5F1, L7 and 3F5; 5F1, L7 and 3F6; 5F1, L7 and 3F7; 5F2, L7 and 3F1; 5F2, L7 and 3F2; 5F2, L7 and 3F3; 5F2, L7 and 3F4; 5F2, L7 and 3F5; 5F2, L7 and 3F6; 5F2, L7 and 3F7; 5F3, L7 and 3F1; 5F3, L7 and 3F2; 5F3, L7 and 3F3; 5F3, L7 and 3F4; 5F3, L7 and 3F5; 5F3, L7 and 3F6; 5F3, L7 and 3F7; 5F4, L7 and 3F1; 5F4, L7 and 3F2; 5F4, L7 and 3F3; 5F4, L7 and 3F4; 5F4, L7 and 3F5; 5F4, L7 and 3F6; 5F4, L7 and 3F7; 5F5, L7 and 3F1; 5F5, L7 and 3F2; 5F5, L7 and 3F3; 5F5, L7 and 3F4; 5F5, L7 and 3F5; 5F5, L7 and 3F6; 5F5, L7 and 3F7; 5F6, L7 and 3F1; 5F6, L7 and 3F2; 5F6, L7 and 3F3; 5F6, L7 and 3F4; 5F6, L7 and 3F5; 5F6, L7 and 3F6; 5F6, L7 and 3F7; 5F7, L7 and 3F1; 5F7, L7 and 3F2; 5F7, L7 and 3F3; 5F7, L7 and 3F4; 5F7, L7 and 3F5; 5F7, L7 and 3F6; 5F7, L7 and 3F7; 5F8, L7 and 3F1; 5F8, L7 and 3F2; 5F8, L7 and 3F3; 5F8, L7 and 3F4; 5F8, L7 and 3F5; 5F8, L7 and 3F6; 5F8, L7 and 3F7; 5F9, L7 and 3F1; 5F9, L7 and 3F2; 5F9, L7 and 3F3; 5F9, L7 and 3F4; 5F9, L7 and 3F5; 5F9, L7 and 3F6; 5F9, L7 and 3F7; 5F1, L8 and 3F1; 5F1, L8 and 3F2; 5F1, L8 and 3F3; 5F1, L8 and 3F4; 5F1, L8 and 3F5; 5F1, L8 and 3F6; 5F1, L8 and 3F7; 5F2, L8 and 3F1; 5F2, L8 and 3F2; 5F2, L8 and 3F3; 5F2, L8 and 3F4; 5F2, L8 and 3F5; 5F2, L8 and 3F6; 5F2, L8 and 3F7; 5F3, L8 and 3F1; 5F3, L8 and 3F2; 5F3, L8 and 3F3; 5F3, L8 and 3F4; 5F3, L8 and 3F5; 5F3, L8 and 3F6; 5F3, L8 and 3F7; 5F4, L8 and 3F1; 5F4, L8 and 3F2; 5F4, L8 and 3F3; 5F4, L8 and 3F4; 5F4, L8 and 3F5; 5F4, L8 and 3F6; 5F4, L8 and 3F7; 5F5, L8 and 3F1; 5F5, L8 and 3F2; 5F5, L8 and 3F3; 5F5, L8 and 3F4; 5F5, L8 and 3F5; 5F5, L8 and 3F6; 5F5, L8 and 3F7; 5F6, L8 and 3F1; 5F6, L8 and 3F2; 5F6, L8 and 3F3; 5F6, L8 and 3F4; 5F6, L8 and 3F5; 5F6, L8 and 3F6; 5F6, L8 and 3F7; 5F7, L8 and 3F1; 5F7, L8 and 3F2; 5F7, L8 and 3F3; 5F7, L8 and 3F4; 5F7, L8 and 3F5; 5F7, L8 and 3F6; 5F7, L8 and 3F7; 5F8, L8 and 3F1; 5F8, L8 and 3F2; 5F8, L8 and 3F3; 5F8, L8 and 3F4; 5F8, L8 and 3F5; 5F8, L8 and 3F6; 5F8, L8 and 3F7; 5F9, L8 and 3F1; 5F9, L8 and 3F2; 5F9, L8 and 3F3; 5F9, L8 and 3F4; 5F9, L8 and 3F5; 5F9, L8 and 3F6; 5F9, L8 and 3F7; 5F1, L9 and 3F1; 5F1, L9 and 3F2; 5F1, L9 and 3F3; 5F1, L9 and 3F4; 5F1, L9 and 3F5; 5F1, L9 and 3F6; 5F1, L9 and 3F7; 5F2, L9 and 3F1; 5F2, L9 and 3F2; 5F2, L9 and 3F3; 5F2, L9 and 3F4; 5F2, L9 and 3F5; 5F2, L9 and 3F6; 5F2, L9 and 3F7; 5F3, L9 and 3F1; 5F3, L9 and 3F2; 5F3, L9 and 3F3; 5F3, L9 and 3F4; 5F3, L9 and 3F5; 5F3, L9 and 3F6; 5F3, L9 and 3F7; 5F4, L9 and 3F1; 5F4, L9 and 3F2; 5F4, L9 and 3F3; 5F4, L9 and 3F4; 5F4, L9 and 3F5; 5F4, L9 and 3F6; 5F4, L9 and 3F7; 5F5, L9 and 3F1; 5F5, L9 and 3F2; 5F5, L9 and 3F3; 5F5, L9 and 3F4; 5F5, L9 and 3F5; 5F5, L9 and 3F6; 5F5, L9 and 3F7; 5F6, L9 and 3F1; 5F6, L9 and 3F2; 5F6, L9 and 3F3; 5F6, L9 and 3F4; 5F6, L9 and 3F5; 5F6, L9 and 3F6; 5F6, L9 and 3F7; 5F7, L9 and 3F1; 5F7, L9 and 3F2; 5F7, L9 and 3F3; 5F7, L9 and 3F4; 5F7, L9 and 3F5; 5F7, L9 and 3F6; 5F7, L9 and 3F7; 5F8, L9 and 3F1; 5F8, L9 and 3F2; 5F8, L9 and 3F3; 5F8, L9 and 3F4; 5F8, L9 and 3F5; 5F8, L9 and 3F6; 5F8, L9 and 3F7; 5F9, L9 and 3F1; 5F9, L9 and 3F2; 5F9, L9 and 3F3; 5F9, L9 and 3F4; 5F9, L9 and 3F5; 5F9, L9 and 3F6; 5F9, L9 and 3F7; 5F1, L10 and 3F1; 5F1, L10 and 3F2; 5F1, L10 and 3F3; 5F1, L10 and 3F4; 5F1, L10 and 3F5; 5F1, L10 and 3F6; 5F1, L10 and 3F7; 5F2, L10 and 3F1; 5F2, L10 and 3F2; 5F2, L10 and 3F3; 5F2, L10 and 3F4; 5F2, L10 and 3F5; 5F2, L10 and 3F6; 5F2, L10 and 3F7; 5F3, L10 and 3F1; 5F3, L10 and 3F2; 5F3, L10 and 3F3; 5F3, L10 and 3F4; 5F3, L10 and 3F5; 5F3, L10 and 3F6; 5F3, L10 and 3F7; 5F4, L10 and 3F1; 5F4, L10 and 3F2; 5F4, L10 and 3F3; 5F4, L10 and 3F4; 5F4, L10 and 3F5; 5F4, L10 and 3F6; 5F4, L10 and 3F7; 5F5, L10 and 3F1; 5F5, L10 and 3F2; 5F5, L10 and 3F3; 5F5, L10 and 3F4; 5F5, L10 and 3F5; 5F5, L10 and 3F6; 5F5, L10 and 3F7; 5F6, L10 and 3F1; 5F6, L10 and 3F2; 5F6, L10 and 3F3; 5F6, L10 and 3F4; 5F6, L10 and 3F5; 5F6, L10 and 3F6; 5F6, L10 and 3F7; 5F7, L10 and 3F1; 5F7, L10 and 3F2; 5F7, L10 and 3F3; 5F7, L10 and 3F4; 5F7, L10 and 3F5; 5F7, L10 and 3F6; 5F7, L10 and 3F7; 5F8, L10 and 3F1; 5F8, L10 and 3F2; 5F8, L10 and 3F3; 5F8, L10 and 3F4; 5F8, L10 and 3F5; 5F8, L10 and 3F6; 5F8, L10 and 3F7; 5F9, L10 and 3F1; 5F9, L10 and 3F2; 5F9, L10 and 3F3; 5F9, L10 and 3F4; 5F9, L10 and 3F5; 5F9, L10 and 3F6; and 5F9, L10 and 3F7.

[0557] In one embodiment, the molecular scaffold may comprise at least one 5F2 5′ flanking region, at least one L1 loop motif region, and at least one 3F2 3′ flanking region.

[0558] In one embodiment, the molecular scaffold may comprise at least one 5F1 5′ flanking region, at least one L4 loop motif region, and at least one 3F1 3′ flanking region.

[0559] In one embodiment, the molecular scaffold may comprise at least one 5F7 5′ flanking region, at least one L8 loop motif region, and at least one 3F5 3′ flanking region.

[0560] In one embodiment, the molecular scaffold may comprise at least one 5F3 5′ flanking region, at least one L4 loop motif region, and at least one 3F1 3′ flanking region.

[0561] In one embodiment, the molecular scaffold may comprise at least one 5F3 5′ flanking region, at least one L5 loop motif region, and at least one 3F1 3′ flanking region.

[0562] In one embodiment, the molecular scaffold may comprise at least one 5F4 5′ flanking region, at least one L4 loop motif region, and at least one 3F4 3′ flanking region.

[0563] In one embodiment, the molecular scaffold may comprise at least one 5F3 5′ flanking region, at least one L7 loop motif region, and at least one 3F1 3′ flanking region.

[0564] In one embodiment, the molecular scaffold may comprise at least one 5F5 5′ flanking region, at least one L4 loop motif region, and at least one 3F4 3′ flanking region.

[0565] In one embodiment, the molecular scaffold may comprise at least one 5F6 5′ flanking region, at least one L4 loop motif region, and at least one 3F1 3′ flanking region.

[0566] In one embodiment, the molecular scaffold may comprise at least one 5F3 5′ flanking region, at least one L6 loop motif region, and at least one 3F1 3′ flanking region.

[0567] In one embodiment, the molecular scaffold may comprise at least one 5F7 5′ flanking region, at least one L4 loop motif region, and at least one 3F5 3′ flanking region.

[0568] In one embodiment, the molecular scaffold may comprise at least one 5F2 5′ flanking region, at least one L2 loop motif region, and at least one 3F2 3′ flanking region.

[0569] In one embodiment, the molecular scaffold may comprise at least one 5F2 5′ flanking region, at least one L1 loop motif region, and at least one 3F3 3′ flanking region.

[0570] In one embodiment, the molecular scaffold may comprise at least one 5F3 5′ flanking region, at least one L5 loop motif region, and at least one 3F4 3′ flanking region.

[0571] In one embodiment, the molecular scaffold may comprise at least one 5F1 5′ flanking region, at least one L1 loop motif region, and at least one 3F1 3′ flanking region.

[0572] In one embodiment, the molecular scaffold may comprise at least one 5F1 5′ flanking region, at least one L2 loop motif region, and at least one 3F1 3′ flanking region.

[0573] In one embodiment, the molecular scaffold may comprise at least one 5F1 5′ flanking region, at least one L1 loop motif region, and at least one 3F2 3′ flanking region.

[0574] In one embodiment, the molecular scaffold may comprise at least one 5F2 5′ flanking region, at least one L3 loop motif region, and at least one 3F3 3′ flanking region.

[0575] In one embodiment, the molecular scaffold may be a natural pri-miRNA scaffold. As a non-limiting example, the molecular scaffold may be a scaffold derived from the human miR155 scaffold.

[0576] In one embodiment, the molecular scaffold may comprise one or more linkers known in the art. The linkers may separate regions or one molecular scaffold from another. As a non-limiting example, the molecular scaffold may be polycistronic.

[0577] Modulatory Polynucleotide Comprising Molecular Scaffold and siRNA Molecules Targeting SOD1

[0578] In one embodiment, the modulatory polynucleotide may comprise 5′ and 3′ flanking regions, loop motif region, and nucleic acid sequences encoding sense sequence and antisense sequence as described in Tables 8 and 9. In Tables 8 and 9, the DNA sequence identifier for the passenger and guide strands are described as well as the 5′ and 3′ Flanking Regions and the Loop region (also referred to as the linker region). In Tables 8 and 9, the “miR” component of the name of the sequence does not necessarily correspond to the sequence numbering of miRNA genes (e.g., VOYSOD1miR-102 is the name of the sequence and does not necessarily mean that miR-102 is part of the sequence).

TABLE 8
SOD1 Modulatory Polynucleotide Sequence Regions (5′ to 3′)

| Modulatory | 5′ Flanking to | | | | | |
|---|---|---|---|---|---|---|
| Polynucleotide | 3′ Flanking | 5′ Flanking | Passenger | Loop | Guide | 3′ Flanking |
| Construct Name | SEQ ID NO | SEQ ID NO | SEQ ID NO | SEQ ID NO | SEQ ID NO | SEQ ID NO |
| VOYSOD1miR-101 | 1281 | 1262 | 1331 | 1268 | 1332 | 1279 |
| VOYSOD1miR-102 | 1282 | 1257 | 1331 | 1268 | 1332 | 1274 |
| VOYSOD1miR-103 | 1283 | 1257 | 1333 | 1268 | 1332 | 1274 |
| VOYSOD1miR-104 | 1284 | 1257 | 1334 | 1268 | 1332 | 1274 |
| VOYSOD1miR-105 | 1285 | 1257 | 1335 | 1268 | 1332 | 1274 |
| VOYSOD1miR-106 | 1286 | 1257 | 1336 | 1268 | 1332 | 1274 |
| VOYSOD1miR-107 | 1287 | 1257 | 1337 | 1268 | 1332 | 1274 |
| VOYSOD1miR-108 | 1288 | 1257 | 1339 | 1268 | 1332 | 1274 |
| VOYSOD1miR-109 | 1289 | 1257 | 1331 | 1264 | 1332 | 1274 |
| VOYSOD1miR-110 | 1290 | 1257 | 1331 | 1272 | 1332 | 1274 |
| VOYSOD1miR-111 | 1291 | 1257 | 1338 | 1273 | 1332 | 1274 |
| VOYSOD1miR-112 | 1292 | 1257 | 1331 | 1268 | 1332 | 1275 |
| VOYSOD1miR-113 | 1293 | 1257 | 1333 | 1268 | 1332 | 1275 |
| VOYSOD1miR-114 | 1294 | 1257 | 1336 | 1268 | 1332 | 1275 |
| VOYSOD1miR-115 | 1295 | 1257 | 1338 | 1273 | 1332 | 1275 |
| VOYSOD1miR-116 | 1296 | 1257 | 1334 | 1268 | 1332 | 1275 |
| VOYSOD1miR-117 | 1297 | 1257 | 1340 | 1268 | 1341 | 1274 |
| VOYSOD1miR-118 | 1298 | 1257 | 1342 | 1268 | 1343 | 1274 |
| VOYSOD1miR-119 | 1299 | 1257 | 1344 | 1268 | 1345 | 1274 |
| VOYSOD1miR-127 | 1300 | 1255 | 1331 | 1265 | 1332 | 1276 |
| VOYSOD1miR-102.860 | 1301 | 1257 | 1346 | 1268 | 1347 | 1274 |
| VOYSOD1miR-102.861 | 1302 | 1257 | 1348 | 1268 | 1349 | 1274 |
| VOYSOD1miR-102.866 | 1303 | 1257 | 1350 | 1268 | 1345 | 1274 |
| VOYSOD1miR-102.870 | 1304 | 1257 | 1351 | 1268 | 1352 | 1274 |
| VOYSOD1miR-102.823 | 1305 | 1257 | 1353 | 1268 | 1343 | 1274 |
| VOYSOD1miR-104.860 | 1306 | 1257 | 1354 | 1268 | 1347 | 1274 |
| VOYSOD1miR-104.861 | 1307 | 1257 | 1355 | 1268 | 1349 | 1274 |
| VOYSOD1miR-104.866 | 1308 | 1257 | 1356 | 1268 | 1345 | 1274 |
| VOYSOD1miR-104.870 | 1309 | 1257 | 1357 | 1268 | 1352 | 1274 |
| VOYSOD1miR-104.823 | 1310 | 1257 | 1358 | 1268 | 1343 | 1274 |
| VOYSOD1miR-109.860 | 1311 | 1257 | 1346 | 1264 | 1347 | 1274 |
| VOYSOD1miR-109.861 | 1312 | 1257 | 1348 | 1264 | 1349 | 1274 |
| VOYSOD1miR-109.866 | 1313 | 1257 | 1350 | 1264 | 1345 | 1274 |
| VOYSOD1miR-109.870 | 1314 | 1257 | 1351 | 1264 | 1352 | 1274 |
| VOYSOD1miR-109.823 | 1315 | 1257 | 1353 | 1264 | 1343 | 1274 |
| VOYSOD1miR-114.860 | 1316 | 1257 | 1359 | 1268 | 1347 | 1275 |
| VOYSOD1miR-114.861 | 1317 | 1257 | 1360 | 1268 | 1349 | 1275 |
| VOYSOD1miR-114.866 | 1318 | 1257 | 1361 | 1268 | 1345 | 1275 |
| VOYSOD1miR-114.870 | 1319 | 1257 | 1362 | 1268 | 1352 | 1275 |
| VOYSOD1miR-114.823 | 1320 | 1257 | 1363 | 1268 | 1343 | 1275 |
| VOYSOD1miR-116.860 | 1321 | 1257 | 1354 | 1268 | 1347 | 1275 |
| VOYSOD1miR-116.861 | 1322 | 1257 | 1355 | 1268 | 1349 | 1275 |
| VOYSOD1miR-116.866 | 1323 | 1257 | 1364 | 1268 | 1345 | 1275 |
| VOYSOD1miR-116.870 | 1324 | 1257 | 1357 | 1268 | 1352 | 1275 |
| VOYSOD1miR-116.823 | 1325 | 1257 | 1358 | 1268 | 1343 | 1275 |
| VOYSOD1miR-127.860 | 1326 | 1255 | 1365 | 1265 | 1347 | 1276 |
| VOYSOD1miR-127.861 | 1327 | 1255 | 1348 | 1265 | 1349 | 1276 |
| VOYSOD1miR-127.866 | 1328 | 1255 | 1350 | 1265 | 1345 | 1276 |
| VOYSOD1miR-127.870 | 1329 | 1255 | 1351 | 1265 | 1352 | 1276 |
| VOYSOD1miR-127.823 | 1330 | 1255 | 1366 | 1265 | 1343 | 1276 |

TABLE 9
SOD1 Modulatory Polynucleotide Sequence Region (5′ to 3′)

| | 5′ Flanking to | | | | | |
|---|---|---|---|---|---|---|
| | 3′ Flanking | 5′ Flanking | Passenger | Loop | Guide | 3′ Flanking |
| Name | SEQ ID NO | SEQ ID NO | SEQ ID NO | SEQ ID NO | SEQ ID NO | SEQ ID NO |
| VOYSOD1miR-120 | 1367 | 1263 | 1368 | 1264 | 1369 | 1280 |

[0579] AAV Particles Comprising Modulatory Polynucleotides

[0580] In one embodiment, the AAV particle comprises a viral genome with a payload region comprising a modulatory polynucleotide sequences. In such an embodiment, a viral genome encoding more than one polypeptide may be replicated and packaged into a viral particle. A target cell transduced with a viral particle comprising a modulatory polynucleotide may express the encoded sense and/or antisense sequences in a single cell.

[0581] In some embodiments, the AAV particles are useful in the field of medicine for the treatment, prophylaxis, palliation or amelioration of neurological diseases and/or disorders.

[0582] In one embodiment, the AAV particles comprising modulatory polynucleotide sequence which comprises a nucleic acid sequence encoding at least one siRNA molecule may be introduced into mammalian cells.

[0583] Where the AAV particle payload region comprises a modulatory polynucleotide, the modulatory polynucleotide may comprise sense and/or antisense sequences to knock down a target gene. The AAV viral genomes encoding modulatory polynucleotides described herein may be useful in the fields of human disease, viruses, infections veterinary applications and a variety of in vivo and in vitro settings.

[0584] In one embodiment, the AAV particle viral genome may comprise at least one inverted terminal repeat (ITR) region. The ITR region(s) may, independently, have a length such as, but not limited to, 75, 76, 77, 78, 79, 80, 81, 82, 83, 84, 85, 86, 87, 88, 89, 90, 91, 92, 93, 94, 95, 96, 97, 98, 99, 100, 101, 102, 103, 104, 105, 106, 107, 108, 109, 110, 111, 112, 113, 114, 115, 116, 117, 118, 119, 120, 121, 122, 123, 124, 125, 126, 127, 128, 129, 130, 131, 132, 133, 134, 135, 136, 137, 138, 139, 140, 141, 142, 143, 144, 145, 146, 147, 148, 149, 150, 151, 152, 153, 154, 155, 156, 157, 158, 159, 160, 161, 162, 163, 164, 165, 166, 167, 168, 169, 170, 171, 172, 173, 174, and 175 nucleotides. The length of the ITR region for the viral genome may be 75-80, 75-85, 75-100, 80-85, 80-90, 80-105, 85-90, 85-95, 85-110, 90-95, 90-100, 90-115, 95-100, 95-105, 95-120, 100-105, 100-110, 100-125, 105-110, 105-115, 105-130, 110-115, 110-120, 110-135, 115-120, 115-125, 115-140, 120-125, 120-130, 120-145, 125-130, 125-135, 125-150, 130-135, 130-140, 130-155, 135-140, 135-145, 135-160, 140-145, 140-150, 140-165, 145-150, 145-155, 145-170, 150-155, 150-160, 150-175, 155-160, 155-165, 160-165, 160-170, 165-170, 165-175, and 170-175 nucleotides. As a non-limiting example, the viral genome comprises an ITR that is about 105 nucleotides in length. As a non-limiting example, the viral genome comprises an ITR that is about 141 nucleotides in length. As a non-limiting example, the viral genome comprises an ITR that is about 130 nucleotides in length.

[0585] In one embodiment, the AAV particle viral genome may comprises two inverted terminal repeat (ITR) regions. Each of the ITR regions may independently have a length such as, but not limited to, 75, 76, 77, 78, 79, 80, 81, 82, 83, 84, 85, 86, 87, 88, 89, 90, 91, 92, 93, 94, 95, 96, 97, 98, 99, 100, 101, 102, 103, 104, 105, 106, 107, 108, 109, 110, 111, 112, 113, 114, 115, 116, 117, 118, 119, 120, 121, 122, 123, 124, 125, 126, 127, 128, 129, 130, 131, 132, 133, 134, 135, 136, 137, 138, 139, 140, 141, 142, 143, 144, 145, 146, 147, 148, 149, 150, 151, 152, 153, 154, 155, 156, 157, 158, 159, 160, 161, 162, 163, 164, 165, 166, 167, 168, 169, 170, 171, 172, 173, 174, and 175 nucleotides. The length of the ITR regions for the viral genome may be 75-80, 75-85, 75-100, 80-85, 80-90, 80-105, 85-90, 85-95, 85-110, 90-95, 90-100, 90-115, 95-100, 95-105, 95-120, 100-105, 100-110, 100-125, 105-110, 105-115, 105-130, 110-115, 110-120, 110-135, 115-120, 115-125, 115-140, 120-125, 120-130, 120-145, 125-130, 125-135, 125-150, 130-135, 130-140, 130-155, 135-140, 135-145, 135-160, 140-145, 140-150, 140-165, 145-150, 145-155, 145-170, 150-155, 150-160, 150-175, 155-160, 155-165, 160-165, 160-170, 165-170, 165-175, and 170-175 nucleotides. As a non-limiting example, the viral genome comprises an ITR that is about 105 nucleotides in length and 141 nucleotides in length. As a non-limiting example, the viral genome comprises an ITR that is about 105 nucleotides in length and 130 nucleotides in length. As a non-limiting example, the viral genome comprises an ITR that is about 130 nucleotides in length and 141 nucleotides in length.

[0586] In one embodiment, the AAV particle viral genome may comprise at least one sequence region as described in Tables 10-17. The regions may be located before or after any of the other sequence regions described herein.

[0587] In one embodiment, the AAV particle viral genome comprises at least one inverted terminal repeat (ITR) sequence region. Non-limiting examples of ITR sequence regions are described in Table 10.

TABLE 10
Inverted Terminal Repeat (ITR) Sequence Regions

| Sequence Region Name | SEQ ID NO |
|---|---|
| ITR1 | 1370 |
| ITR2 | 1371 |
| ITR3 | 1372 |
| ITR4 | 1373 |

[0588] In one embodiment, the AAV particle viral genome comprises two ITR sequence regions. In one embodiment, the ITR sequence regions are the ITR1 sequence region and the ITR3 sequence region. In one embodiment, the ITR sequence regions are the ITR1 sequence region and the ITR4 sequence region. In one embodiment, the ITR sequence regions are the ITR2 sequence region and the ITR3 sequence region. In one embodiment, the ITR sequence regions are the ITR2 sequence region and the ITR4 sequence region.

[0589] In one embodiment, the AAV particle viral genome may comprise at least one multiple cloning site (MCS) sequence region. The MCS region(s) may, independently, have a length such as, but not limited to, 2, 3, 4, 5, 6, 7, 8, 9, 10, 11, 12, 13, 14, 15, 16, 17, 18, 19, 20, 21, 22, 23, 24, 25, 26, 27, 28, 29, 30, 31, 32, 33, 34, 35, 36, 37, 38, 39, 40, 41, 42, 43, 44, 45, 46, 47, 48, 49, 50, 51, 52, 53, 54, 55, 56, 57, 58, 59, 60, 61, 62, 63, 64, 65, 66, 67, 68, 69, 70, 71, 72, 73, 74, 75, 76, 77, 78, 79, 80, 81, 82, 83, 84, 85, 86, 87, 88, 89, 90, 91, 92, 93, 94, 95, 96, 97, 98, 99, 100, 101, 102, 103, 104, 105, 106, 107, 108, 109, 110, 111, 112, 113, 114, 115, 116, 117, 118, 119, 120, 121, 122, 123, 124, 125, 126, 127, 128, 129, 130, 131, 132, 133, 134, 135, 136, 137, 138, 139, 140, 141, 142, 143, 144, 145, 146, 147, 148, 149, and 150 nucleotides. The length of the MCS region for the viral genome may be 2-10, 5-10, 5-15, 10-20, 10-30, 10-40, 15-20, 15-25, 20-30, 20-40, 20-50, 25-30, 25-35, 30-40, 30-50, 30-60, 35-40, 35-45, 40-50, 40-60, 40-70, 45-50, 45-55, 50-60, 50-70, 50-80, 55-60, 55-65, 60-70, 60-80, 60-90, 65-70, 65-75, 70-80, 70-90, 70-100, 75-80, 75-85, 80-90, 80-100, 80-110, 85-90, 85-95, 90-100, 90-110, 90-120, 95-100, 95-105, 100-110, 100-120, 100-130, 105-110, 105-115, 110-120, 110-130, 110-140, 115-120, 115-125, 120-130, 120-140, 120-150, 125-130, 125-135, 130-140, 130-150, 135-140, 135-145, 140-150, and 145-150 nucleotides. As a non-limiting example, the viral genome comprises a MCS region that is about 5 nucleotides in length. As a non-limiting example, the viral genome comprises a MCS region that is about 10 nucleotides in length.

[0590] As a non-limiting example, the viral genome comprises a MCS region that is about 14 nucleotides in length. As a non-limiting example, the viral genome comprises a MCS region that is about 18 nucleotides in length. As a non-limiting example, the viral genome comprises a MCS region that is about 73 nucleotides in length. As a non-limiting example, the viral genome comprises a MCS region that is about 121 nucleotides in length.

[0591] In one embodiment, the AAV particle viral genome comprises at least one multiple cloning site (MCS) sequence regions. Non-limiting examples of MCS sequence regions are described in Table 11.

TABLE 11
Multiple Cloning Site (MCS) Sequence Regions

| | SEQ ID NO or |
|---|---|
| Sequence Region Name | Sequence |
| MCS1 | 1374 |
| MCS2 | 1375 |
| MCS3 | 1376 |
| MCS4 | 1377 |
| MCS5 | TCGAG |
| MCS6 | 1378 |

[0592] In one embodiment, the AAV particle viral genome comprises one MCS sequence region. In one embodiment, the MCS sequence region is the MCS1 sequence region. In one embodiment, the MCS sequence region is the MCS2 sequence region. In one embodiment, the MCS sequence region is the MCS3 sequence region. In one embodiment, the MCS sequence region is the MCS4 sequence region. In one embodiment, the MCS sequence region is the MCS5 sequence region. In one embodiment, the MCS sequence region is the MCS6 sequence region.

[0593] In one embodiment, the AAV particle viral genome comprises two MCS sequence regions. In one embodiment, the two MCS sequence regions are the MCS1 sequence region and the MCS2 sequence region. In one embodiment, the two MCS sequence regions are the MCS1 sequence region and the MCS3 sequence region. In one embodiment, the two MCS sequence regions are the MCS1 sequence region and the MCS4 sequence region. In one embodiment, the two MCS sequence regions are the MCS1 sequence region and the MCS5 sequence region. In one embodiment, the two MCS sequence regions are the MCS1 sequence region and the MCS6 sequence region. In one embodiment, the two MCS sequence regions are the MCS2 sequence region and the MCS3 sequence region. In one embodiment, the two MCS sequence regions are the MCS2 sequence region and the MCS4 sequence region. In one embodiment, the two MCS sequence regions are the MCS2 sequence region and the MCS5 sequence region. In one embodiment, the two MCS sequence regions are the MCS2 sequence region and the MCS6 sequence region. In one embodiment, the two MCS sequence regions are the MCS3 sequence region and the MCS4 sequence region. In one embodiment, the two MCS sequence regions are the MCS3 sequence region and the MCS5 sequence region. In one embodiment, the two MCS sequence regions are the MCS3 sequence region and the MCS6 sequence region. In one embodiment, the two MCS sequence regions are the MCS4 sequence region and the MCS5 sequence region. In one embodiment, the two MCS sequence regions are the MCS4 sequence region and the MCS6 sequence region. In one embodiment, the two MCS sequence regions are the MCS5 sequence region and the MCS6 sequence region.

[0594] In one embodiment, the AAV particle viral genome comprises two or more MCS sequence regions.

[0595] In one embodiment, the AAV particle viral genome comprises three MCS sequence regions. In one embodiment, the three MCS sequence regions are the MCS1 sequence region, the MCS2 sequence region, and the MCS3 sequence region. In one embodiment, the three MCS sequence regions are the MCS1 sequence region, the MCS2 sequence region, and the MCS4 sequence region. In one embodiment, the three MCS sequence regions are the MCS1 sequence region, the MCS2 sequence region, and the MCS5 sequence region. In one embodiment, the three MCS sequence regions are the MCS1 sequence region, the MCS2 sequence region, and the MCS6 sequence region. In one embodiment, the three MCS sequence regions are the MCS1 sequence region, the MCS3 sequence region, and the MCS4 sequence region. In one embodiment, the three MCS sequence regions are the MCS1 sequence region, the MCS3 sequence region, and the MCS5 sequence region. In one embodiment, the three MCS sequence regions are the MCS1 sequence region, the MCS3 sequence region, and the MCS6 sequence region. In one embodiment, the three MCS sequence regions are the MCS1 sequence region, the MCS4 sequence region, and the MCS5 sequence region. In one embodiment, the three MCS sequence regions are the MCS1 sequence region, the MCS4 sequence region, and the MCS6 sequence region. In one embodiment, the three MCS sequence regions are the MCS1 sequence region, the MCS5 sequence region, and the MCS6 sequence region. In one embodiment, the three MCS sequence regions are the MCS2 sequence region, the MCS3 sequence region, and the MCS4 sequence region. In one embodiment, the three MCS sequence regions are the MCS2 sequence region, the MCS3 sequence region, and the MCS5 sequence region. In one embodiment, the three MCS sequence regions are the MCS2 sequence region, the MCS3 sequence region, and the MCS6 sequence region. In one embodiment, the three MCS sequence regions are the MCS2 sequence region, the MCS4 sequence region, and the MCS5 sequence region. In one embodiment, the three MCS sequence regions are the MCS2 sequence region, the MCS4 sequence region, and the MCS6 sequence region. In one embodiment, the three MCS sequence regions are the MCS2 sequence region, the MCS5 sequence region, and the MCS6 sequence region. In one embodiment, the three MCS sequence regions are the MCS3 sequence region, the MCS4 sequence region, and the MCS5 sequence region. In one embodiment, the three MCS sequence regions are the MCS3 sequence region, the MCS4 sequence region, and the MCS6 sequence region. In one embodiment, the three MCS sequence regions are the MCS3 sequence region, the MCS5 sequence region, and the MCS6 sequence region. In one embodiment, the three MCS sequence regions are the MCS4 sequence region, the MCS5 sequence region, and the MCS6 sequence region.

[0596] In one embodiment, the AAV particle viral genome may comprise at least one multiple filler sequence region. The filler region(s) may, independently, have a length such as, but not limited to, 50, 51, 52, 53, 54, 55, 56, 57, 58, 59, 60, 61, 62, 63, 64, 65, 66, 67, 68, 69, 70, 71, 72, 73, 74, 75, 76, 77, 78, 79, 80, 81, 82, 83, 84, 85, 86, 87, 88, 89, 90, 91, 92, 93, 94, 95, 96, 97, 98, 99, 100, 101, 102, 103, 104, 105, 106, 107, 108, 109, 110, 111, 112, 113, 114, 115, 116, 117, 118, 119, 120, 121, 122, 123, 124, 125, 126, 127, 128, 129, 130, 131, 132, 133, 134, 135, 136, 137, 138, 139, 140, 141, 142, 143, 144, 145, 146, 147, 148, 149, 150, 151, 152, 153, 154, 155, 156, 157, 158, 159, 160, 161, 162, 163, 164, 165, 166, 167, 168, 169, 170, 171, 172, 173, 174, 175, 176, 177, 178, 179, 180, 181, 182, 183, 184, 185, 186, 187, 188, 189, 190, 191, 192, 193, 194, 195, 196, 197, 198, 199, 200, 201, 202, 203, 204, 205, 206, 207, 208, 209, 210, 211, 212, 213, 214, 215, 216, 217, 218, 219, 220, 221, 222, 223, 224, 225, 226, 227, 228, 229, 230, 231, 232, 233, 234, 235, 236, 237, 238, 239, 240, 241, 242, 243, 244, 245, 246, 247, 248, 249, 250, 251, 252, 253, 254, 255, 256, 257, 258, 259, 260, 261, 262, 263, 264, 265, 266, 267, 268, 269, 270, 271, 272, 273, 274, 275, 276, 277, 278, 279, 280, 281, 282, 283, 284, 285, 286, 287, 288, 289, 290, 291, 292, 293, 294, 295, 296, 297, 298, 299, 300, 301, 302, 303, 304, 305, 306, 307, 308, 309, 310, 311, 312, 313, 314, 315, 316, 317, 318, 319, 320, 321, 322, 323, 324, 325, 326, 327, 328, 329, 330, 331, 332, 333, 334, 335, 336, 337, 338, 339, 340, 341, 342, 343, 344, 345, 346, 347, 348, 349, 350, 351, 352, 353, 354, 355, 356, 357, 358, 359, 360, 361, 362, 363, 364, 365, 366, 367, 368, 369, 370, 371, 372, 373, 374, 375, 376, 377, 378, 379, 380, 381, 382, 383, 384, 385, 386, 387, 388, 389, 390, 391, 392, 393, 394, 395, 396, 397, 398, 399, 400, 401, 402, 403, 404, 405, 406, 407, 408, 409, 410, 411, 412, 413, 414, 415, 416, 417, 418, 419, 420, 421, 422, 423, 424, 425, 426, 427, 428, 429, 430, 431, 432, 433, 434, 435, 436, 437, 438, 439, 440, 441, 442, 443, 444, 445, 446, 447, 448, 449, 450, 451, 452, 453, 454, 455, 456, 457, 458, 459, 460, 461, 462, 463, 464, 465, 466, 467, 468, 469, 470, 471, 472, 473, 474, 475, 476, 477, 478, 479, 480, 481, 482, 483, 484, 485, 486, 487, 488, 489, 490, 491, 492, 493, 494, 495, 496, 497, 498, 499, 500, 501, 502, 503, 504, 505, 506, 507, 508, 509, 510, 511, 512, 513, 514, 515, 516, 517, 518, 519, 520, 521, 522, 523, 524, 525, 526, 527, 528, 529, 530, 531, 532, 533, 534, 535, 536, 537, 538, 539, 540, 541, 542, 543, 544, 545, 546, 547, 548, 549, 550, 551, 552, 553, 554, 555, 556, 557, 558, 559, 560, 561, 562, 563, 564, 565, 566, 567, 568, 569, 570, 571, 572, 573, 574, 575, 576, 577, 578, 579, 580, 581, 582, 583, 584, 585, 586, 587, 588, 589, 590, 591, 592, 593, 594, 595, 596, 597, 598, 599, 600, 601, 602, 603, 604, 605, 606, 607, 608, 609, 610, 611, 612, 613, 614, 615, 616, 617, 618, 619, 620, 621, 622, 623, 624, 625, 626, 627, 628, 629, 630, 631, 632, 633, 634, 635, 636, 637, 638, 639, 640, 641, 642, 643, 644, 645, 646, 647, 648, 649, 650, 651, 652, 653, 654, 655, 656, 657, 658, 659, 660, 661, 662, 663, 664, 665, 666, 667, 668, 669, 670, 671, 672, 673, 674, 675, 676, 677, 678, 679, 680, 681, 682, 683, 684, 685, 686, 687, 688, 689, 690, 691, 692, 693, 694, 695, 696, 697, 698, 699, 700, 701, 702, 703, 704, 705, 706, 707, 708, 709, 710, 711, 712, 713, 714, 715, 716, 717, 718, 719, 720, 721, 722, 723, 724, 725, 726, 727, 728, 729, 730, 731, 732, 733, 734, 735, 736, 737, 738, 739, 740, 741, 742, 743, 744, 745, 746, 747, 748, 749, 750, 751, 752, 753, 754, 755, 756, 757, 758, 759, 760, 761, 762, 763, 764, 765, 766, 767, 768, 769, 770, 771, 772, 773, 774, 775, 776, 777, 778, 779, 780, 781, 782, 783, 784, 785, 786, 787, 788, 789, 790, 791, 792, 793, 794, 795, 796, 797, 798, 799, 800, 801, 802, 803, 804, 805, 806, 807, 808, 809, 810, 811, 812, 813, 814, 815, 816, 817, 818, 819, 820, 821, 822, 823, 824, 825, 826, 827, 828, 829, 830, 831, 832, 833, 834, 835, 836, 837, 838, 839, 840, 841, 842, 843, 844, 845, 846, 847, 848, 849, 850, 851, 852, 853, 854, 855, 856, 857, 858, 859, 860, 861, 862, 863, 864, 865, 866, 867, 868, 869, 870, 871, 872, 873, 874, 875, 876, 877, 878, 879, 880, 881, 882, 883, 884, 885, 886, 887, 888, 889, 890, 891, 892, 893, 894, 895, 896, 897, 898, 899, 900, 901, 902, 903, 904, 905, 906, 907, 908, 909, 910, 911, 912, 913, 914, 915, 916, 917, 918, 919, 920, 921, 922, 923, 924, 925, 926, 927, 928, 929, 930, 931, 932, 933, 934, 935, 936, 937, 938, 939, 940, 941, 942, 943, 944, 945, 946, 947, 948, 949, 950, 951, 952, 953, 954, 955, 956, 957, 958, 959, 960, 961, 962, 963, 964, 965, 966, 967, 968, 969, 970, 971, 972, 973, 974, 975, 976, 977, 978, 979, 980, 981, 982, 983, 984, 985, 986, 987, 988, 989, 990, 991, 992, 993, 994, 995, 996, 997, 998, 999, 1000, 1001, 1002, 1003, 1004, 1005, 1006, 1007, 1008, 1009, 1010, 1011, 1012, 1013, 1014, 1015, 1016, 1017, 1018, 1019, 1020, 1021, 1022, 1023, 1024, 1025, 1026, 1027, 1028, 1029, 1030, 1031, 1032, 1033, 1034, 1035, 1036, 1037, 1038, 1039, 1040, 1041, 1042, 1043, 1044, 1045, 1046, 1047, 1048, 1049, 1050, 1051, 1052, 1053, 1054, 1055, 1056, 1057, 1058, 1059, 1060, 1061, 1062, 1063, 1064, 1065, 1066, 1067, 1068, 1069, 1070, 1071, 1072, 1073, 1074, 1075, 1076, 1077, 1078, 1079, 1080, 1081, 1082, 1083, 1084, 1085, 1086, 1087, 1088, 1089, 1090, 1091, 1092, 1093, 1094, 1095, 1096, 1097, 1098, 1099, 1100, 1101, 1102, 1103, 1104, 1105, 1106, 1107, 1108, 1109, 1110, 1111, 1112, 1113, 1114, 1115, 1116, 1117, 1118, 1119, 1120, 1121, 1122, 1123, 1124, 1125, 1126, 1127, 1128, 1129, 1130, 1131, 1132, 1133, 1134, 1135, 1136, 1137, 1138, 1139, 1140, 1141, 1142, 1143, 1144, 1145, 1146, 1147, 1148, 1149, 1150, 1151, 1152, 1153, 1154, 1155, 1156, 1157, 1158, 1159, 1160, 1161, 1162, 1163, 1164, 1165, 1166, 1167, 1168, 1169, 1170, 1171, 1172, 1173, 1174, 1175, 1176, 1177, 1178, 1179, 1180, 1181, 1182, 1183, 1184, 1185, 1186, 1187, 1188, 1189, 1190, 1191, 1192, 1193, 1194, 1195, 1196, 1197, 1198, 1199, 1200, 1201, 1202, 1203, 1204, 1205, 1206, 1207, 1208, 1209, 1210, 1211, 1212, 1213, 1214, 1215, 1216, 1217, 1218, 1219, 1220, 1221, 1222, 1223, 1224, 1225, 1226, 1227, 1228, 1229, 1230, 1231, 1232, 1233, 1234, 1235, 1236, 1237, 1238, 1239, 1240, 1241, 1242, 1243, 1244, 1245, 1246, 1247, 1248, 1249, 1250, 1251, 1252, 1253, 1254, 1255, 1256, 1257, 1258, 1259, 1260, 1261, 1262, 1263, 1264, 1265, 1266, 1267, 1268, 1269, 1270, 1271, 1272, 1273, 1274, 1275, 1276, 1277, 1278, 1279, 1280, 1281, 1282, 1283, 1284, 1285, 1286, 1287, 1288, 1289, 1290, 1291, 1292, 1293, 1294, 1295, 1296, 1297, 1298, 1299, 1300, 1301, 1302, 1303, 1304, 1305, 1306, 1307, 1308, 1309, 1310, 1311, 1312, 1313, 1314, 1315, 1316, 1317, 1318, 1319, 1320, 1321, 1322, 1323, 1324, 1325, 1326, 1327, 1328, 1329, 1330, 1331, 1332, 1333, 1334, 1335, 1336, 1337, 1338, 1339, 1340, 1341, 1342, 1343, 1344, 1345, 1346, 1347, 1348, 1349, 1350, 1351, 1352, 1353, 1354, 1355, 1356, 1357, 1358, 1359, 1360, 1361, 1362, 1363, 1364, 1365, 1366, 1367, 1368, 1369, 1370, 1371, 1372, 1373, 1374, 1375, 1376, 1377, 1378, 1379, 1380, 1381, 1382, 1383, 1384, 1385, 1386, 1387, 1388, 1389, 1390, 1391, 1392, 1393, 1394, 1395, 1396, 1397, 1398, 1399, 1400, 1401, 1402, 1403, 1404, 1405, 1406, 1407, 1408, 1409, 1410, 1411, 1412, 1413, 1414, 1415, 1416, 1417, 1418, 1419, 1420, 1421, 1422, 1423, 1424, 1425, 1426, 1427, 1428, 1429, 1430, 1431, 1432, 1433, 1434, 1435, 1436, 1437, 1438, 1439, 1440, 1441, 1442, 1443, 1444, 1445, 1446, 1447, 1448, 1449, 1450, 1451, 1452, 1453, 1454, 1455, 1456, 1457, 1458, 1459, 1460, 1461, 1462, 1463, 1464, 1465, 1466, 1467, 1468, 1469, 1470, 1471, 1472, 1473, 1474, 1475, 1476, 1477, 1478, 1479, 1480, 1481, 1482, 1483, 1484, 1485, 1486, 1487, 1488, 1489, 1490, 1491, 1492, 1493, 1494, 1495, 1496, 1497, 1498, 1499, 1500, 1501, 1502, 1503, 1504, 1505, 1506, 1507, 1508, 1509, 1510, 1511, 1512, 1513, 1514, 1515, 1516, 1517, 1518, 1519, 1520, 1521, 1522, 1523, 1524, 1525, 1526, 1527, 1528, 1529, 1530, 1531, 1532, 1533, 1534, 1535, 1536, 1537, 1538, 1539, 1540, 1541, 1542, 1543, 1544, 1545, 1546, 1547, 1548, 1549, 1550, 1551, 1552, 1553, 1554, 1555, 1556, 1557, 1558, 1559, 1560, 1561, 1562, 1563, 1564, 1565, 1566, 1567, 1568, 1569, 1570, 1571, 1572, 1573, 1574, 1575, 1576, 1577, 1578, 1579, 1580, 1581, 1582, 1583, 1584, 1585, 1586, 1587, 1588, 1589, 1590, 1591, 1592, 1593, 1594, 1595, 1596, 1597, 1598, 1599, 1600, 1601, 1602, 1603, 1604, 1605, 1606, 1607, 1608, 1609, 1610, 1611, 1612, 1613, 1614, 1615, 1616, 1617, 1618, 1619, 1620, 1621, 1622, 1623, 1624, 1625, 1626, 1627, 1628, 1629, 1630, 1631, 1632, 1633, 1634, 1635, 1636, 1637, 1638, 1639, 1640, 1641, 1642, 1643, 1644, 1645, 1646, 1647, 1648, 1649, 1650, 1651, 1652, 1653, 1654, 1655, 1656, 1657, 1658, 1659, 1660, 1661, 1662, 1663, 1664, 1665, 1666, 1667, 1668, 1669, 1670, 1671, 1672, 1673, 1674, 1675, 1676, 1677, 1678, 1679, 1680, 1681, 1682, 1683, 1684, 1685, 1686, 1687, 1688, 1689, 1690, 1691, 1692, 1693, 1694, 1695, 1696, 1697, 1698, 1699, 1700, 1701, 1702, 1703, 1704, 1705, 1706, 1707, 1708, 1709, 1710, 1711, 1712, 1713, 1714, 1715, 1716, 1717, 1718, 1719, 1720, 1721, 1722, 1723, 1724, 1725, 1726, 1727, 1728, 1729, 1730, 1731, 1732, 1733, 1734, 1735, 1736, 1737, 1738, 1739, 1740, 1741, 1742, 1743, 1744, 1745, 1746, 1747, 1748, 1749, 1750, 1751, 1752, 1753, 1754, 1755, 1756, 1757, 1758, 1759, 1760, 1761, 1762, 1763, 1764, 1765, 1766, 1767, 1768, 1769, 1770, 1771, 1772, 1773, 1774, 1775, 1776, 1777, 1778, 1779, 1780, 1781, 1782, 1783, 1784, 1785, 1786, 1787, 1788, 1789, 1790, 1791, 1792, 1793, 1794, 1795, 1796, 1797, 1798, 1799, 1800, 1801, 1802, 1803, 1804, 1805, 1806, 1807, 1808, 1809, 1810, 1811, 1812, 1813, 1814, 1815, 1816, 1817, 1818, 1819, 1820, 1821, 1822, 1823, 1824, 1825, 1826, 1827, 1828, 1829, 1830, 1831, 1832, 1833, 1834, 1835, 1836, 1837, 1838, 1839, 1840, 1841, 1842, 1843, 1844, 1845, 1846, 1847, 1848, 1849, 1850, 1851, 1852, 1853, 1854, 1855, 1856, 1857, 1858, 1859, 1860, 1861, 1862, 1863, 1864, 1865, 1866, 1867, 1868, 1869, 1870, 1871, 1872, 1873, 1874, 1875, 1876, 1877, 1878, 1879, 1880, 1881, 1882, 1883, 1884, 1885, 1886, 1887, 1888, 1889, 1890, 1891, 1892, 1893, 1894, 1895, 1896, 1897, 1898, 1899, 1900, 1901, 1902, 1903, 1904, 1905, 1906, 1907, 1908, 1909, 1910, 1911, 1912, 1913, 1914, 1915, 1916, 1917, 1918, 1919, 1920, 1921, 1922, 1923, 1924, 1925, 1926, 1927, 1928, 1929, 1930, 1931, 1932, 1933, 1934, 1935, 1936, 1937, 1938, 1939, 1940, 1941, 1942, 1943, 1944, 1945, 1946, 1947, 1948, 1949, 1950, 1951, 1952, 1953, 1954, 1955, 1956, 1957, 1958, 1959, 1960, 1961, 1962, 1963, 1964, 1965, 1966, 1967, 1968, 1969, 1970, 1971, 1972, 1973, 1974, 1975, 1976, 1977, 1978, 1979, 1980, 1981, 1982, 1983, 1984, 1985, 1986, 1987, 1988, 1989, 1990, 1991, 1992, 1993, 1994, 1995, 1996, 1997, 1998, 1999, 2000, 2001, 2002, 2003, 2004, 2005, 2006, 2007, 2008, 2009, 2010, 2011, 2012, 2013, 2014, 2015, 2016, 2017, 2018, 2019, 2020, 2021, 2022, 2023, 2024, 2025, 2026, 2027, 2028, 2029, 2030, 2031, 2032, 2033, 2034, 2035, 2036, 2037, 2038, 2039, 2040, 2041, 2042, 2043, 2044, 2045, 2046, 2047, 2048, 2049, 2050, 2051, 2052, 2053, 2054, 2055, 2056, 2057, 2058, 2059, 2060, 2061, 2062, 2063, 2064, 2065, 2066, 2067, 2068, 2069, 2070, 2071, 2072, 2073, 2074, 2075, 2076, 2077, 2078, 2079, 2080, 2081, 2082, 2083, 2084, 2085, 2086, 2087, 2088, 2089, 2090, 2091, 2092, 2093, 2094, 2095, 2096, 2097, 2098, 2099, 2100, 2101, 2102, 2103, 2104, 2105, 2106, 2107, 2108, 2109, 2110, 2111, 2112, 2113, 2114, 2115, 2116, 2117, 2118, 2119, 2120, 2121, 2122, 2123, 2124, 2125, 2126, 2127, 2128, 2129, 2130, 2131, 2132, 2133, 2134, 2135, 2136, 2137, 2138, 2139, 2140, 2141, 2142, 2143, 2144, 2145, 2146, 2147, 2148, 2149, 2150, 2151, 2152, 2153, 2154, 2155, 2156, 2157, 2158, 2159, 2160, 2161, 2162, 2163, 2164, 2165, 2166, 2167, 2168, 2169, 2170, 2171, 2172, 2173, 2174, 2175, 2176, 2177, 2178, 2179, 2180, 2181, 2182, 2183, 2184, 2185, 2186, 2187, 2188, 2189, 2190, 2191, 2192, 2193, 2194, 2195, 2196, 2197, 2198, 2199, 2200, 2201, 2202, 2203, 2204, 2205, 2206, 2207, 2208, 2209, 2210, 2211, 2212, 2213, 2214, 2215, 2216, 2217, 2218, 2219, 2220, 2221, 2222, 2223, 2224, 2225, 2226, 2227, 2228, 2229, 2230, 2231, 2232, 2233, 2234, 2235, 2236, 2237, 2238, 2239, 2240, 2241, 2242, 2243, 2244, 2245, 2246, 2247, 2248, 2249, 2250, 2251, 2252, 2253, 2254, 2255, 2256, 2257, 2258, 2259, 2260, 2261, 2262, 2263, 2264, 2265, 2266, 2267, 2268, 2269, 2270, 2271, 2272, 2273, 2274, 2275, 2276, 2277, 2278, 2279, 2280, 2281, 2282, 2283, 2284, 2285, 2286, 2287, 2288, 2289, 2290, 2291, 2292, 2293, 2294, 2295, 2296, 2297, 2298, 2299, 2300, 2301, 2302, 2303, 2304, 2305, 2306, 2307, 2308, 2309, 2310, 2311, 2312, 2313, 2314, 2315, 2316, 2317, 2318, 2319, 2320, 2321, 2322, 2323, 2324, 2325, 2326, 2327, 2328, 2329, 2330, 2331, 2332, 2333, 2334, 2335, 2336, 2337, 2338, 2339, 2340, 2341, 2342, 2343, 2344, 2345, 2346, 2347, 2348, 2349, 2350, 2351, 2352, 2353, 2354, 2355, 2356, 2357, 2358, 2359, 2360, 2361, 2362, 2363, 2364, 2365, 2366, 2367, 2368, 2369, 2370, 2371, 2372, 2373, 2374, 2375, 2376, 2377, 2378, 2379, 2380, 2381, 2382, 2383, 2384, 2385, 2386, 2387, 2388, 2389, 2390, 2391, 2392, 2393, 2394, 2395, 2396, 2397, 2398, 2399, 2400, 2401, 2402, 2403, 2404, 2405, 2406, 2407, 2408, 2409, 2410, 2411, 2412, 2413, 2414, 2415, 2416, 2417, 2418, 2419, 2420, 2421, 2422, 2423, 2424, 2425, 2426, 2427, 2428, 2429, 2430, 2431, 2432, 2433, 2434, 2435, 2436, 2437, 2438, 2439, 2440, 2441, 2442, 2443, 2444, 2445, 2446, 2447, 2448, 2449, 2450, 2451, 2452, 2453, 2454, 2455, 2456, 2457, 2458, 2459, 2460, 2461, 2462, 2463, 2464, 2465, 2466, 2467, 2468, 2469, 2470, 2471, 2472, 2473, 2474, 2475, 2476, 2477, 2478, 2479, 2480, 2481, 2482, 2483, 2484, 2485, 2486, 2487, 2488, 2489, 2490, 2491, 2492, 2493, 2494, 2495, 2496, 2497, 2498, 2499, 2500, 2501, 2502, 2503, 2504, 2505, 2506, 2507, 2508, 2509, 2510, 2511, 2512, 2513, 2514, 2515, 2516, 2517, 2518, 2519, 2520, 2521, 2522, 2523, 2524, 2525, 2526, 2527, 2528, 2529, 2530, 2531, 2532, 2533, 2534, 2535, 2536, 2537, 2538, 2539, 2540, 2541, 2542, 2543, 2544, 2545, 2546, 2547, 2548, 2549, 2550, 2551, 2552, 2553, 2554, 2555, 2556, 2557, 2558, 2559, 2560, 2561, 2562, 2563, 2564, 2565, 2566, 2567, 2568, 2569, 2570, 2571, 2572, 2573, 2574, 2575, 2576, 2577, 2578, 2579, 2580, 2581, 2582, 2583, 2584, 2585, 2586, 2587, 2588, 2589, 2590, 2591, 2592, 2593, 2594, 2595, 2596, 2597, 2598, 2599, 2600, 2601, 2602, 2603, 2604, 2605, 2606, 2607, 2608, 2609, 2610, 2611, 2612, 2613, 2614, 2615, 2616, 2617, 2618, 2619, 2620, 2621, 2622, 2623, 2624, 2625, 2626, 2627, 2628, 2629, 2630, 2631, 2632, 2633, 2634, 2635, 2636, 2637, 2638, 2639, 2640, 2641, 2642, 2643, 2644, 2645, 2646, 2647, 2648, 2649, 2650, 2651, 2652, 2653, 2654, 2655, 2656, 2657, 2658, 2659, 2660, 2661, 2662, 2663, 2664, 2665, 2666, 2667, 2668, 2669, 2670, 2671, 2672, 2673, 2674, 2675, 2676, 2677, 2678, 2679, 2680, 2681, 2682, 2683, 2684, 2685, 2686, 2687, 2688, 2689, 2690, 2691, 2692, 2693, 2694, 2695, 2696, 2697, 2698, 2699, 2700, 2701, 2702, 2703, 2704, 2705, 2706, 2707, 2708, 2709, 2710, 2711, 2712, 2713, 2714, 2715, 2716, 2717, 2718, 2719, 2720, 2721, 2722, 2723, 2724, 2725, 2726, 2727, 2728, 2729, 2730, 2731, 2732, 2733, 2734, 2735, 2736, 2737, 2738, 2739, 2740, 2741, 2742, 2743, 2744, 2745, 2746, 2747, 2748, 2749, 2750, 2751, 2752, 2753, 2754, 2755, 2756, 2757, 2758, 2759, 2760, 2761, 2762, 2763, 2764, 2765, 2766, 2767, 2768, 2769, 2770, 2771, 2772, 2773, 2774, 2775, 2776, 2777, 2778, 2779, 2780, 2781, 2782, 2783, 2784, 2785, 2786, 2787, 2788, 2789, 2790, 2791, 2792, 2793, 2794, 2795, 2796, 2797, 2798, 2799, 2800, 2801, 2802, 2803, 2804, 2805, 2806, 2807, 2808, 2809, 2810, 2811, 2812, 2813, 2814, 2815, 2816, 2817, 2818, 2819, 2820, 2821, 2822, 2823, 2824, 2825, 2826, 2827, 2828, 2829, 2830, 2831, 2832, 2833, 2834, 2835, 2836, 2837, 2838, 2839, 2840, 2841, 2842, 2843, 2844, 2845, 2846, 2847, 2848, 2849, 2850, 2851, 2852, 2853, 2854, 2855, 2856, 2857, 2858, 2859, 2860, 2861, 2862, 2863, 2864, 2865, 2866, 2867, 2868, 2869, 2870, 2871, 2872, 2873, 2874, 2875, 2876, 2877, 2878, 2879, 2880, 2881, 2882, 2883, 2884, 2885, 2886, 2887, 2888, 2889, 2890, 2891, 2892, 2893, 2894, 2895, 2896, 2897, 2898, 2899, 2900, 2901, 2902, 2903, 2904, 2905, 2906, 2907, 2908, 2909, 2910, 2911, 2912, 2913, 2914, 2915, 2916, 2917, 2918, 2919, 2920, 2921, 2922, 2923, 2924, 2925, 2926, 2927, 2928, 2929, 2930, 2931, 2932, 2933, 2934, 2935, 2936, 2937, 2938, 2939, 2940, 2941, 2942, 2943, 2944, 2945, 2946, 2947, 2948, 2949, 2950, 2951, 2952, 2953, 2954, 2955, 2956, 2957, 2958, 2959, 2960, 2961, 2962, 2963, 2964, 2965, 2966, 2967, 2968, 2969, 2970, 2971, 2972, 2973, 2974, 2975, 2976, 2977, 2978, 2979, 2980, 2981, 2982, 2983, 2984, 2985, 2986, 2987, 2988, 2989, 2990, 2991, 2992, 2993, 2994, 2995, 2996, 2997, 2998, 2999, 3000, 3001, 3002, 3003, 3004, 3005, 3006, 3007, 3008, 3009, 3010, 3011, 3012, 3013, 3014, 3015, 3016, 3017, 3018, 3019, 3020, 3021, 3022, 3023, 3024, 3025, 3026, 3027, 3028, 3029, 3030, 3031, 3032, 3033, 3034, 3035, 3036, 3037, 3038, 3039, 3040, 3041, 3042, 3043, 3044, 3045, 3046, 3047, 3048, 3049, 3050, 3051, 3052, 3053, 3054, 3055, 3056, 3057, 3058, 3059, 3060, 3061, 3062, 3063, 3064, 3065, 3066, 3067, 3068, 3069, 3070, 3071, 3072, 3073, 3074, 3075, 3076, 3077, 3078, 3079, 3080, 3081, 3082, 3083, 3084, 3085, 3086, 3087, 3088, 3089, 3090, 3091, 3092, 3093, 3094, 3095, 3096, 3097, 3098, 3099, 3100, 3101, 3102, 3103, 3104, 3105, 3106, 3107, 3108, 3109, 3110, 3111, 3112, 3113, 3114, 3115, 3116, 3117, 3118, 3119, 3120, 3121, 3122, 3123, 3124, 3125, 3126, 3127, 3128, 3129, 3130, 3131, 3132, 3133, 3134, 3135, 3136, 3137, 3138, 3139, 3140, 3141, 3142, 3143, 3144, 3145, 3146, 3147, 3148, 3149, 3150, 3151, 3152, 3153, 3154, 3155, 3156, 3157, 3158, 3159, 3160, 3161, 3162, 3163, 3164, 3165, 3166, 3167, 3168, 3169, 3170, 3171, 3172, 3173, 3174, 3175, 3176, 3177, 3178, 3179, 3180, 3181, 3182, 3183, 3184, 3185, 3186, 3187, 3188, 3189, 3190, 3191, 3192, 3193, 3194, 3195, 3196, 3197, 3198, 3199, 3200, 3201, 3202, 3203, 3204, 3205, 3206, 3207, 3208, 3209, 3210, 3211, 3212, 3213, 3214, 3215, 3216, 3217, 3218, 3219, 3220, 3221, 3222, 3223, 3224, 3225, 3226, 3227, 3228, 3229, 3230, 3231, 3232, 3233, 3234, 3235, 3236, 3237, 3238, 3239, 3240, 3241, 3242, 3243, 3244, 3245, 3246, 3247, 3248, 3249, and 3250 nucleotides. The length of any filler region for the viral genome may be 50-100, 100-150, 150-200, 200-250, 250-300, 300-350, 350-400, 400-450, 450-500, 500-550, 550-600, 600-650, 650-700, 700-750, 750-800, 800-850, 850-900, 900-950, 950-1000, 1000-1050, 1050-1100, 1100-1150, 1150-1200, 1200-1250, 1250-1300, 1300-1350, 1350-1400, 1400-1450, 1450-1500, 1500-1550, 1550-1600, 1600-1650, 1650-1700, 1700-1750, 1750-1800, 1800-1850, 1850-1900, 1900-1950, 1950-2000, 2000-2050, 2050-2100, 2100-2150, 2150-2200, 2200-2250, 2250-2300, 2300-2350, 2350-2400, 2400-2450, 2450-2500, 2500-2550, 2550-2600, 2600-2650, 2650-2700, 2700-2750, 2750-2800, 2800-2850, 2850-2900, 2900-2950, 2950-3000, 3000-3050, 3050-3100, 3100-3150, 3150-3200, and 3200-3250 nucleotides. As a non-limiting example, the viral genome comprises a filler region that is about 55 nucleotides in length. As a non-limiting example, the viral genome comprises a filler region that is about 56 nucleotides in length. As a non-limiting example, the viral genome comprises a filler region that is about 97 nucleotides in length. As a non-limiting example, the viral genome comprises a filler region that is about 103 nucleotides in length. As a non-limiting example, the viral genome comprises a filler region that is about 105 nucleotides in length. As a non-limiting example, the viral genome comprises a filler region that is about 357 nucleotides in length. As a non-limiting example, the viral genome comprises a filler region that is about 363 nucleotides in length. As a non-limiting example, the viral genome comprises a filler region that is about 712 nucleotides in length. As a non-limiting example, the viral genome comprises a filler region that is about 714 nucleotides in length. As a non-limiting example, the viral genome comprises a filler region that is about 1203 nucleotides in length. As a non-limiting example, the viral genome comprises a filler region that is about 1209 nucleotides in length. As a non-limiting example, the viral genome comprises a filler region that is about 1512 nucleotides in length. As a non-limiting example, the viral genome comprises a filler region that is about 1519 nucleotides in length. As a non-limiting example, the viral genome comprises a filler region that is about 2395 nucleotides in length. As a non-limiting example, the viral genome comprises a filler region that is about 2403 nucleotides in length. As a non-limiting example, the viral genome comprises a filler region that is about 2405 nucleotides in length. As a non-limiting example, the viral genome comprises a filler region that is about 3013 nucleotides in length. As a non-limiting example, the viral genome comprises a filler region that is about 3021 nucleotides in length.

[0597] In one embodiment, the AAV particle viral genome may comprise at least one multiple filler sequence region. The filler region(s) may, independently, have a length such as, but not limited to, 50, 51, 52, 53, 54, 55, 56, 57, 58, 59, 60, 61, 62, 63, 64, 65, 66, 67, 68, 69, 70, 71, 72, 73, 74, 75, 76, 77, 78, 79, 80, 81, 82, 83, 84, 85, 86, 87, 88, 89, 90, 91, 92, 93, 94, 95, 96, 97, 98, 99, 100, 101, 102, 103, 104, 105, 106, 107, 108, 109, 110, 111, 112, 113, 114, 115, 116, 117, 118, 119, 120, 121, 122, 123, 124, 125, 126, 127, 128, 129, 130, 131, 132, 133, 134, 135, 136, 137, 138, 139, 140, 141, 142, 143, 144, 145, 146, 147, 148, 149, 150, 151, 152, 153, 154, 155, 156, 157, 158, 159, 160, 161, 162, 163, 164, 165, 166, 167, 168, 169, 170, 171, 172, 173, 174, 175, 176, 177, 178, 179, 180, 181, 182, 183, 184, 185, 186, 187, 188, 189, 190, 191, 192, 193, 194, 195, 196, 197, 198, 199, 200, 201, 202, 203, 204, 205, 206, 207, 208, 209, 210, 211, 212, 213, 214, 215, 216, 217, 218, 219, 220, 221, 222, 223, 224, 225, 226, 227, 228, 229, 230, 231, 232, 233, 234, 235, 236, 237, 238, 239, 240, 241, 242, 243, 244, 245, 246, 247, 248, 249, 250, 251, 252, 253, 254, 255, 256, 257, 258, 259, 260, 261, 262, 263, 264, 265, 266, 267, 268, 269, 270, 271, 272, 273, 274, 275, 276, 277, 278, 279, 280, 281, 282, 283, 284, 285, 286, 287, 288, 289, 290, 291, 292, 293, 294, 295, 296, 297, 298, 299, 300, 301, 302, 303, 304, 305, 306, 307, 308, 309, 310, 311, 312, 313, 314, 315, 316, 317, 318, 319, 320, 321, 322, 323, 324, 325, 326, 327, 328, 329, 330, 331, 332, 333, 334, 335, 336, 337, 338, 339, 340, 341, 342, 343, 344, 345, 346, 347, 348, 349, 350, 351, 352, 353, 354, 355, 356, 357, 358, 359, 360, 361, 362, 363, 364, 365, 366, 367, 368, 369, 370, 371, 372, 373, 374, 375, 376, 377, 378, 379, 380, 381, 382, 383, 384, 385, 386, 387, 388, 389, 390, 391, 392, 393, 394, 395, 396, 397, 398, 399, 400, 401, 402, 403, 404, 405, 406, 407, 408, 409, 410, 411, 412, 413, 414, 415, 416, 417, 418, 419, 420, 421, 422, 423, 424, 425, 426, 427, 428, 429, 430, 431, 432, 433, 434, 435, 436, 437, 438, 439, 440, 441, 442, 443, 444, 445, 446, 447, 448, 449, 450, 451, 452, 453, 454, 455, 456, 457, 458, 459, 460, 461, 462, 463, 464, 465, 466, 467, 468, 469, 470, 471, 472, 473, 474, 475, 476, 477, 478, 479, 480, 481, 482, 483, 484, 485, 486, 487, 488, 489, 490, 491, 492, 493, 494, 495, 496, 497, 498, 499, 500, 501, 502, 503, 504, 505, 506, 507, 508, 509, 510, 511, 512, 513, 514, 515, 516, 517, 518, 519, 520, 521, 522, 523, 524, 525, 526, 527, 528, 529, 530, 531, 532, 533, 534, 535, 536, 537, 538, 539, 540, 541, 542, 543, 544, 545, 546, 547, 548, 549, 550, 551, 552, 553, 554, 555, 556, 557, 558, 559, 560, 561, 562, 563, 564, 565, 566, 567, 568, 569, 570, 571, 572, 573, 574, 575, 576, 577, 578, 579, 580, 581, 582, 583, 584, 585, 586, 587, 588, 589, 590, 591, 592, 593, 594, 595, 596, 597, 598, 599, 600, 601, 602, 603, 604, 605, 606, 607, 608, 609, 610, 611, 612, 613, 614, 615, 616, 617, 618, 619, 620, 621, 622, 623, 624, 625, 626, 627, 628, 629, 630, 631, 632, 633, 634, 635, 636, 637, 638, 639, 640, 641, 642, 643, 644, 645, 646, 647, 648, 649, 650, 651, 652, 653, 654, 655, 656, 657, 658, 659, 660, 661, 662, 663, 664, 665, 666, 667, 668, 669, 670, 671, 672, 673, 674, 675, 676, 677, 678, 679, 680, 681, 682, 683, 684, 685, 686, 687, 688, 689, 690, 691, 692, 693, 694, 695, 696, 697, 698, 699, 700, 701, 702, 703, 704, 705, 706, 707, 708, 709, 710, 711, 712, 713, 714, 715, 716, 717, 718, 719, 720, 721, 722, 723, 724, 725, 726, 727, 728, 729, 730, 731, 732, 733, 734, 735, 736, 737, 738, 739, 740, 741, 742, 743, 744, 745, 746, 747, 748, 749, 750, 751, 752, 753, 754, 755, 756, 757, 758, 759, 760, 761, 762, 763, 764, 765, 766, 767, 768, 769, 770, 771, 772, 773, 774, 775, 776, 777, 778, 779, 780, 781, 782, 783, 784, 785, 786, 787, 788, 789, 790, 791, 792, 793, 794, 795, 796, 797, 798, 799, 800, 801, 802, 803, 804, 805, 806, 807, 808, 809, 810, 811, 812, 813, 814, 815, 816, 817, 818, 819, 820, 821, 822, 823, 824, 825, 826, 827, 828, 829, 830, 831, 832, 833, 834, 835, 836, 837, 838, 839, 840, 841, 842, 843, 844, 845, 846, 847, 848, 849, 850, 851, 852, 853, 854, 855, 856, 857, 858, 859, 860, 861, 862, 863, 864, 865, 866, 867, 868, 869, 870, 871, 872, 873, 874, 875, 876, 877, 878, 879, 880, 881, 882, 883, 884, 885, 886, 887, 888, 889, 890, 891, 892, 893, 894, 895, 896, 897, 898, 899, 900, 901, 902, 903, 904, 905, 906, 907, 908, 909, 910, 911, 912, 913, 914, 915, 916, 917, 918, 919, 920, 921, 922, 923, 924, 925, 926, 927, 928, 929, 930, 931, 932, 933, 934, 935, 936, 937, 938, 939, 940, 941, 942, 943, 944, 945, 946, 947, 948, 949, 950, 951, 952, 953, 954, 955, 956, 957, 958, 959, 960, 961, 962, 963, 964, 965, 966, 967, 968, 969, 970, 971, 972, 973, 974, 975, 976, 977, 978, 979, 980, 981, 982, 983, 984, 985, 986, 987, 988, 989, 990, 991, 992, 993, 994, 995, 996, 997, 998, 999, 1000, 1001, 1002, 1003, 1004, 1005, 1006, 1007, 1008, 1009, 1010, 1011, 1012, 1013, 1014, 1015, 1016, 1017, 1018, 1019, 1020, 1021, 1022, 1023, 1024, 1025, 1026, 1027, 1028, 1029, 1030, 1031, 1032, 1033, 1034, 1035, 1036, 1037, 1038, 1039, 1040, 1041, 1042, 1043, 1044, 1045, 1046, 1047, 1048, 1049, 1050, 1051, 1052, 1053, 1054, 1055, 1056, 1057, 1058, 1059, 1060, 1061, 1062, 1063, 1064, 1065, 1066, 1067, 1068, 1069, 1070, 1071, 1072, 1073, 1074, 1075, 1076, 1077, 1078, 1079, 1080, 1081, 1082, 1083, 1084, 1085, 1086, 1087, 1088, 1089, 1090, 1091, 1092, 1093, 1094, 1095, 1096, 1097, 1098, 1099, 1100, 1101, 1102, 1103, 1104, 1105, 1106, 1107, 1108, 1109, 1110, 1111, 1112, 1113, 1114, 1115, 1116, 1117, 1118, 1119, 1120, 1121, 1122, 1123, 1124, 1125, 1126, 1127, 1128, 1129, 1130, 1131, 1132, 1133, 1134, 1135, 1136, 1137, 1138, 1139, 1140, 1141, 1142, 1143, 1144, 1145, 1146, 1147, 1148, 1149, 1150, 1151, 1152, 1153, 1154, 1155, 1156, 1157, 1158, 1159, 1160, 1161, 1162, 1163, 1164, 1165, 1166, 1167, 1168, 1169, 1170, 1171, 1172, 1173, 1174, 1175, 1176, 1177, 1178, 1179, 1180, 1181, 1182, 1183, 1184, 1185, 1186, 1187, 1188, 1189, 1190, 1191, 1192, 1193, 1194, 1195, 1196, 1197, 1198, 1199, 1200, 1201, 1202, 1203, 1204, 1205, 1206, 1207, 1208, 1209, 1210, 1211, 1212, 1213, 1214, 1215, 1216, 1217, 1218, 1219, 1220, 1221, 1222, 1223, 1224, 1225, 1226, 1227, 1228, 1229, 1230, 1231, 1232, 1233, 1234, 1235, 1236, 1237, 1238, 1239, 1240, 1241, 1242, 1243, 1244, 1245, 1246, 1247, 1248, 1249, 1250, 1251, 1252, 1253, 1254, 1255, 1256, 1257, 1258, 1259, 1260, 1261, 1262, 1263, 1264, 1265, 1266, 1267, 1268, 1269, 1270, 1271, 1272, 1273, 1274, 1275, 1276, 1277, 1278, 1279, 1280, 1281, 1282, 1283, 1284, 1285, 1286, 1287, 1288, 1289, 1290, 1291, 1292, 1293, 1294, 1295, 1296, 1297, 1298, 1299, 1300, 1301, 1302, 1303, 1304, 1305, 1306, 1307, 1308, 1309, 1310, 1311, 1312, 1313, 1314, 1315, 1316, 1317, 1318, 1319, 1320, 1321, 1322, 1323, 1324, 1325, 1326, 1327, 1328, 1329, 1330, 1331, 1332, 1333, 1334, 1335, 1336, 1337, 1338, 1339, 1340, 1341, 1342, 1343, 1344, 1345, 1346, 1347, 1348, 1349, 1350, 1351, 1352, 1353, 1354, 1355, 1356, 1357, 1358, 1359, 1360, 1361, 1362, 1363, 1364, 1365, 1366, 1367, 1368, 1369, 1370, 1371, 1372, 1373, 1374, 1375, 1376, 1377, 1378, 1379, 1380, 1381, 1382, 1383, 1384, 1385, 1386, 1387, 1388, 1389, 1390, 1391, 1392, 1393, 1394, 1395, 1396, 1397, 1398, 1399, 1400, 1401, 1402, 1403, 1404, 1405, 1406, 1407, 1408, 1409, 1410, 1411, 1412, 1413, 1414, 1415, 1416, 1417, 1418, 1419, 1420, 1421, 1422, 1423, 1424, 1425, 1426, 1427, 1428, 1429, 1430, 1431, 1432, 1433, 1434, 1435, 1436, 1437, 1438, 1439, 1440, 1441, 1442, 1443, 1444, 1445, 1446, 1447, 1448, 1449, 1450, 1451, 1452, 1453, 1454, 1455, 1456, 1457, 1458, 1459, 1460, 1461, 1462, 1463, 1464, 1465, 1466, 1467, 1468, 1469, 1470, 1471, 1472, 1473, 1474, 1475, 1476, 1477, 1478, 1479, 1480, 1481, 1482, 1483, 1484, 1485, 1486, 1487, 1488, 1489, 1490, 1491, 1492, 1493, 1494, 1495, 1496, 1497, 1498, 1499, 1500, 1501, 1502, 1503, 1504, 1505, 1506, 1507, 1508, 1509, 1510, 1511, 1512, 1513, 1514, 1515, 1516, 1517, 1518, 1519, 1520, 1521, 1522, 1523, 1524, 1525, 1526, 1527, 1528, 1529, 1530, 1531, 1532, 1533, 1534, 1535, 1536, 1537, 1538, 1539, 1540, 1541, 1542, 1543, 1544, 1545, 1546, 1547, 1548, 1549, 1550, 1551, 1552, 1553, 1554, 1555, 1556, 1557, 1558, 1559, 1560, 1561, 1562, 1563, 1564, 1565, 1566, 1567, 1568, 1569, 1570, 1571, 1572, 1573, 1574, 1575, 1576, 1577, 1578, 1579, 1580, 1581, 1582, 1583, 1584, 1585, 1586, 1587, 1588, 1589, 1590, 1591, 1592, 1593, 1594, 1595, 1596, 1597, 1598, 1599, 1600, 1601, 1602, 1603, 1604, 1605, 1606, 1607, 1608, 1609, 1610, 1611, 1612, 1613, 1614, 1615, 1616, 1617, 1618, 1619, 1620, 1621, 1622, 1623, 1624, 1625, 1626, 1627, 1628, 1629, 1630, 1631, 1632, 1633, 1634, 1635, 1636, 1637, 1638, 1639, 1640, 1641, 1642, 1643, 1644, 1645, 1646, 1647, 1648, 1649, 1650, 1651, 1652, 1653, 1654, 1655, 1656, 1657, 1658, 1659, 1660, 1661, 1662, 1663, 1664, 1665, 1666, 1667, 1668, 1669, 1670, 1671, 1672, 1673, 1674, 1675, 1676, 1677, 1678, 1679, 1680, 1681, 1682, 1683, 1684, 1685, 1686, 1687, 1688, 1689, 1690, 1691, 1692, 1693, 1694, 1695, 1696, 1697, 1698, 1699, 1700, 1701, 1702, 1703, 1704, 1705, 1706, 1707, 1708, 1709, 1710, 1711, 1712, 1713, 1714, 1715, 1716, 1717, 1718, 1719, 1720, 1721, 1722, 1723, 1724, 1725, 1726, 1727, 1728, 1729, 1730, 1731, 1732, 1733, 1734, 1735, 1736, 1737, 1738, 1739, 1740, 1741, 1742, 1743, 1744, 1745, 1746, 1747, 1748, 1749, 1750, 1751, 1752, 1753, 1754, 1755, 1756, 1757, 1758, 1759, 1760, 1761, 1762, 1763, 1764, 1765, 1766, 1767, 1768, 1769, 1770, 1771, 1772, 1773, 1774, 1775, 1776, 1777, 1778, 1779, 1780, 1781, 1782, 1783, 1784, 1785, 1786, 1787, 1788, 1789, 1790, 1791, 1792, 1793, 1794, 1795, 1796, 1797, 1798, 1799, 1800, 1801, 1802, 1803, 1804, 1805, 1806, 1807, 1808, 1809, 1810, 1811, 1812, 1813, 1814, 1815, 1816, 1817, 1818, 1819, 1820, 1821, 1822, 1823, 1824, 1825, 1826, 1827, 1828, 1829, 1830, 1831, 1832, 1833, 1834, 1835, 1836, 1837, 1838, 1839, 1840, 1841, 1842, 1843, 1844, 1845, 1846, 1847, 1848, 1849, 1850, 1851, 1852, 1853, 1854, 1855, 1856, 1857, 1858, 1859, 1860, 1861, 1862, 1863, 1864, 1865, 1866, 1867, 1868, 1869, 1870, 1871, 1872, 1873, 1874, 1875, 1876, 1877, 1878, 1879, 1880, 1881, 1882, 1883, 1884, 1885, 1886, 1887, 1888, 1889, 1890, 1891, 1892, 1893, 1894, 1895, 1896, 1897, 1898, 1899, 1900, 1901, 1902, 1903, 1904, 1905, 1906, 1907, 1908, 1909, 1910, 1911, 1912, 1913, 1914, 1915, 1916, 1917, 1918, 1919, 1920, 1921, 1922, 1923, 1924, 1925, 1926, 1927, 1928, 1929, 1930, 1931, 1932, 1933, 1934, 1935, 1936, 1937, 1938, 1939, 1940, 1941, 1942, 1943, 1944, 1945, 1946, 1947, 1948, 1949, 1950, 1951, 1952, 1953, 1954, 1955, 1956, 1957, 1958, 1959, 1960, 1961, 1962, 1963, 1964, 1965, 1966, 1967, 1968, 1969, 1970, 1971, 1972, 1973, 1974, 1975, 1976, 1977, 1978, 1979, 1980, 1981, 1982, 1983, 1984, 1985, 1986, 1987, 1988, 1989, 1990, 1991, 1992, 1993, 1994, 1995, 1996, 1997, 1998, 1999, 2000, 2001, 2002, 2003, 2004, 2005, 2006, 2007, 2008, 2009, 2010, 2011, 2012, 2013, 2014, 2015, 2016, 2017, 2018, 2019, 2020, 2021, 2022, 2023, 2024, 2025, 2026, 2027, 2028, 2029, 2030, 2031, 2032, 2033, 2034, 2035, 2036, 2037, 2038, 2039, 2040, 2041, 2042, 2043, 2044, 2045, 2046, 2047, 2048, 2049, 2050, 2051, 2052, 2053, 2054, 2055, 2056, 2057, 2058, 2059, 2060, 2061, 2062, 2063, 2064, 2065, 2066, 2067, 2068, 2069, 2070, 2071, 2072, 2073, 2074, 2075, 2076, 2077, 2078, 2079, 2080, 2081, 2082, 2083, 2084, 2085, 2086, 2087, 2088, 2089, 2090, 2091, 2092, 2093, 2094, 2095, 2096, 2097, 2098, 2099, 2100, 2101, 2102, 2103, 2104, 2105, 2106, 2107, 2108, 2109, 2110, 2111, 2112, 2113, 2114, 2115, 2116, 2117, 2118, 2119, 2120, 2121, 2122, 2123, 2124, 2125, 2126, 2127, 2128, 2129, 2130, 2131, 2132, 2133, 2134, 2135, 2136, 2137, 2138, 2139, 2140, 2141, 2142, 2143, 2144, 2145, 2146, 2147, 2148, 2149, 2150, 2151, 2152, 2153, 2154, 2155, 2156, 2157, 2158, 2159, 2160, 2161, 2162, 2163, 2164, 2165, 2166, 2167, 2168, 2169, 2170, 2171, 2172, 2173, 2174, 2175, 2176, 2177, 2178, 2179, 2180, 2181, 2182, 2183, 2184, 2185, 2186, 2187, 2188, 2189, 2190, 2191, 2192, 2193, 2194, 2195, 2196, 2197, 2198, 2199, 2200, 2201, 2202, 2203, 2204, 2205, 2206, 2207, 2208, 2209, 2210, 2211, 2212, 2213, 2214, 2215, 2216, 2217, 2218, 2219, 2220, 2221, 2222, 2223, 2224, 2225, 2226, 2227, 2228, 2229, 2230, 2231, 2232, 2233, 2234, 2235, 2236, 2237, 2238, 2239, 2240, 2241, 2242, 2243, 2244, 2245, 2246, 2247, 2248, 2249, 2250, 2251, 2252, 2253, 2254, 2255, 2256, 2257, 2258, 2259, 2260, 2261, 2262, 2263, 2264, 2265, 2266, 2267, 2268, 2269, 2270, 2271, 2272, 2273, 2274, 2275, 2276, 2277, 2278, 2279, 2280, 2281, 2282, 2283, 2284, 2285, 2286, 2287, 2288, 2289, 2290, 2291, 2292, 2293, 2294, 2295, 2296, 2297, 2298, 2299, 2300, 2301, 2302, 2303, 2304, 2305, 2306, 2307, 2308, 2309, 2310, 2311, 2312, 2313, 2314, 2315, 2316, 2317, 2318, 2319, 2320, 2321, 2322, 2323, 2324, 2325, 2326, 2327, 2328, 2329, 2330, 2331, 2332, 2333, 2334, 2335, 2336, 2337, 2338, 2339, 2340, 2341, 2342, 2343, 2344, 2345, 2346, 2347, 2348, 2349, 2350, 2351, 2352, 2353, 2354, 2355, 2356, 2357, 2358, 2359, 2360, 2361, 2362, 2363, 2364, 2365, 2366, 2367, 2368, 2369, 2370, 2371, 2372, 2373, 2374, 2375, 2376, 2377, 2378, 2379, 2380, 2381, 2382, 2383, 2384, 2385, 2386, 2387, 2388, 2389, 2390, 2391, 2392, 2393, 2394, 2395, 2396, 2397, 2398, 2399, 2400, 2401, 2402, 2403, 2404, 2405, 2406, 2407, 2408, 2409, 2410, 2411, 2412, 2413, 2414, 2415, 2416, 2417, 2418, 2419, 2420, 2421, 2422, 2423, 2424, 2425, 2426, 2427, 2428, 2429, 2430, 2431, 2432, 2433, 2434, 2435, 2436, 2437, 2438, 2439, 2440, 2441, 2442, 2443, 2444, 2445, 2446, 2447, 2448, 2449, 2450, 2451, 2452, 2453, 2454, 2455, 2456, 2457, 2458, 2459, 2460, 2461, 2462, 2463, 2464, 2465, 2466, 2467, 2468, 2469, 2470, 2471, 2472, 2473, 2474, 2475, 2476, 2477, 2478, 2479, 2480, 2481, 2482, 2483, 2484, 2485, 2486, 2487, 2488, 2489, 2490, 2491, 2492, 2493, 2494, 2495, 2496, 2497, 2498, 2499, 2500, 2501, 2502, 2503, 2504, 2505, 2506, 2507, 2508, 2509, 2510, 2511, 2512, 2513, 2514, 2515, 2516, 2517, 2518, 2519, 2520, 2521, 2522, 2523, 2524, 2525, 2526, 2527, 2528, 2529, 2530, 2531, 2532, 2533, 2534, 2535, 2536, 2537, 2538, 2539, 2540, 2541, 2542, 2543, 2544, 2545, 2546, 2547, 2548, 2549, 2550, 2551, 2552, 2553, 2554, 2555, 2556, 2557, 2558, 2559, 2560, 2561, 2562, 2563, 2564, 2565, 2566, 2567, 2568, 2569, 2570, 2571, 2572, 2573, 2574, 2575, 2576, 2577, 2578, 2579, 2580, 2581, 2582, 2583, 2584, 2585, 2586, 2587, 2588, 2589, 2590, 2591, 2592, 2593, 2594, 2595, 2596, 2597, 2598, 2599, 2600, 2601, 2602, 2603, 2604, 2605, 2606, 2607, 2608, 2609, 2610, 2611, 2612, 2613, 2614, 2615, 2616, 2617, 2618, 2619, 2620, 2621, 2622, 2623, 2624, 2625, 2626, 2627, 2628, 2629, 2630, 2631, 2632, 2633, 2634, 2635, 2636, 2637, 2638, 2639, 2640, 2641, 2642, 2643, 2644, 2645, 2646, 2647, 2648, 2649, 2650, 2651, 2652, 2653, 2654, 2655, 2656, 2657, 2658, 2659, 2660, 2661, 2662, 2663, 2664, 2665, 2666, 2667, 2668, 2669, 2670, 2671, 2672, 2673, 2674, 2675, 2676, 2677, 2678, 2679, 2680, 2681, 2682, 2683, 2684, 2685, 2686, 2687, 2688, 2689, 2690, 2691, 2692, 2693, 2694, 2695, 2696, 2697, 2698, 2699, 2700, 2701, 2702, 2703, 2704, 2705, 2706, 2707, 2708, 2709, 2710, 2711, 2712, 2713, 2714, 2715, 2716, 2717, 2718, 2719, 2720, 2721, 2722, 2723, 2724, 2725, 2726, 2727, 2728, 2729, 2730, 2731, 2732, 2733, 2734, 2735, 2736, 2737, 2738, 2739, 2740, 2741, 2742, 2743, 2744, 2745, 2746, 2747, 2748, 2749, 2750, 2751, 2752, 2753, 2754, 2755, 2756, 2757, 2758, 2759, 2760, 2761, 2762, 2763, 2764, 2765, 2766, 2767, 2768, 2769, 2770, 2771, 2772, 2773, 2774, 2775, 2776, 2777, 2778, 2779, 2780, 2781, 2782, 2783, 2784, 2785, 2786, 2787, 2788, 2789, 2790, 2791, 2792, 2793, 2794, 2795, 2796, 2797, 2798, 2799, 2800, 2801, 2802, 2803, 2804, 2805, 2806, 2807, 2808, 2809, 2810, 2811, 2812, 2813, 2814, 2815, 2816, 2817, 2818, 2819, 2820, 2821, 2822, 2823, 2824, 2825, 2826, 2827, 2828, 2829, 2830, 2831, 2832, 2833, 2834, 2835, 2836, 2837, 2838, 2839, 2840, 2841, 2842, 2843, 2844, 2845, 2846, 2847, 2848, 2849, 2850, 2851, 2852, 2853, 2854, 2855, 2856, 2857, 2858, 2859, 2860, 2861, 2862, 2863, 2864, 2865, 2866, 2867, 2868, 2869, 2870, 2871, 2872, 2873, 2874, 2875, 2876, 2877, 2878, 2879, 2880, 2881, 2882, 2883, 2884, 2885, 2886, 2887, 2888, 2889, 2890, 2891, 2892, 2893, 2894, 2895, 2896, 2897, 2898, 2899, 2900, 2901, 2902, 2903, 2904, 2905, 2906, 2907, 2908, 2909, 2910, 2911, 2912, 2913, 2914, 2915, 2916, 2917, 2918, 2919, 2920, 2921, 2922, 2923, 2924, 2925, 2926, 2927, 2928, 2929, 2930, 2931, 2932, 2933, 2934, 2935, 2936, 2937, 2938, 2939, 2940, 2941, 2942, 2943, 2944, 2945, 2946, 2947, 2948, 2949, 2950, 2951, 2952, 2953, 2954, 2955, 2956, 2957, 2958, 2959, 2960, 2961, 2962, 2963, 2964, 2965, 2966, 2967, 2968, 2969, 2970, 2971, 2972, 2973, 2974, 2975, 2976, 2977, 2978, 2979, 2980, 2981, 2982, 2983, 2984, 2985, 2986, 2987, 2988, 2989, 2990, 2991, 2992, 2993, 2994, 2995, 2996, 2997, 2998, 2999, 3000, 3001, 3002, 3003, 3004, 3005, 3006, 3007, 3008, 3009, 3010, 3011, 3012, 3013, 3014, 3015, 3016, 3017, 3018, 3019, 3020, 3021, 3022, 3023, 3024, 3025, 3026, 3027, 3028, 3029, 3030, 3031, 3032, 3033, 3034, 3035, 3036, 3037, 3038, 3039, 3040, 3041, 3042, 3043, 3044, 3045, 3046, 3047, 3048, 3049, 3050, 3051, 3052, 3053, 3054, 3055, 3056, 3057, 3058, 3059, 3060, 3061, 3062, 3063, 3064, 3065, 3066, 3067, 3068, 3069, 3070, 3071, 3072, 3073, 3074, 3075, 3076, 3077, 3078, 3079, 3080, 3081, 3082, 3083, 3084, 3085, 3086, 3087, 3088, 3089, 3090, 3091, 3092, 3093, 3094, 3095, 3096, 3097, 3098, 3099, 3100, 3101, 3102, 3103, 3104, 3105, 3106, 3107, 3108, 3109, 3110, 3111, 3112, 3113, 3114, 3115, 3116, 3117, 3118, 3119, 3120, 3121, 3122, 3123, 3124, 3125, 3126, 3127, 3128, 3129, 3130, 3131, 3132, 3133, 3134, 3135, 3136, 3137, 3138, 3139, 3140, 3141, 3142, 3143, 3144, 3145, 3146, 3147, 3148, 3149, 3150, 3151, 3152, 3153, 3154, 3155, 3156, 3157, 3158, 3159, 3160, 3161, 3162, 3163, 3164, 3165, 3166, 3167, 3168, 3169, 3170, 3171, 3172, 3173, 3174, 3175, 3176, 3177, 3178, 3179, 3180, 3181, 3182, 3183, 3184, 3185, 3186, 3187, 3188, 3189, 3190, 3191, 3192, 3193, 3194, 3195, 3196, 3197, 3198, 3199, 3200, 3201, 3202, 3203, 3204, 3205, 3206, 3207, 3208, 3209, 3210, 3211, 3212, 3213, 3214, 3215, 3216, 3217, 3218, 3219, 3220, 3221, 3222, 3223, 3224, 3225, 3226, 3227, 3228, 3229, 3230, 3231, 3232, 3233, 3234, 3235, 3236, 3237, 3238, 3239, 3240, 3241, 3242, 3243, 3244, 3245, 3246, 3247, 3248, 3249, and 3250 nucleotides. The length of any filler region for the viral genome may be 50-100, 100-150, 150-200, 200-250, 250-300, 300-350, 350-400, 400-450, 450-500, 500-550, 550-600, 600-650, 650-700, 700-750, 750-800, 800-850, 850-900, 900-950, 950-1000, 1000-1050, 1050-1100, 1100-1150, 1150-1200, 1200-1250, 1250-1300, 1300-1350, 1350-1400, 1400-1450, 1450-1500, 1500-1550, 1550-1600, 1600-1650, 1650-1700, 1700-1750, 1750-1800, 1800-1850, 1850-1900, 1900-1950, 1950-2000, 2000-2050, 2050-2100, 2100-2150, 2150-2200, 2200-2250, 2250-2300, 2300-2350, 2350-2400, 2400-2450, 2450-2500, 2500-2550, 2550-2600, 2600-2650, 2650-2700, 2700-2750, 2750-2800, 2800-2850, 2850-2900, 2900-2950, 2950-3000, 3000-3050, 3050-3100, 3100-3150, 3150-3200, and 3200-3250 nucleotides. As a non-limiting example, the viral genome comprises a filler region that is about 55 nucleotides in length. As a non-limiting example, the viral genome comprises a filler region that is about 56 nucleotides in length. As a non-limiting example, the viral genome comprises a filler region that is about 97 nucleotides in length. As a non-limiting example, the viral genome comprises a filler region that is about 103 nucleotides in length. As a non-limiting example, the viral genome comprises a filler region that is about 105 nucleotides in length. As a non-limiting example, the viral genome comprises a filler region that is about 357 nucleotides in length. As a non-limiting example, the viral genome comprises a filler region that is about 363 nucleotides in length. As a non-limiting example, the viral genome comprises a filler region that is about 712 nucleotides in length. As a non-limiting example, the viral genome comprises a filler region that is about 714 nucleotides in length. As a non-limiting example, the viral genome comprises a filler region that is about 1203 nucleotides in length. As a non-limiting example, the viral genome comprises a filler region that is about 1209 nucleotides in length. As a non-limiting example, the viral genome comprises a filler region that is about 1512 nucleotides in length. As a non-limiting example, the viral genome comprises a filler region that is about 1519 nucleotides in length. As a non-limiting example, the viral genome comprises a filler region that is about 2395 nucleotides in length. As a non-limiting example, the viral genome comprises a filler region that is about 2403 nucleotides in length. As a non-limiting example, the viral genome comprises a filler region that is about 2405 nucleotides in length. As a non-limiting example, the viral genome comprises a filler region that is about 3013 nucleotides in length. As a non-limiting example, the viral genome comprises a filler region that is about 3021 nucleotides in length.

[0598] In one embodiment, the AAV particle viral genome comprises at least one filler sequence regions. Non-limiting examples of filler sequence regions are described in Table 12.

TABLE 12
Filler Sequence Regions

| Sequence Region Name | SEQ ID NO |
|---|---|
| FILL1 | 1379 |
| FILL2 | 1380 |
| FILL3 | 1381 |
| FILL4 | 1382 |
| FILL5 | 1383 |
| FILL6 | 1384 |
| F1LL7 | 1385 |
| FILL8 | 1386 |
| FILL9 | 1387 |
| FILL10 | 1388 |
| FILL11 | 1389 |
| FILL12 | 1390 |
| FILL13 | 1391 |
| FILL14 | 1392 |
| FILL15 | 1393 |
| FILL16 | 1394 |
| FILL17 | 1395 |
| FILL18 | 1396 |

[0599] In one embodiment, the AAV particle viral genome comprises one filler sequence region. In one embodiment, the filler sequence region is the FILL1 sequence region. In one embodiment, the filler sequence region is the FILL2 sequence region. In one embodiment, the filler sequence region is the FILL3 sequence region. In one embodiment, the filler sequence region is the FILL4 sequence region. In one embodiment, the filler sequence region is the FILL5 sequence region. In one embodiment, the filler sequence region is the FILL6 sequence region. In one embodiment, the filler sequence region is the FILL7 sequence region. In one embodiment, the filler sequence region is the FILL8 sequence region. In one embodiment, the filler sequence region is the FILL9 sequence region. In one embodiment, the filler sequence region is the FILL10 sequence region. In one embodiment, the filler sequence region is the FILL11 sequence region. In one embodiment, the filler sequence region is the FILL12 sequence region. In one embodiment, the filler sequence region is the FILL13 sequence region. In one embodiment, the filler sequence region is the FILL14 sequence region. In one embodiment, the filler sequence region is the FILL15 sequence region. In one embodiment, the filler sequence region is the FILL16 sequence region. In one embodiment, the filler sequence region is the FILL17 sequence region. In one embodiment, the filler sequence region is the FILL18 sequence region.

[0600] In one embodiment, the AAV particle viral genome comprises two filler sequence regions. In one embodiment, the two filler sequence regions are the FILL1 sequence region, and the FILL2 sequence region. In one embodiment, the filler sequence region is the FILL1 sequence region, and the FILL3 sequence region. In one embodiment, the filler sequence region is the FILL1 sequence region, and the FILL4 sequence region. In one embodiment, the filler sequence region is the FILL1 sequence region, and the FILL5 sequence region. In one embodiment, the filler sequence region is the FILL1 sequence region, and the FILL6 sequence region. In one embodiment, the filler sequence region is the FILL1 sequence region, and the FILL7 sequence region. In one embodiment, the filler sequence region is the FILL1 sequence region, and the FILL8 sequence region. In one embodiment, the filler sequence region is the FILL1 sequence region, and the FILL9 sequence region. In one embodiment, the filler sequence region is the FILL1 sequence region, and the FILL10 sequence region. In one embodiment, the filler sequence region is the FILL1 sequence region, and the FILL11 sequence region. In one embodiment, the filler sequence region is the FILL1 sequence region, and the FILL12 sequence region. In one embodiment, the filler sequence region is the FILL1 sequence region, and the FILL13 sequence region. In one embodiment, the filler sequence region is the FILL1 sequence region, and the FILL14 sequence region. In one embodiment, the filler sequence region is the FILL1 sequence region, and the FILL15 sequence region. In one embodiment, the filler sequence region is the FILL1 sequence region, and the FILL16 sequence region. In one embodiment, the filler sequence region is the FILL1 sequence region, and the FILL17 sequence region. In one embodiment, the filler sequence region is the FILL1 sequence region, and the FILL18 sequence region. In one embodiment, the filler sequence region is the FILL2 sequence region, and the FILL3 sequence region. In one embodiment, the filler sequence region is the FILL3 sequence region, and the FILL4 sequence region. In one embodiment, the filler sequence region is the FILL3 sequence region, and the FILL5 sequence region. In one embodiment, the filler sequence region is the FILL3 sequence region, and the FILL6 sequence region. In one embodiment, the filler sequence region is the FILL3 sequence region, and the FILL7 sequence region. In one embodiment, the filler sequence region is the FILL3 sequence region, and the FILL8 sequence region. In one embodiment, the filler sequence region is the FILL3 sequence region, and the FILL9 sequence region. In one embodiment, the filler sequence region is the FILL3 sequence region, and the FILL10 sequence region. In one embodiment, the filler sequence region is the FILL3 sequence region, and the FILL11 sequence region. In one embodiment, the filler sequence region is the FILL3 sequence region, and the FILL12 sequence region. In one embodiment, the filler sequence region is the FILL3 sequence region, and the FILL13 sequence region. In one embodiment, the filler sequence region is the FILL3 sequence region, and the FILL14 sequence region. In one embodiment, the filler sequence region is the FILL3 sequence region, and the FILL15 sequence region. In one embodiment, the filler sequence region is the FILL3 sequence region, and the FILL16 sequence region. In one embodiment, the filler sequence region is the FILL3 sequence region, and the FILL17 sequence region. In one embodiment, the filler sequence region is the FILL3 sequence region, and the FILL18 sequence region. In one embodiment, the filler sequence region is the FILL4 sequence region, and the FILL5 sequence region. In one embodiment, the filler sequence region is the FILL4 sequence region, and the FILL6 sequence region. In one embodiment, the filler sequence region is the FILL4 sequence region, and the FILL7 sequence region. In one embodiment, the filler sequence region is the FILL4 sequence region, and the FILL8 sequence region. In one embodiment, the filler sequence region is the FILL4 sequence region, and the FILL9 sequence region. In one embodiment, the filler sequence region is the FILL4 sequence region, and the FILL10 sequence region. In one embodiment, the filler sequence region is the FILL4 sequence region, and the FILL11 sequence region. In one embodiment, the filler sequence region is the FILL4 sequence region, and the FILL12 sequence region. In one embodiment, the filler sequence region is the FILL4 sequence region, and the FILL13 sequence region. In one embodiment, the filler sequence region is the FILL4 sequence region, and the FILL14 sequence region. In one embodiment, the filler sequence region is the FILL4 sequence region, and the FILL15 sequence region. In one embodiment, the filler sequence region is the FILL4 sequence region, and the FILL16 sequence region. In one embodiment, the filler sequence region is the FILL4 sequence region, and the FILL17 sequence region. In one embodiment, the filler sequence region is the FILL4 sequence region, and the FILL18 sequence region. In one embodiment, the filler sequence region is the FILL5 sequence region, and the FILL6 sequence region. In one embodiment, the filler sequence region is the FILL5 sequence region, and the FILL7 sequence region. In one embodiment, the filler sequence region is the FILL5 sequence region, and the FILL8 sequence region. In one embodiment, the filler sequence region is the FILL5 sequence region, and the FILL9 sequence region. In one embodiment, the filler sequence region is the FILL5 sequence region, and the FILL10 sequence region. In one embodiment, the filler sequence region is the FILL5 sequence region, and the FILL11 sequence region. In one embodiment, the filler sequence region is the FILL5 sequence region, and the FILL12 sequence region. In one embodiment, the filler sequence region is the FILL5 sequence region, and the FILL13 sequence region. In one embodiment, the filler sequence region is the FILL5 sequence region, and the FILL14 sequence region. In one embodiment, the filler sequence region is the FILL5 sequence region, and the FILL15 sequence region. In one embodiment, the filler sequence region is the FILL5 sequence region, and the FILL16 sequence region. In one embodiment, the filler sequence region is the FILL5 sequence region, and the FILL17 sequence region. In one embodiment, the filler sequence region is the FILL5 sequence region, and the FILL18 sequence region. In one embodiment, the filler sequence region is the FILL6 sequence region, and the FILL7 sequence region. In one embodiment, the filler sequence region is the FILL6 sequence region, and the FILL8 sequence region. In one embodiment, the filler sequence region is the FILL6 sequence region, and the FILL9 sequence region. In one embodiment, the filler sequence region is the FILL6 sequence region, and the FILL10 sequence region. In one embodiment, the filler sequence region is the FILL6 sequence region, and the FILL11 sequence region. In one embodiment, the filler sequence region is the FILL6 sequence region, and the FILL12 sequence region. In one embodiment, the filler sequence region is the FILL6 sequence region, and the FILL13 sequence region. In one embodiment, the filler sequence region is the FILL6 sequence region, and the FILL14 sequence region. In one embodiment, the filler sequence region is the FILL6 sequence region, and the FILL15 sequence region. In one embodiment, the filler sequence region is the FILL6 sequence region, and the FILL16 sequence region. In one embodiment, the filler sequence region is the FILL6 sequence region, and the FILL17 sequence region. In one embodiment, the filler sequence region is the FILL6 sequence region, and the FILL18 sequence region. In one embodiment, the filler sequence region is the FILL7 sequence region, and the FILL8 sequence region. In one embodiment, the filler sequence region is the FILL7 sequence region, and the FILL9 sequence region. In one embodiment, the filler sequence region is the FILL7 sequence region, and the FILL10 sequence region. In one embodiment, the filler sequence region is the FILL7 sequence region, and the FILL11 sequence region. In one embodiment, the filler sequence region is the FILL7 sequence region, and the FILL12 sequence region. In one embodiment, the filler sequence region is the FILL7 sequence region, and the FILL13 sequence region. In one embodiment, the filler sequence region is the FILL7 sequence region, and the FILL14 sequence region. In one embodiment, the filler sequence region is the FILL7 sequence region, and the FILL15 sequence region. In one embodiment, the filler sequence region is the FILL7 sequence region, and the FILL16 sequence region. In one embodiment, the filler sequence region is the FILL7 sequence region, and the FILL17 sequence region. In one embodiment, the filler sequence region is the FILL7 sequence region, and the FILL18 sequence region. In one embodiment, the filler sequence region is the FILL8 sequence region, and the FILL9 sequence region. In one embodiment, the filler sequence region is the FILL8 sequence region, and the FILL10 sequence region. In one embodiment, the filler sequence region is the FILL8 sequence region, and the FILL11 sequence region. In one embodiment, the filler sequence region is the FILL8 sequence region, and the FILL12 sequence region. In one embodiment, the filler sequence region is the FILL8 sequence region, and the FILL13 sequence region. In one embodiment, the filler sequence region is the FILL8 sequence region, and the FILL14 sequence region. In one embodiment, the filler sequence region is the FILL8 sequence region, and the FILL15 sequence region. In one embodiment, the filler sequence region is the FILL8 sequence region, and the FILL16 sequence region. In one embodiment, the filler sequence region is the FILL8 sequence region, and the FILL17 sequence region. In one embodiment, the filler sequence region is the FILL8 sequence region, and the FILL18 sequence region. In one embodiment, the filler sequence region is the FILL9 sequence region, and the FILL10 sequence region. In one embodiment, the filler sequence region is the FILL9 sequence region, and the FILL11 sequence region. In one embodiment, the filler sequence region is the FILL9 sequence region, and the FILL12 sequence region. In one embodiment, the filler sequence region is the FILL9 sequence region, and the FILL13 sequence region. In one embodiment, the filler sequence region is the FILL9 sequence region, and the FILL14 sequence region. In one embodiment, the filler sequence region is the FILL9 sequence region, and the FILL15 sequence region. In one embodiment, the filler sequence region is the FILL9 sequence region, and the FILL16 sequence region. In one embodiment, the filler sequence region is the FILL9 sequence region, and the FILL17 sequence region. In one embodiment, the filler sequence region is the FILL9 sequence region, and the FILL18 sequence region. In one embodiment, the filler sequence region is the FILL10 sequence region, and the FILL11 sequence region. In one embodiment, the filler sequence region is the FILL10 sequence region, and the FILL12 sequence region. In one embodiment, the filler sequence region is the FILL10 sequence region, and the FILL13 sequence region. In one embodiment, the filler sequence region is the FILL10 sequence region, and the FILL14 sequence region. In one embodiment, the filler sequence region is the FILL10 sequence region, and the FILL15 sequence region. In one embodiment, the filler sequence region is the FILL10 sequence region, and the FILL16 sequence region. In one embodiment, the filler sequence region is the FILL10 sequence region, and the FILL17 sequence region. In one embodiment, the filler sequence region is the FILL10 sequence region, and the FILL18 sequence region. In one embodiment, the filler sequence region is the FILL11 sequence region, and the FILL12 sequence region. In one embodiment, the filler sequence region is the FILL11 sequence region, and the FILL13 sequence region. In one embodiment, the filler sequence region is the FILL11 sequence region, and the FILL14 sequence region. In one embodiment, the filler sequence region is the FILL11 sequence region, and the FILL15 sequence region. In one embodiment, the filler sequence region is the FILL11 sequence region, and the FILL16 sequence region. In one embodiment, the filler sequence region is the FILL11 sequence region, and the FILL17 sequence region. In one embodiment, the filler sequence region is the FILL11 sequence region, and the FILL18 sequence region. In one embodiment, the filler sequence region is the FILL12 sequence region, and the FILL13 sequence region. In one embodiment, the filler sequence region is the FILL12 sequence region, and the FILL14 sequence region. In one embodiment, the filler sequence region is the FILL12 sequence region, and the FILL15 sequence region. In one embodiment, the filler sequence region is the FILL12 sequence region, and the FILL16 sequence region. In one embodiment, the filler sequence region is the FILL12 sequence region, and the FILL17 sequence region. In one embodiment, the filler sequence region is the FILL12 sequence region, and the FILL18 sequence region. In one embodiment, the filler sequence region is the FILL13 sequence region, and the FILL14 sequence region. In one embodiment, the filler sequence region is the FILL13 sequence region, and the FILL15 sequence region. In one embodiment, the filler sequence region is the FILL13 sequence region, and the FILL16 sequence region. In one embodiment, the filler sequence region is the FILL13 sequence region, and the FILL17 sequence region. In one embodiment, the filler sequence region is the FILL13 sequence region, and the FILL18 sequence region. In one embodiment, the filler sequence region is the FILL14 sequence region, and the FILL15 sequence region. In one embodiment, the filler sequence region is the FILL14 sequence region, and the FILL16 sequence region. In one embodiment, the filler sequence region is the FILL14 sequence region, and the FILL17 sequence region. In one embodiment, the filler sequence region is the FILL14 sequence region, and the FILL18 sequence region. In one embodiment, the filler sequence region is the FILL15 sequence region, and the FILL16 sequence region. In one embodiment, the filler sequence region is the FILL15 sequence region, and the FILL17 sequence region. In one embodiment, the filler sequence region is the FILL15 sequence region, and the FILL18 sequence region. In one embodiment, the filler sequence region is the FILL16 sequence region, and the FILL17 sequence region. In one embodiment, the filler sequence region is the FILL16 sequence region, and the FILL18 sequence region. In one embodiment, the filler sequence region is the FILL17 sequence region, and the FILL18 sequence region.

[0601] In one embodiment, the AAV particle viral genome comprises three filler sequence regions. In one embodiment, the two filler sequence regions are the FILL1 sequence region, the FILL2 sequence region, and the FILL3 sequence region. In one embodiment, the filler sequence region is the FILL1 sequence region, the FILL2 sequence region, and the FILL4 sequence region. In one embodiment, the filler sequence region is the FILL1 sequence region, the FILL2 sequence region, and the FILL5 sequence region. In one embodiment, the filler sequence region is the FILL1 sequence region, the FILL2 sequence region, and the FILL6 sequence region. In one embodiment, the filler sequence region is the FILL1 sequence region, the FILL2 sequence region, and the FILL7 sequence region.

[0602] In one embodiment, the filler sequence region is the FILL1 sequence region, the FILL2 sequence region, and the FILL8 sequence region. In one embodiment, the filler sequence region is the FILL1 sequence region, the FILL2 sequence region, and the FILL9 sequence region. In one embodiment, the filler sequence region is the FILL1 sequence region, the FILL2 sequence region, and the FILL10 sequence region. In one embodiment, the filler sequence region is the FILL1 sequence region, the FILL2 sequence region, and the FILL11 sequence region. In one embodiment, the filler sequence region is the FILL1 sequence region, the FILL2 sequence region, and the FILL12 sequence region. In one embodiment, the filler sequence region is the FILL1 sequence region, the FILL2 sequence region, and the FILL13 sequence region. In one embodiment, the filler sequence region is the FILL1 sequence region, the FILL2 sequence region, and the FILL14 sequence region.

[0603] In one embodiment, the filler sequence region is the FILL1 sequence region, the FILL2 sequence region, and the FILL15 sequence region. In one embodiment, the filler sequence region is the FILL1 sequence region, the FILL2 sequence region, and the FILL16 sequence region. In one embodiment, the filler sequence region is the FILL1 sequence region, the FILL2 sequence region, and the FILL17 sequence region. In one embodiment, the filler sequence region is the FILL1 sequence region, the FILL2 sequence region, and the FILL18 sequence region. In one embodiment, the filler sequence region is the FILL1 sequence region, the FILL3 sequence region, and the FILL4 sequence region. In one embodiment, the filler sequence region is the FILL1 sequence region, the FILL3 sequence region, and the FILL5 sequence region. In one embodiment, the filler sequence region is the FILL1 sequence region, the FILL3 sequence region, and the FILL6 sequence region.

[0604] In one embodiment, the filler sequence region is the FILL1 sequence region, the FILL3 sequence region, and the FILL7 sequence region. In one embodiment, the filler sequence region is the FILL1 sequence region, the FILL3 sequence region, and the FILL8 sequence region. In one embodiment, the filler sequence region is the FILL1 sequence region, the FILL3 sequence region, and the FILL9 sequence region. In one embodiment, the filler sequence region is the FILL1 sequence region, the FILL3 sequence region, and the FILL10 sequence region. In one embodiment, the filler sequence region is the FILL1 sequence region, the FILL3 sequence region, and the FILL11 sequence region.

[0605] In one embodiment, the filler sequence region is the FILL1 sequence region, the FILL3 sequence region, and the FILL12 sequence region. In one embodiment, the filler sequence region is the FILL1 sequence region, the FILL3 sequence region, and the FILL13 sequence region. In one embodiment, the filler sequence region is the FILL1 sequence region, the FILL3 sequence region, and the FILL14 sequence region. In one embodiment, the filler sequence region is the FILL1 sequence region, the FILL3 sequence region, and the FILL15 sequence region. In one embodiment, the filler sequence region is the FILL1 sequence region, the FILL3 sequence region, and the FILL16 sequence region. In one embodiment, the filler sequence region is the FILL1 sequence region, the FILL3 sequence region, and the FILL17 sequence region. In one embodiment, the filler sequence region is the FILL1 sequence region, the FILL3 sequence region, and the FILL18 sequence region. In one embodiment, the filler sequence region is the FILL1 sequence region, the FILL4 sequence region, and the FILL5 sequence region. In one embodiment, the filler sequence region is the FILL1 sequence region, the FILL4 sequence region, and the FILL6 sequence region.

[0606] In one embodiment, the filler sequence region is the FILL1 sequence region, the FILL4 sequence region, and the FILL7 sequence region. In one embodiment, the filler sequence region is the FILL1 sequence region, the FILL4 sequence region, and the FILL8 sequence region. In one embodiment, the filler sequence region is the FILL1 sequence region, the FILL4 sequence region, and the FILL9 sequence region. In one embodiment, the filler sequence region is the FILL1 sequence region, the FILL4 sequence region, and the FILL10 sequence region. In one embodiment, the filler sequence region is the FILL1 sequence region, the FILL4 sequence region, and the FILL11 sequence region.

[0607] In one embodiment, the filler sequence region is the FILL1 sequence region, the FILL4 sequence region, and the FILL12 sequence region. In one embodiment, the filler sequence region is the FILL1 sequence region, the FILL4 sequence region, and the FILL13 sequence region. In one embodiment, the filler sequence region is the FILL1 sequence region, the FILL4 sequence region, and the FILL14 sequence region. In one embodiment, the filler sequence region is the FILL1 sequence region, the FILL4 sequence region, and the FILL15 sequence region. In one embodiment, the filler sequence region is the FILL1 sequence region, the FILL4 sequence region, and the FILL16 sequence region. In one embodiment, the filler sequence region is the FILL1 sequence region, the FILL4 sequence region, and the FILL17 sequence region. In one embodiment, the filler sequence region is the FILL1 sequence region, the FILL4 sequence region, and the FILL18 sequence region. In one embodiment, the filler sequence region is the FILL1 sequence region, the FILL5 sequence region, and the FILL6 sequence region. In one embodiment, the filler sequence region is the FILL1 sequence region, the FILL5 sequence region, and the FILL7 sequence region.

[0608] In one embodiment, the filler sequence region is the FILL1 sequence region, the FILL5 sequence region, and the FILL8 sequence region. In one embodiment, the filler sequence region is the FILL1 sequence region, the FILL5 sequence region, and the FILL9 sequence region. In one embodiment, the filler sequence region is the FILL1 sequence region, the FILL5 sequence region, and the FILL10 sequence region. In one embodiment, the filler sequence region is the FILL1 sequence region, the FILL5 sequence region, and the FILL11 sequence region. In one embodiment, the filler sequence region is the FILL1 sequence region, the FILL5 sequence region, and the FILL12 sequence region. In one embodiment, the filler sequence region is the FILL1 sequence region, the FILL5 sequence region, and the FILL13 sequence region. In one embodiment, the filler sequence region is the FILL1 sequence region, the FILL5 sequence region, and the FILL14 sequence region.

[0609] In one embodiment, the filler sequence region is the FILL1 sequence region, the FILL5 sequence region, and the FILL15 sequence region. In one embodiment, the filler sequence region is the FILL1 sequence region, the FILL5 sequence region, and the FILL16 sequence region. In one embodiment, the filler sequence region is the FILL1 sequence region, the FILL5 sequence region, and the FILL17 sequence region. In one embodiment, the filler sequence region is the FILL1 sequence region, the FILL5 sequence region, and the FILL18 sequence region. In one embodiment, the filler sequence region is the FILL1 sequence region, the FILL6 sequence region, and the FILL7 sequence region. In one embodiment, the filler sequence region is the FILL1 sequence region, the FILL6 sequence region, and the FILL8 sequence region. In one embodiment, the filler sequence region is the FILL1 sequence region, the FILL6 sequence region, and the FILL9 sequence region.

[0610] In one embodiment, the filler sequence region is the FILL1 sequence region, the FILL6 sequence region, and the FILL10 sequence region. In one embodiment, the filler sequence region is the FILL1 sequence region, the FILL6 sequence region, and the FILL11 sequence region. In one embodiment, the filler sequence region is the FILL1 sequence region, the FILL6 sequence region, and the FILL12 sequence region. In one embodiment, the filler sequence region is the FILL1 sequence region, the FILL6 sequence region, and the FILL13 sequence region. In one embodiment, the filler sequence region is the FILL1 sequence region, the FILL6 sequence region, and the FILL14 sequence region. In one embodiment, the filler sequence region is the FILL1 sequence region, the FILL6 sequence region, and the FILL15 sequence region. In one embodiment, the filler sequence region is the FILL1 sequence region, the FILL6 sequence region, and the FILL16 sequence region. In one embodiment, the filler sequence region is the FILL1 sequence region, the FILL6 sequence region, and the FILL17 sequence region. In one embodiment, the filler sequence region is the FILL1 sequence region, the FILL6 sequence region, and the FILL18 sequence region.

[0611] In one embodiment, the filler sequence region is the FILL1 sequence region, the FILL7 sequence region, and the FILL8 sequence region. In one embodiment, the filler sequence region is the FILL1 sequence region, the FILL7 sequence region, and the FILL9 sequence region. In one embodiment, the filler sequence region is the FILL1 sequence region, the FILL7 sequence region, and the FILL10 sequence region. In one embodiment, the filler sequence region is the FILL1 sequence region, the FILL7 sequence region, and the FILL11 sequence region. In one embodiment, the filler sequence region is the FILL1 sequence region, the FILL7 sequence region, and the FILL12 sequence region. In one embodiment, the filler sequence region is the FILL1 sequence region, the FILL7 sequence region, and the FILL13 sequence region. In one embodiment, the filler sequence region is the FILL1 sequence region, the FILL7 sequence region, and the FILL14 sequence region.

[0612] In one embodiment, the filler sequence region is the FILL1 sequence region, the FILL7 sequence region, and the FILL15 sequence region. In one embodiment, the filler sequence region is the FILL1 sequence region, the FILL7 sequence region, and the FILL16 sequence region. In one embodiment, the filler sequence region is the FILL1 sequence region, the FILL7 sequence region, and the FILL17 sequence region. In one embodiment, the filler sequence region is the FILL1 sequence region, the FILL7 sequence region, and the FILL18 sequence region. In one embodiment, the filler sequence region is the FILL1 sequence region, the FILL8 sequence region, and the FILL9 sequence region. In one embodiment, the filler sequence region is the FILL1 sequence region, the FILL8 sequence region, and the FILL10 sequence region. In one embodiment, the filler sequence region is the FILL1 sequence region, the FILL8 sequence region, and the FILL11 sequence region.

[0613] In one embodiment, the filler sequence region is the FILL1 sequence region, the FILL8 sequence region, and the FILL12 sequence region. In one embodiment, the filler sequence region is the FILL1 sequence region, the FILL8 sequence region, and the FILL13 sequence region. In one embodiment, the filler sequence region is the FILL1 sequence region, the FILL8 sequence region, and the FILL14 sequence region. In one embodiment, the filler sequence region is the FILL1 sequence region, the FILL8 sequence region, and the FILL15 sequence region. In one embodiment, the filler sequence region is the FILL1 sequence region, the FILL8 sequence region, and the FILL16 sequence region. In one embodiment, the filler sequence region is the FILL1 sequence region, the FILL8 sequence region, and the FILL17 sequence region. In one embodiment, the filler sequence region is the FILL1 sequence region, the FILL8 sequence region, and the FILL18 sequence region. In one embodiment, the filler sequence region is the FILL1 sequence region, the FILL9 sequence region, and the FILL10 sequence region. In one embodiment, the filler sequence region is the FILL1 sequence region, the FILL9 sequence region, and the FILL11 sequence region.

[0614] In one embodiment, the filler sequence region is the FILL1 sequence region, the FILL9 sequence region, and the FILL12 sequence region. In one embodiment, the filler sequence region is the FILL1 sequence region, the FILL9 sequence region, and the FILL13 sequence region. In one embodiment, the filler sequence region is the FILL1 sequence region, the FILL9 sequence region, and the FILL14 sequence region. In one embodiment, the filler sequence region is the FILL1 sequence region, the FILL9 sequence region, and the FILL15 sequence region. In one embodiment, the filler sequence region is the FILL1 sequence region, the FILL9 sequence region, and the FILL16 sequence region. In one embodiment, the filler sequence region is the FILL1 sequence region, the FILL9 sequence region, and the FILL17 sequence region. In one embodiment, the filler sequence region is the FILL1 sequence region, the FILL9 sequence region, and the FILL18 sequence region. In one embodiment, the filler sequence region is the FILL1 sequence region, the FILL10 sequence region, and the FILL11 sequence region. In one embodiment, the filler sequence region is the FILL1 sequence region, the FILL10 sequence region, and the FILL12 sequence region.

[0615] In one embodiment, the filler sequence region is the FILL1 sequence region, the FILL10 sequence region, and the FILL13 sequence region. In one embodiment, the filler sequence region is the FILL1 sequence region, the FILL10 sequence region, and the FILL14 sequence region. In one embodiment, the filler sequence region is the FILL1 sequence region, the FILL10 sequence region, and the FILL15 sequence region. In one embodiment, the filler sequence region is the FILL1 sequence region, the FILL10 sequence region, and the FILL16 sequence region. In one embodiment, the filler sequence region is the FILL1 sequence region, the FILL10 sequence region, and the FILL17 sequence region. In one embodiment, the filler sequence region is the FILL1 sequence region, the FILL10 sequence region, and the FILL18 sequence region. In one embodiment, the filler sequence region is the FILL1 sequence region, the FILL11 sequence region, and the FILL12 sequence region. In one embodiment, the filler sequence region is the FILL1 sequence region, the FILL11 sequence region, and the FILL13 sequence region. In one embodiment, the filler sequence region is the FILL1 sequence region, the FILL11 sequence region, and the FILL14 sequence region. In one embodiment, the filler sequence region is the FILL1 sequence region, the FILL11 sequence region, and the FILL15 sequence region. In one embodiment, the filler sequence region is the FILL1 sequence region, the FILL11 sequence region, and the FILL16 sequence region. In one embodiment, the filler sequence region is the FILL1 sequence region, the FILL11 sequence region, and the FILL17 sequence region. In one embodiment, the filler sequence region is the FILL1 sequence region, the FILL11 sequence region, and the FILL18 sequence region. In one embodiment, the filler sequence region is the FILL1 sequence region, the FILL12 sequence region, and the FILL13 sequence region. In one embodiment, the filler sequence region is the FILL1 sequence region, the FILL12 sequence region, and the FILL14 sequence region. In one embodiment, the filler sequence region is the FILL1 sequence region, the FILL12 sequence region, and the FILL15 sequence region. In one embodiment, the filler sequence region is the FILL1 sequence region, the FILL12 sequence region, and the FILL16 sequence region. In one embodiment, the filler sequence region is the FILL1 sequence region, the FILL12 sequence region, and the FILL17 sequence region. In one embodiment, the filler sequence region is the FILL1 sequence region, the FILL12 sequence region, and the FILL18 sequence region. In one embodiment, the filler sequence region is the FILL1 sequence region, the FILL13 sequence region, and the FILL14 sequence region. In one embodiment, the filler sequence region is the FILL1 sequence region, the FILL13 sequence region, and the FILL15 sequence region. In one embodiment, the filler sequence region is the FILL1 sequence region, the FILL13 sequence region, and the FILL16 sequence region. In one embodiment, the filler sequence region is the FILL1 sequence region, the FILL13 sequence region, and the FILL17 sequence region. In one embodiment, the filler sequence region is the FILL1 sequence region, the FILL13 sequence region, and the FILL18 sequence region. In one embodiment, the filler sequence region is the FILL1 sequence region, the FILL14 sequence region, and the FILL15 sequence region. In one embodiment, the filler sequence region is the FILL1 sequence region, the FILL14 sequence region, and the FILL16 sequence region. In one embodiment, the filler sequence region is the FILL1 sequence region, the FILL14 sequence region, and the FILL17 sequence region. In one embodiment, the filler sequence region is the FILL1 sequence region, the FILL14 sequence region, and the FILL18 sequence region. In one embodiment, the filler sequence region is the FILL1 sequence region, the FILL15 sequence region, and the FILL16 sequence region. In one embodiment, the filler sequence region is the FILL1 sequence region, the FILL15 sequence region, and the FILL17 sequence region. In one embodiment, the filler sequence region is the FILL1 sequence region, the FILL15 sequence region, and the FILL18 sequence region. In one embodiment, the filler sequence region is the FILL1 sequence region, the FILL16 sequence region, and the FILL17 sequence region. In one embodiment, the filler sequence region is the FILL1 sequence region, the FILL16 sequence region, and the FILL18 sequence region. In one embodiment, the filler sequence region is the FILL1 sequence region, the FILL17 sequence region, and the FILL18 sequence region. In one embodiment, the filler sequence region is the FILL2 sequence region, the FILL3 sequence region, and the FILL4 sequence region. In one embodiment, the filler sequence region is the FILL2 sequence region, the FILL3 sequence region, and the FILL5 sequence region. In one embodiment, the filler sequence region is the FILL2 sequence region, the FILL3 sequence region, and the FILL6 sequence region. In one embodiment, the filler sequence region is the FILL2 sequence region, the FILL3 sequence region, and the FILL7 sequence region. In one embodiment, the filler sequence region is the FILL2 sequence region, the FILL3 sequence region, and the FILL8 sequence region.

[0616] In one embodiment, the filler sequence region is the FILL2 sequence region, the FILL3 sequence region, and the FILL9 sequence region. In one embodiment, the filler sequence region is the FILL2 sequence region, the FILL3 sequence region, and the FILL10 sequence region. In one embodiment, the filler sequence region is the FILL2 sequence region, the FILL3 sequence region, and the FILL11 sequence region. In one embodiment, the filler sequence region is the FILL2 sequence region, the FILL3 sequence region, and the FILL12 sequence region. In one embodiment, the filler sequence region is the FILL2 sequence region, the FILL3 sequence region, and the FILL13 sequence region. In one embodiment, the filler sequence region is the FILL2 sequence region, the FILL3 sequence region, and the FILL14 sequence region. In one embodiment, the filler sequence region is the FILL2 sequence region, the FILL3 sequence region, and the FILL15 sequence region.

[0617] In one embodiment, the filler sequence region is the FILL2 sequence region, the FILL3 sequence region, and the FILL16 sequence region. In one embodiment, the filler sequence region is the FILL2 sequence region, the FILL3 sequence region, and the FILL17 sequence region. In one embodiment, the filler sequence region is the FILL2 sequence region, the FILL3 sequence region, and the FILL18 sequence region. In one embodiment, the filler sequence region is the FILL2 sequence region, the FILL4 sequence region, and the FILL5 sequence region. In one embodiment, the filler sequence region is the FILL2 sequence region, the FILL4 sequence region, and the FILL6 sequence region. In one embodiment, the filler sequence region is the FILL2 sequence region, the FILL4 sequence region, and the FILL7 sequence region. In one embodiment, the filler sequence region is the FILL2 sequence region, the FILL4 sequence region, and the FILL8 sequence region.

[0618] In one embodiment, the filler sequence region is the FILL2 sequence region, the FILL4 sequence region, and the FILL9 sequence region. In one embodiment, the filler sequence region is the FILL2 sequence region, the FILL4 sequence region, and the FILL10 sequence region. In one embodiment, the filler sequence region is the FILL2 sequence region, the FILL4 sequence region, and the FILL11 sequence region. In one embodiment, the filler sequence region is the FILL2 sequence region, the FILL4 sequence region, and the FILL12 sequence region. In one embodiment, the filler sequence region is the FILL2 sequence region, the FILL4 sequence region, and the FILL13 sequence region. In one embodiment, the filler sequence region is the FILL2 sequence region, the FILL4 sequence region, and the FILL14 sequence region. In one embodiment, the filler sequence region is the FILL2 sequence region, the FILL4 sequence region, and the FILL15 sequence region.

[0619] In one embodiment, the filler sequence region is the FILL2 sequence region, the FILL4 sequence region, and the FILL16 sequence region. In one embodiment, the filler sequence region is the FILL2 sequence region, the FILL4 sequence region, and the FILL17 sequence region. In one embodiment, the filler sequence region is the FILL2 sequence region, the FILL4 sequence region, and the FILL18 sequence region. In one embodiment, the filler sequence region is the FILL2 sequence region, the FILL5 sequence region, and the FILL6 sequence region. In one embodiment, the filler sequence region is the FILL2 sequence region, the FILL5 sequence region, and the FILL7 sequence region. In one embodiment, the filler sequence region is the FILL2 sequence region, the FILL5 sequence region, and the FILL8 sequence region. In one embodiment, the filler sequence region is the FILL2 sequence region, the FILL5 sequence region, and the FILL9 sequence region.

[0620] In one embodiment, the filler sequence region is the FILL2 sequence region, the FILL5 sequence region, and the FILL10 sequence region. In one embodiment, the filler sequence region is the FILL2 sequence region, the FILL5 sequence region, and the FILL11 sequence region. In one embodiment, the filler sequence region is the FILL2 sequence region, the FILL5 sequence region, and the FILL12 sequence region. In one embodiment, the filler sequence region is the FILL2 sequence region, the FILL5 sequence region, and the FILL13 sequence region. In one embodiment, the filler sequence region is the FILL2 sequence region, the FILL5 sequence region, and the FILL14 sequence region. In one embodiment, the filler sequence region is the FILL2 sequence region, the FILL5 sequence region, and the FILL15 sequence region. In one embodiment, the filler sequence region is the FILL2 sequence region, the FILL5 sequence region, and the FILL16 sequence region. In one embodiment, the filler sequence region is the FILL2 sequence region, the FILL5 sequence region, and the FILL17 sequence region. In one embodiment, the filler sequence region is the FILL2 sequence region, the FILL5 sequence region, and the FILL18 sequence region.

[0621] In one embodiment, the filler sequence region is the FILL2 sequence region, the FILL6 sequence region, and the FILL7 sequence region. In one embodiment, the filler sequence region is the FILL2 sequence region, the FILL6 sequence region, and the FILL8 sequence region. In one embodiment, the filler sequence region is the FILL2 sequence region, the FILL6 sequence region, and the FILL9 sequence region. In one embodiment, the filler sequence region is the FILL2 sequence region, the FILL6 sequence region, and the FILL10 sequence region. In one embodiment, the filler sequence region is the FILL2 sequence region, the FILL6 sequence region, and the FILL11 sequence region.

[0622] In one embodiment, the filler sequence region is the FILL2 sequence region, the FILL6 sequence region, and the FILL12 sequence region. In one embodiment, the filler sequence region is the FILL2 sequence region, the FILL6 sequence region, and the FILL13 sequence region. In one embodiment, the filler sequence region is the FILL2 sequence region, the FILL6 sequence region, and the FILL14 sequence region. In one embodiment, the filler sequence region is the FILL2 sequence region, the FILL6 sequence region, and the FILL15 sequence region. In one embodiment, the filler sequence region is the FILL2 sequence region, the FILL6 sequence region, and the FILL16 sequence region. In one embodiment, the filler sequence region is the FILL2 sequence region, the FILL6 sequence region, and the FILL17 sequence region. In one embodiment, the filler sequence region is the FILL2 sequence region, the FILL6 sequence region, and the FILL18 sequence region. In one embodiment, the filler sequence region is the FILL2 sequence region, the FILL7 sequence region, and the FILL8 sequence region. In one embodiment, the filler sequence region is the FILL2 sequence region, the FILL7 sequence region, and the FILL9 sequence region.

[0623] In one embodiment, the filler sequence region is the FILL2 sequence region, the FILL7 sequence region, and the FILL10 sequence region. In one embodiment, the filler sequence region is the FILL2 sequence region, the FILL7 sequence region, and the FILL11 sequence region. In one embodiment, the filler sequence region is the FILL2 sequence region, the FILL7 sequence region, and the FILL12 sequence region. In one embodiment, the filler sequence region is the FILL2 sequence region, the FILL7 sequence region, and the FILL13 sequence region. In one embodiment, the filler sequence region is the FILL2 sequence region, the FILL7 sequence region, and the FILL14 sequence region. In one embodiment, the filler sequence region is the FILL2 sequence region, the FILL7 sequence region, and the FILL15 sequence region. In one embodiment, the filler sequence region is the FILL2 sequence region, the FILL7 sequence region, and the FILL16 sequence region. In one embodiment, the filler sequence region is the FILL2 sequence region, the FILL7 sequence region, and the FILL17 sequence region. In one embodiment, the filler sequence region is the FILL2 sequence region, the FILL7 sequence region, and the FILL18 sequence region.

[0624] In one embodiment, the filler sequence region is the FILL2 sequence region, the FILL8 sequence region, and the FILL9 sequence region. In one embodiment, the filler sequence region is the FILL2 sequence region, the FILL8 sequence region, and the FILL10 sequence region. In one embodiment, the filler sequence region is the FILL2 sequence region, the FILL8 sequence region, and the FILL11 sequence region. In one embodiment, the filler sequence region is the FILL2 sequence region, the FILL8 sequence region, and the FILL12 sequence region. In one embodiment, the filler sequence region is the FILL2 sequence region, the FILL8 sequence region, and the FILL13 sequence region. In one embodiment, the filler sequence region is the FILL2 sequence region, the FILL8 sequence region, and the FILL14 sequence region. In one embodiment, the filler sequence region is the FILL2 sequence region, the FILL8 sequence region, and the FILL15 sequence region.

[0625] In one embodiment, the filler sequence region is the FILL2 sequence region, the FILL8 sequence region, and the FILL16 sequence region. In one embodiment, the filler sequence region is the FILL2 sequence region, the FILL8 sequence region, and the FILL17 sequence region. In one embodiment, the filler sequence region is the FILL2 sequence region, the FILL8 sequence region, and the FILL18 sequence region. In one embodiment, the filler sequence region is the FILL2 sequence region, the FILL9 sequence region, and the FILL10 sequence region. In one embodiment, the filler sequence region is the FILL2 sequence region, the FILL9 sequence region, and the FILL11 sequence region. In one embodiment, the filler sequence region is the FILL2 sequence region, the FILL9 sequence region, and the FILL12 sequence region. In one embodiment, the filler sequence region is the FILL2 sequence region, the FILL9 sequence region, and the FILL13 sequence region. In one embodiment, the filler sequence region is the FILL2 sequence region, the FILL9 sequence region, and the FILL14 sequence region. In one embodiment, the filler sequence region is the FILL2 sequence region, the FILL9 sequence region, and the FILL15 sequence region.

[0626] In one embodiment, the filler sequence region is the FILL2 sequence region, the FILL9 sequence region, and the FILL16 sequence region. In one embodiment, the filler sequence region is the FILL2 sequence region, the FILL9 sequence region, and the FILL17 sequence region. In one embodiment, the filler sequence region is the FILL2 sequence region, the FILL9 sequence region, and the FILL18 sequence region. In one embodiment, the filler sequence region is the FILL2 sequence region, the FILL10 sequence region, and the FILL11 sequence region. In one embodiment, the filler sequence region is the FILL2 sequence region, the FILL10 sequence region, and the FILL12 sequence region. In one embodiment, the filler sequence region is the FILL2 sequence region, the FILL10 sequence region, and the FILL13 sequence region. In one embodiment, the filler sequence region is the FILL2 sequence region, the FILL10 sequence region, and the FILL14 sequence region. In one embodiment, the filler sequence region is the FILL2 sequence region, the FILL10 sequence region, and the FILL15 sequence region. In one embodiment, the filler sequence region is the FILL2 sequence region, the FILL10 sequence region, and the FILL16 sequence region. In one embodiment, the filler sequence region is the FILL2 sequence region, the FILL10 sequence region, and the FILL17 sequence region. In one embodiment, the filler sequence region is the FILL2 sequence region, the FILL10 sequence region, and the FILL18 sequence region. In one embodiment, the filler sequence region is the FILL2 sequence region, the FILL11 sequence region, and the FILL12 sequence region. In one embodiment, the filler sequence region is the FILL2 sequence region, the FILL11 sequence region, and the FILL13 sequence region. In one embodiment, the filler sequence region is the FILL2 sequence region, the FILL11 sequence region, and the FILL14 sequence region. In one embodiment, the filler sequence region is the FILL2 sequence region, the FILL11 sequence region, and the FILL15 sequence region. In one embodiment, the filler sequence region is the FILL2 sequence region, the FILL11 sequence region, and the FILL16 sequence region. In one embodiment, the filler sequence region is the FILL2 sequence region, the FILL11 sequence region, and the FILL17 sequence region. In one embodiment, the filler sequence region is the FILL2 sequence region, the FILL11 sequence region, and the FILL18 sequence region. In one embodiment, the filler sequence region is the FILL2 sequence region, the FILL12 sequence region, and the FILL13 sequence region. In one embodiment, the filler sequence region is the FILL2 sequence region, the FILL12 sequence region, and the FILL14 sequence region. In one embodiment, the filler sequence region is the FILL2 sequence region, the FILL12 sequence region, and the FILL15 sequence region. In one embodiment, the filler sequence region is the FILL2 sequence region, the FILL12 sequence region, and the FILL16 sequence region. In one embodiment, the filler sequence region is the FILL2 sequence region, the FILL12 sequence region, and the FILL17 sequence region. In one embodiment, the filler sequence region is the FILL2 sequence region, the FILL12 sequence region, and the FILL18 sequence region. In one embodiment, the filler sequence region is the FILL2 sequence region, the FILL13 sequence region, and the FILL14 sequence region. In one embodiment, the filler sequence region is the FILL2 sequence region, the FILL13 sequence region, and the FILL15 sequence region. In one embodiment, the filler sequence region is the FILL2 sequence region, the FILL13 sequence region, and the FILL16 sequence region. In one embodiment, the filler sequence region is the FILL2 sequence region, the FILL13 sequence region, and the FILL17 sequence region. In one embodiment, the filler sequence region is the FILL2 sequence region, the FILL13 sequence region, and the FILL18 sequence region. In one embodiment, the filler sequence region is the FILL2 sequence region, the FILL14 sequence region, and the FILL15 sequence region. In one embodiment, the filler sequence region is the FILL2 sequence region, the FILL14 sequence region, and the FILL16 sequence region. In one embodiment, the filler sequence region is the FILL2 sequence region, the FILL14 sequence region, and the FILL17 sequence region. In one embodiment, the filler sequence region is the FILL2 sequence region, the FILL14 sequence region, and the FILL18 sequence region. In one embodiment, the filler sequence region is the FILL2 sequence region, the FILL15 sequence region, and the FILL16 sequence region. In one embodiment, the filler sequence region is the FILL2 sequence region, the FILL15 sequence region, and the FILL17 sequence region. In one embodiment, the filler sequence region is the FILL2 sequence region, the FILL15 sequence region, and the FILL18 sequence region. In one embodiment, the filler sequence region is the FILL2 sequence region, the FILL16 sequence region, and the FILL17 sequence region. In one embodiment, the filler sequence region is the FILL2 sequence region, the FILL16 sequence region, and the FILL18 sequence region. In one embodiment, the filler sequence region is the FILL2 sequence region, the FILL17 sequence region, and the FILL18 sequence region. In one embodiment, the filler sequence region is the FILL3 sequence region, the FILL4 sequence region, and the FILL5 sequence region. In one embodiment, the filler sequence region is the FILL3 sequence region, the FILL4 sequence region, and the FILL6 sequence region. In one embodiment, the filler sequence region is the FILL3 sequence region, the FILL4 sequence region, and the FILL7 sequence region. In one embodiment, the filler sequence region is the FILL3 sequence region, the FILL4 sequence region, and the FILL8 sequence region.

[0627] In one embodiment, the filler sequence region is the FILL3 sequence region, the FILL4 sequence region, and the FILL9 sequence region. In one embodiment, the filler sequence region is the FILL3 sequence region, the FILL4 sequence region, and the FILL10 sequence region. In one embodiment, the filler sequence region is the FILL3 sequence region, the FILL4 sequence region, and the FILL11 sequence region. In one embodiment, the filler sequence region is the FILL3 sequence region, the FILL4 sequence region, and the FILL12 sequence region. In one embodiment, the filler sequence region is the FILL3 sequence region, the FILL4 sequence region, and the FILL13 sequence region. In one embodiment, the filler sequence region is the FILL3 sequence region, the FILL4 sequence region, and the FILL14 sequence region. In one embodiment, the filler sequence region is the FILL3 sequence region, the FILL4 sequence region, and the FILL15 sequence region.

[0628] In one embodiment, the filler sequence region is the FILL3 sequence region, the FILL4 sequence region, and the FILL16 sequence region. In one embodiment, the filler sequence region is the FILL3 sequence region, the FILL4 sequence region, and the FILL17 sequence region. In one embodiment, the filler sequence region is the FILL3 sequence region, the FILL4 sequence region, and the FILL18 sequence region. In one embodiment, the filler sequence region is the FILL3 sequence region, the FILL5 sequence region, and the FILL6 sequence region. In one embodiment, the filler sequence region is the FILL3 sequence region, the FILL5 sequence region, and the FILL7 sequence region. In one embodiment, the filler sequence region is the FILL3 sequence region, the FILL5 sequence region, and the FILL8 sequence region. In one embodiment, the filler sequence region is the FILL3 sequence region, the FILL5 sequence region, and the FILL9 sequence region.

[0629] In one embodiment, the filler sequence region is the FILL3 sequence region, the FILL5 sequence region, and the FILL10 sequence region. In one embodiment, the filler sequence region is the FILL3 sequence region, the FILL5 sequence region, and the FILL11 sequence region. In one embodiment, the filler sequence region is the FILL3 sequence region, the FILL5 sequence region, and the FILL12 sequence region. In one embodiment, the filler sequence region is the FILL3 sequence region, the FILL5 sequence region, and the FILL13 sequence region. In one embodiment, the filler sequence region is the FILL3 sequence region, the FILL5 sequence region, and the FILL14 sequence region. In one embodiment, the filler sequence region is the FILL3 sequence region, the FILL5 sequence region, and the FILL15 sequence region. In one embodiment, the filler sequence region is the FILL3 sequence region, the FILL5 sequence region, and the FILL16 sequence region. In one embodiment, the filler sequence region is the FILL3 sequence region, the FILL5 sequence region, and the FILL17 sequence region. In one embodiment, the filler sequence region is the FILL3 sequence region, the FILL5 sequence region, and the FILL18 sequence region.

[0630] In one embodiment, the filler sequence region is the FILL3 sequence region, the FILL6 sequence region, and the FILL7 sequence region. In one embodiment, the filler sequence region is the FILL3 sequence region, the FILL6 sequence region, and the FILL8 sequence region. In one embodiment, the filler sequence region is the FILL3 sequence region, the FILL6 sequence region, and the FILL9 sequence region. In one embodiment, the filler sequence region is the FILL3 sequence region, the FILL6 sequence region, and the FILL10 sequence region. In one embodiment, the filler sequence region is the FILL3 sequence region, the FILL6 sequence region, and the FILL11 sequence region.

[0631] In one embodiment, the filler sequence region is the FILL3 sequence region, the FILL6 sequence region, and the FILL12 sequence region. In one embodiment, the filler sequence region is the FILL3 sequence region, the FILL6 sequence region, and the FILL13 sequence region. In one embodiment, the filler sequence region is the FILL3 sequence region, the FILL6 sequence region, and the FILL14 sequence region. In one embodiment, the filler sequence region is the FILL3 sequence region, the FILL6 sequence region, and the FILL15 sequence region. In one embodiment, the filler sequence region is the FILL3 sequence region, the FILL6 sequence region, and the FILL16 sequence region. In one embodiment, the filler sequence region is the FILL3 sequence region, the FILL6 sequence region, and the FILL17 sequence region. In one embodiment, the filler sequence region is the FILL3 sequence region, the FILL6 sequence region, and the FILL18 sequence region. In one embodiment, the filler sequence region is the FILL3 sequence region, the FILL7 sequence region, and the FILL8 sequence region. In one embodiment, the filler sequence region is the FILL3 sequence region, the FILL7 sequence region, and the FILL9 sequence region.

[0632] In one embodiment, the filler sequence region is the FILL3 sequence region, the FILL7 sequence region, and the FILL10 sequence region. In one embodiment, the filler sequence region is the FILL3 sequence region, the FILL7 sequence region, and the FILL11 sequence region. In one embodiment, the filler sequence region is the FILL3 sequence region, the FILL7 sequence region, and the FILL12 sequence region. In one embodiment, the filler sequence region is the FILL3 sequence region, the FILL7 sequence region, and the FILL13 sequence region. In one embodiment, the filler sequence region is the FILL3 sequence region, the FILL7 sequence region, and the FILL14 sequence region. In one embodiment, the filler sequence region is the FILL3 sequence region, the FILL7 sequence region, and the FILL15 sequence region. In one embodiment, the filler sequence region is the FILL3 sequence region, the FILL7 sequence region, and the FILL16 sequence region. In one embodiment, the filler sequence region is the FILL3 sequence region, the FILL7 sequence region, and the FILL17 sequence region. In one embodiment, the filler sequence region is the FILL3 sequence region, the FILL7 sequence region, and the FILL18 sequence region.

[0633] In one embodiment, the filler sequence region is the FILL3 sequence region, the FILL8 sequence region, and the FILL9 sequence region. In one embodiment, the filler sequence region is the FILL3 sequence region, the FILL8 sequence region, and the FILL10 sequence region. In one embodiment, the filler sequence region is the FILL3 sequence region, the FILL8 sequence region, and the FILL11 sequence region. In one embodiment, the filler sequence region is the FILL3 sequence region, the FILL8 sequence region, and the FILL12 sequence region. In one embodiment, the filler sequence region is the FILL3 sequence region, the FILL8 sequence region, and the FILL13 sequence region. In one embodiment, the filler sequence region is the FILL3 sequence region, the FILL8 sequence region, and the FILL14 sequence region. In one embodiment, the filler sequence region is the FILL3 sequence region, the FILL8 sequence region, and the FILL15 sequence region.

[0634] In one embodiment, the filler sequence region is the FILL3 sequence region, the FILL8 sequence region, and the FILL16 sequence region. In one embodiment, the filler sequence region is the FILL3 sequence region, the FILL8 sequence region, and the FILL17 sequence region. In one embodiment, the filler sequence region is the FILL3 sequence region, the FILL8 sequence region, and the FILL18 sequence region. In one embodiment, the filler sequence region is the FILL3 sequence region, the FILL9 sequence region, and the FILL10 sequence region. In one embodiment, the filler sequence region is the FILL3 sequence region, the FILL9 sequence region, and the FILL11 sequence region. In one embodiment, the filler sequence region is the FILL3 sequence region, the FILL9 sequence region, and the FILL12 sequence region. In one embodiment, the filler sequence region is the FILL3 sequence region, the FILL9 sequence region, and the FILL13 sequence region. In one embodiment, the filler sequence region is the FILL3 sequence region, the FILL9 sequence region, and the FILL14 sequence region. In one embodiment, the filler sequence region is the FILL3 sequence region, the FILL9 sequence region, and the FILL15 sequence region.

[0635] In one embodiment, the filler sequence region is the FILL3 sequence region, the FILL9 sequence region, and the FILL16 sequence region. In one embodiment, the filler sequence region is the FILL3 sequence region, the FILL9 sequence region, and the FILL17 sequence region. In one embodiment, the filler sequence region is the FILL3 sequence region, the FILL9 sequence region, and the FILL18 sequence region. In one embodiment, the filler sequence region is the FILL3 sequence region, the FILL10 sequence region, and the FILL11 sequence region. In one embodiment, the filler sequence region is the FILL3 sequence region, the FILL10 sequence region, and the FILL12 sequence region. In one embodiment, the filler sequence region is the FILL3 sequence region, the FILL10 sequence region, and the FILL13 sequence region. In one embodiment, the filler sequence region is the FILL3 sequence region, the FILL10 sequence region, and the FILL14 sequence region. In one embodiment, the filler sequence region is the FILL3 sequence region, the FILL10 sequence region, and the FILL15 sequence region. In one embodiment, the filler sequence region is the FILL3 sequence region, the FILL10 sequence region, and the FILL16 sequence region. In one embodiment, the filler sequence region is the FILL3 sequence region, the FILL10 sequence region, and the FILL17 sequence region. In one embodiment, the filler sequence region is the FILL3 sequence region, the FILL10 sequence region, and the FILL18 sequence region. In one embodiment, the filler sequence region is the FILL3 sequence region, the FILL11 sequence region, and the FILL12 sequence region. In one embodiment, the filler sequence region is the FILL3 sequence region, the FILL11 sequence region, and the FILL13 sequence region. In one embodiment, the filler sequence region is the FILL3 sequence region, the FILL11 sequence region, and the FILL14 sequence region. In one embodiment, the filler sequence region is the FILL3 sequence region, the FILL11 sequence region, and the FILL15 sequence region. In one embodiment, the filler sequence region is the FILL3 sequence region, the FILL11 sequence region, and the FILL16 sequence region. In one embodiment, the filler sequence region is the FILL3 sequence region, the FILL11 sequence region, and the FILL17 sequence region. In one embodiment, the filler sequence region is the FILL3 sequence region, the FILL11 sequence region, and the FILL18 sequence region. In one embodiment, the filler sequence region is the FILL3 sequence region, the FILL12 sequence region, and the FILL13 sequence region. In one embodiment, the filler sequence region is the FILL3 sequence region, the FILL12 sequence region, and the FILL14 sequence region. In one embodiment, the filler sequence region is the FILL3 sequence region, the FILL12 sequence region, and the FILL15 sequence region. In one embodiment, the filler sequence region is the FILL3 sequence region, the FILL12 sequence region, and the FILL16 sequence region. In one embodiment, the filler sequence region is the FILL3 sequence region, the FILL12 sequence region, and the FILL17 sequence region. In one embodiment, the filler sequence region is the FILL3 sequence region, the FILL12 sequence region, and the FILL18 sequence region. In one embodiment, the filler sequence region is the FILL3 sequence region, the FILL13 sequence region, and the FILL14 sequence region. In one embodiment, the filler sequence region is the FILL3 sequence region, the FILL13 sequence region, and the FILL15 sequence region. In one embodiment, the filler sequence region is the FILL3 sequence region, the FILL13 sequence region, and the FILL16 sequence region. In one embodiment, the filler sequence region is the FILL3 sequence region, the FILL13 sequence region, and the FILL17 sequence region. In one embodiment, the filler sequence region is the FILL3 sequence region, the FILL13 sequence region, and the FILL18 sequence region. In one embodiment, the filler sequence region is the FILL3 sequence region, the FILL14 sequence region, and the FILL15 sequence region. In one embodiment, the filler sequence region is the FILL3 sequence region, the FILL14 sequence region, and the FILL16 sequence region. In one embodiment, the filler sequence region is the FILL3 sequence region, the FILL14 sequence region, and the FILL17 sequence region. In one embodiment, the filler sequence region is the FILL3 sequence region, the FILL14 sequence region, and the FILL18 sequence region. In one embodiment, the filler sequence region is the FILL3 sequence region, the FILL15 sequence region, and the FILL16 sequence region. In one embodiment, the filler sequence region is the FILL3 sequence region, the FILL15 sequence region, and the FILL17 sequence region. In one embodiment, the filler sequence region is the FILL3 sequence region, the FILL15 sequence region, and the FILL18 sequence region. In one embodiment, the filler sequence region is the FILL3 sequence region, the FILL16 sequence region, and the FILL17 sequence region. In one embodiment, the filler sequence region is the FILL3 sequence region, the FILL16 sequence region, and the FILL18 sequence region. In one embodiment, the filler sequence region is the FILL3 sequence region, the FILL17 sequence region, and the FILL18 sequence region. In one embodiment, the filler sequence region is the FILL4 sequence region, the FILL5 sequence region, and the FILL6 sequence region. In one embodiment, the filler sequence region is the FILL4 sequence region, the FILL5 sequence region, and the FILL7 sequence region. In one embodiment, the filler sequence region is the FILL4 sequence region, the FILL5 sequence region, and the FILL8 sequence region. In one embodiment, the filler sequence region is the FILL4 sequence region, the FILL5 sequence region, and the FILL9 sequence region.

[0636] In one embodiment, the filler sequence region is the FILL4 sequence region, the FILL5 sequence region, and the FILL10 sequence region. In one embodiment, the filler sequence region is the FILL4 sequence region, the FILL5 sequence region, and the FILL11 sequence region. In one embodiment, the filler sequence region is the FILL4 sequence region, the FILL5 sequence region, and the FILL12 sequence region. In one embodiment, the filler sequence region is the FILL4 sequence region, the FILL5 sequence region, and the FILL13 sequence region. In one embodiment, the filler sequence region is the FILL4 sequence region, the FILL5 sequence region, and the FILL14 sequence region. In one embodiment, the filler sequence region is the FILL4 sequence region, the FILL5 sequence region, and the FILL15 sequence region. In one embodiment, the filler sequence region is the FILL4 sequence region, the FILL5 sequence region, and the FILL16 sequence region. In one embodiment, the filler sequence region is the FILL4 sequence region, the FILL5 sequence region, and the FILL17 sequence region. In one embodiment, the filler sequence region is the FILL4 sequence region, the FILL5 sequence region, and the FILL18 sequence region.

[0637] In one embodiment, the filler sequence region is the FILL4 sequence region, the FILL6 sequence region, and the FILL7 sequence region. In one embodiment, the filler sequence region is the FILL4 sequence region, the FILL6 sequence region, and the FILL8 sequence region. In one embodiment, the filler sequence region is the FILL4 sequence region, the FILL6 sequence region, and the FILL9 sequence region. In one embodiment, the filler sequence region is the FILL4 sequence region, the FILL6 sequence region, and the FILL10 sequence region. In one embodiment, the filler sequence region is the FILL4 sequence region, the FILL6 sequence region, and the FILL11 sequence region.

[0638] In one embodiment, the filler sequence region is the FILL4 sequence region, the FILL6 sequence region, and the FILL12 sequence region. In one embodiment, the filler sequence region is the FILL4 sequence region, the FILL6 sequence region, and the FILL13 sequence region. In one embodiment, the filler sequence region is the FILL4 sequence region, the FILL6 sequence region, and the FILL14 sequence region. In one embodiment, the filler sequence region is the FILL4 sequence region, the FILL6 sequence region, and the FILL15 sequence region. In one embodiment, the filler sequence region is the FILL4 sequence region, the FILL6 sequence region, and the FILL16 sequence region. In one embodiment, the filler sequence region is the FILL4 sequence region, the FILL6 sequence region, and the FILL17 sequence region. In one embodiment, the filler sequence region is the FILL4 sequence region, the FILL6 sequence region, and the FILL18 sequence region. In one embodiment, the filler sequence region is the FILL4 sequence region, the FILL7 sequence region, and the FILL8 sequence region. In one embodiment, the filler sequence region is the FILL4 sequence region, the FILL7 sequence region, and the FILL9 sequence region.

[0639] In one embodiment, the filler sequence region is the FILL4 sequence region, the FILL7 sequence region, and the FILL10 sequence region. In one embodiment, the filler sequence region is the FILL4 sequence region, the FILL7 sequence region, and the FILL11 sequence region. In one embodiment, the filler sequence region is the FILL4 sequence region, the FILL7 sequence region, and the FILL12 sequence region. In one embodiment, the filler sequence region is the FILL4 sequence region, the FILL7 sequence region, and the FILL13 sequence region. In one embodiment, the filler sequence region is the FILL4 sequence region, the FILL7 sequence region, and the FILL14 sequence region. In one embodiment, the filler sequence region is the FILL4 sequence region, the FILL7 sequence region, and the FILL15 sequence region. In one embodiment, the filler sequence region is the FILL4 sequence region, the FILL7 sequence region, and the FILL16 sequence region. In one embodiment, the filler sequence region is the FILL4 sequence region, the FILL7 sequence region, and the FILL17 sequence region. In one embodiment, the filler sequence region is the FILL4 sequence region, the FILL7 sequence region, and the FILL18 sequence region.

[0640] In one embodiment, the filler sequence region is the FILL4 sequence region, the FILL8 sequence region, and the FILL9 sequence region. In one embodiment, the filler sequence region is the FILL4 sequence region, the FILL8 sequence region, and the FILL10 sequence region. In one embodiment, the filler sequence region is the FILL4 sequence region, the FILL8 sequence region, and the FILL11 sequence region. In one embodiment, the filler sequence region is the FILL4 sequence region, the FILL8 sequence region, and the FILL12 sequence region. In one embodiment, the filler sequence region is the FILL4 sequence region, the FILL8 sequence region, and the FILL13 sequence region. In one embodiment, the filler sequence region is the FILL4 sequence region, the FILL8 sequence region, and the FILL14 sequence region. In one embodiment, the filler sequence region is the FILL4 sequence region, the FILL8 sequence region, and the FILL15 sequence region.

[0641] In one embodiment, the filler sequence region is the FILL4 sequence region, the FILL8 sequence region, and the FILL16 sequence region. In one embodiment, the filler sequence region is the FILL4 sequence region, the FILL8 sequence region, and the FILL17 sequence region. In one embodiment, the filler sequence region is the FILL4 sequence region, the FILL8 sequence region, and the FILL18 sequence region. In one embodiment, the filler sequence region is the FILL4 sequence region, the FILL9 sequence region, and the FILL10 sequence region. In one embodiment, the filler sequence region is the FILL4 sequence region, the FILL9 sequence region, and the FILL11 sequence region. In one embodiment, the filler sequence region is the FILL4 sequence region, the FILL9 sequence region, and the FILL12 sequence region. In one embodiment, the filler sequence region is the FILL4 sequence region, the FILL9 sequence region, and the FILL13 sequence region. In one embodiment, the filler sequence region is the FILL4 sequence region, the FILL9 sequence region, and the FILL14 sequence region. In one embodiment, the filler sequence region is the FILL4 sequence region, the FILL9 sequence region, and the FILL15 sequence region.

[0642] In one embodiment, the filler sequence region is the FILL4 sequence region, the FILL9 sequence region, and the FILL16 sequence region. In one embodiment, the filler sequence region is the FILL4 sequence region, the FILL9 sequence region, and the FILL17 sequence region. In one embodiment, the filler sequence region is the FILL4 sequence region, the FILL9 sequence region, and the FILL18 sequence region. In one embodiment, the filler sequence region is the FILL4 sequence region, the FILL10 sequence region, and the FILL11 sequence region. In one embodiment, the filler sequence region is the FILL4 sequence region, the FILL10 sequence region, and the FILL12 sequence region. In one embodiment, the filler sequence region is the FILL4 sequence region, the FILL10 sequence region, and the FILL13 sequence region. In one embodiment, the filler sequence region is the FILL4 sequence region, the FILL10 sequence region, and the FILL14 sequence region. In one embodiment, the filler sequence region is the FILL4 sequence region, the FILL10 sequence region, and the FILL15 sequence region. In one embodiment, the filler sequence region is the FILL4 sequence region, the FILL10 sequence region, and the FILL16 sequence region. In one embodiment, the filler sequence region is the FILL4 sequence region, the FILL10 sequence region, and the FILL17 sequence region. In one embodiment, the filler sequence region is the FILL4 sequence region, the FILL10 sequence region, and the FILL18 sequence region. In one embodiment, the filler sequence region is the FILL4 sequence region, the FILL11 sequence region, and the FILL12 sequence region. In one embodiment, the filler sequence region is the FILL4 sequence region, the FILL11 sequence region, and the FILL13 sequence region. In one embodiment, the filler sequence region is the FILL4 sequence region, the FILL11 sequence region, and the FILL14 sequence region. In one embodiment, the filler sequence region is the FILL4 sequence region, the FILL11 sequence region, and the FILL15 sequence region. In one embodiment, the filler sequence region is the FILL4 sequence region, the FILL11 sequence region, and the FILL16 sequence region. In one embodiment, the filler sequence region is the FILL4 sequence region, the FILL11 sequence region, and the FILL17 sequence region. In one embodiment, the filler sequence region is the FILL4 sequence region, the FILL11 sequence region, and the FILL18 sequence region. In one embodiment, the filler sequence region is the FILL4 sequence region, the FILL12 sequence region, and the FILL13 sequence region. In one embodiment, the filler sequence region is the FILL4 sequence region, the FILL12 sequence region, and the FILL14 sequence region. In one embodiment, the filler sequence region is the FILL4 sequence region, the FILL12 sequence region, and the FILL15 sequence region. In one embodiment, the filler sequence region is the FILL4 sequence region, the FILL12 sequence region, and the FILL16 sequence region. In one embodiment, the filler sequence region is the FILL4 sequence region, the FILL12 sequence region, and the FILL17 sequence region. In one embodiment, the filler sequence region is the FILL4 sequence region, the FILL12 sequence region, and the FILL18 sequence region. In one embodiment, the filler sequence region is the FILL4 sequence region, the FILL13 sequence region, and the FILL14 sequence region. In one embodiment, the filler sequence region is the FILL4 sequence region, the FILL13 sequence region, and the FILL15 sequence region. In one embodiment, the filler sequence region is the FILL4 sequence region, the FILL13 sequence region, and the FILL16 sequence region. In one embodiment, the filler sequence region is the FILL4 sequence region, the FILL13 sequence region, and the FILL17 sequence region. In one embodiment, the filler sequence region is the FILL4 sequence region, the FILL13 sequence region, and the FILL18 sequence region. In one embodiment, the filler sequence region is the FILL4 sequence region, the FILL14 sequence region, and the FILL15 sequence region. In one embodiment, the filler sequence region is the FILL4 sequence region, the FILL14 sequence region, and the FILL16 sequence region. In one embodiment, the filler sequence region is the FILL4 sequence region, the FILL14 sequence region, and the FILL17 sequence region. In one embodiment, the filler sequence region is the FILL4 sequence region, the FILL14 sequence region, and the FILL18 sequence region. In one embodiment, the filler sequence region is the FILL4 sequence region, the FILL15 sequence region, and the FILL16 sequence region. In one embodiment, the filler sequence region is the FILL4 sequence region, the FILL15 sequence region, and the FILL17 sequence region. In one embodiment, the filler sequence region is the FILL4 sequence region, the FILL15 sequence region, and the FILL18 sequence region. In one embodiment, the filler sequence region is the FILL4 sequence region, the FILL16 sequence region, and the FILL17 sequence region. In one embodiment, the filler sequence region is the FILL4 sequence region, the FILL16 sequence region, and the FILL18 sequence region. In one embodiment, the filler sequence region is the FILL4 sequence region, the FILL17 sequence region, and the FILL18 sequence region. In one embodiment, the filler sequence region is the FILL5 sequence region, the FILL6 sequence region, and the FILL7 sequence region. In one embodiment, the filler sequence region is the FILL5 sequence region, the FILL6 sequence region, and the FILL8 sequence region. In one embodiment, the filler sequence region is the FILL5 sequence region, the FILL6 sequence region, and the FILL9 sequence region. In one embodiment, the filler sequence region is the FILL5 sequence region, the FILL6 sequence region, and the FILL10 sequence region.

[0643] In one embodiment, the filler sequence region is the FILL5 sequence region, the FILL6 sequence region, and the FILL11 sequence region. In one embodiment, the filler sequence region is the FILL5 sequence region, the FILL6 sequence region, and the FILL12 sequence region. In one embodiment, the filler sequence region is the FILL5 sequence region, the FILL6 sequence region, and the FILL13 sequence region. In one embodiment, the filler sequence region is the FILL5 sequence region, the FILL6 sequence region, and the FILL14 sequence region. In one embodiment, the filler sequence region is the FILL5 sequence region, the FILL6 sequence region, and the FILL15 sequence region. In one embodiment, the filler sequence region is the FILL5 sequence region, the FILL6 sequence region, and the FILL16 sequence region. In one embodiment, the filler sequence region is the FILL5 sequence region, the FILL6 sequence region, and the FILL17 sequence region. In one embodiment, the filler sequence region is the FILL5 sequence region, the FILL6 sequence region, and the FILL18 sequence region. In one embodiment, the filler sequence region is the FILL5 sequence region, the FILL7 sequence region, and the FILL8 sequence region.

[0644] In one embodiment, the filler sequence region is the FILL5 sequence region, the FILL7 sequence region, and the FILL9 sequence region. In one embodiment, the filler sequence region is the FILL5 sequence region, the FILL7 sequence region, and the FILL10 sequence region. In one embodiment, the filler sequence region is the FILL5 sequence region, the FILL7 sequence region, and the FILL11 sequence region. In one embodiment, the filler sequence region is the FILL5 sequence region, the FILL7 sequence region, and the FILL12 sequence region. In one embodiment, the filler sequence region is the FILL5 sequence region, the FILL7 sequence region, and the FILL13 sequence region. In one embodiment, the filler sequence region is the FILL5 sequence region, the FILL7 sequence region, and the FILL14 sequence region. In one embodiment, the filler sequence region is the FILL5 sequence region, the FILL7 sequence region, and the FILL15 sequence region.

[0645] In one embodiment, the filler sequence region is the FILL5 sequence region, the FILL7 sequence region, and the FILL16 sequence region. In one embodiment, the filler sequence region is the FILL5 sequence region, the FILL7 sequence region, and the FILL17 sequence region. In one embodiment, the filler sequence region is the FILL5 sequence region, the FILL7 sequence region, and the FILL18 sequence region. In one embodiment, the filler sequence region is the FILL5 sequence region, the FILL8 sequence region, and the FILL9 sequence region. In one embodiment, the filler sequence region is the FILL5 sequence region, the FILL8 sequence region, and the FILL10 sequence region. In one embodiment, the filler sequence region is the FILL5 sequence region, the FILL8 sequence region, and the FILL11 sequence region. In one embodiment, the filler sequence region is the FILL5 sequence region, the FILL8 sequence region, and the FILL12 sequence region. In one embodiment, the filler sequence region is the FILL5 sequence region, the FILL8 sequence region, and the FILL13 sequence region. In one embodiment, the filler sequence region is the FILL5 sequence region, the FILL8 sequence region, and the FILL14 sequence region.

[0646] In one embodiment, the filler sequence region is the FILL5 sequence region, the FILL8 sequence region, and the FILL15 sequence region. In one embodiment, the filler sequence region is the FILL5 sequence region, the FILL8 sequence region, and the FILL16 sequence region. In one embodiment, the filler sequence region is the FILL5 sequence region, the FILL8 sequence region, and the FILL17 sequence region. In one embodiment, the filler sequence region is the FILL5 sequence region, the FILL8 sequence region, and the FILL18 sequence region. In one embodiment, the filler sequence region is the FILL5 sequence region, the FILL9 sequence region, and the FILL10 sequence region. In one embodiment, the filler sequence region is the FILL5 sequence region, the FILL9 sequence region, and the FILL11 sequence region. In one embodiment, the filler sequence region is the FILL5 sequence region, the FILL9 sequence region, and the FILL12 sequence region. In one embodiment, the filler sequence region is the FILL5 sequence region, the FILL9 sequence region, and the FILL13 sequence region. In one embodiment, the filler sequence region is the FILL5 sequence region, the FILL9 sequence region, and the FILL14 sequence region.

[0647] In one embodiment, the filler sequence region is the FILL5 sequence region, the FILL9 sequence region, and the FILL15 sequence region. In one embodiment, the filler sequence region is the FILL5 sequence region, the FILL9 sequence region, and the FILL16 sequence region. In one embodiment, the filler sequence region is the FILL5 sequence region, the FILL9 sequence region, and the FILL17 sequence region. In one embodiment, the filler sequence region is the FILL5 sequence region, the FILL9 sequence region, and the FILL18 sequence region. In one embodiment, the filler sequence region is the FILL5 sequence region, the FILL10 sequence region, and the FILL11 sequence region. In one embodiment, the filler sequence region is the FILL5 sequence region, the FILL10 sequence region, and the FILL12 sequence region. In one embodiment, the filler sequence region is the FILL5 sequence region, the FILL10 sequence region, and the FILL13 sequence region. In one embodiment, the filler sequence region is the FILL5 sequence region, the FILL10 sequence region, and the FILL14 sequence region. In one embodiment, the filler sequence region is the FILL5 sequence region, the FILL10 sequence region, and the FILL15 sequence region.

[0648] In one embodiment, the filler sequence region is the FILL5 sequence region, the FILL10 sequence region, and the FILL16 sequence region. In one embodiment, the filler sequence region is the FILL5 sequence region, the FILL10 sequence region, and the FILL17 sequence region. In one embodiment, the filler sequence region is the FILL5 sequence region, the FILL10 sequence region, and the FILL18 sequence region. In one embodiment, the filler sequence region is the FILL5 sequence region, the FILL11 sequence region, and the FILL12 sequence region. In one embodiment, the filler sequence region is the FILL5 sequence region, the FILL11 sequence region, and the FILL13 sequence region. In one embodiment, the filler sequence region is the FILL5 sequence region, the FILL11 sequence region, and the FILL14 sequence region. In one embodiment, the filler sequence region is the FILL5 sequence region, the FILL11 sequence region, and the FILL15 sequence region. In one embodiment, the filler sequence region is the FILL5 sequence region, the FILL11 sequence region, and the FILL16 sequence region. In one embodiment, the filler sequence region is the FILL5 sequence region, the FILL11 sequence region, and the FILL17 sequence region. In one embodiment, the filler sequence region is the FILL5 sequence region, the FILL11 sequence region, and the FILL18 sequence region. In one embodiment, the filler sequence region is the FILL5 sequence region, the FILL12 sequence region, and the FILL13 sequence region. In one embodiment, the filler sequence region is the FILL5 sequence region, the FILL12 sequence region, and the FILL14 sequence region. In one embodiment, the filler sequence region is the FILL5 sequence region, the FILL12 sequence region, and the FILL15 sequence region. In one embodiment, the filler sequence region is the FILL5 sequence region, the FILL12 sequence region, and the FILL16 sequence region. In one embodiment, the filler sequence region is the FILL5 sequence region, the FILL12 sequence region, and the FILL17 sequence region. In one embodiment, the filler sequence region is the FILL5 sequence region, the FILL12 sequence region, and the FILL18 sequence region. In one embodiment, the filler sequence region is the FILL5 sequence region, the FILL13 sequence region, and the FILL14 sequence region. In one embodiment, the filler sequence region is the FILL5 sequence region, the FILL13 sequence region, and the FILL15 sequence region. In one embodiment, the filler sequence region is the FILL5 sequence region, the FILL13 sequence region, and the FILL16 sequence region. In one embodiment, the filler sequence region is the FILL5 sequence region, the FILL13 sequence region, and the FILL17 sequence region. In one embodiment, the filler sequence region is the FILL5 sequence region, the FILL13 sequence region, and the FILL18 sequence region. In one embodiment, the filler sequence region is the FILL5 sequence region, the FILL14 sequence region, and the FILL15 sequence region. In one embodiment, the filler sequence region is the FILL5 sequence region, the FILL14 sequence region, and the FILL16 sequence region. In one embodiment, the filler sequence region is the FILL5 sequence region, the FILL14 sequence region, and the FILL17 sequence region. In one embodiment, the filler sequence region is the FILL5 sequence region, the FILL14 sequence region, and the FILL18 sequence region. In one embodiment, the filler sequence region is the FILL5 sequence region, the FILL15 sequence region, and the FILL16 sequence region. In one embodiment, the filler sequence region is the FILL5 sequence region, the FILL15 sequence region, and the FILL17 sequence region. In one embodiment, the filler sequence region is the FILL5 sequence region, the FILL15 sequence region, and the FILL18 sequence region. In one embodiment, the filler sequence region is the FILL5 sequence region, the FILL16 sequence region, and the FILL17 sequence region. In one embodiment, the filler sequence region is the FILL5 sequence region, the FILL16 sequence region, and the FILL18 sequence region. In one embodiment, the filler sequence region is the FILL5 sequence region, the FILL17 sequence region, and the FILL18 sequence region. In one embodiment, the filler sequence region is the FILL6 sequence region, the FILL7 sequence region, and the FILL8 sequence region. In one embodiment, the filler sequence region is the FILL6 sequence region, the FILL7 sequence region, and the FILL9 sequence region. In one embodiment, the filler sequence region is the FILL6 sequence region, the FILL7 sequence region, and the FILL10 sequence region. In one embodiment, the filler sequence region is the FILL6 sequence region, the FILL7 sequence region, and the FILL11 sequence region.

[0649] In one embodiment, the filler sequence region is the FILL6 sequence region, the FILL7 sequence region, and the FILL12 sequence region. In one embodiment, the filler sequence region is the FILL6 sequence region, the FILL7 sequence region, and the FILL13 sequence region. In one embodiment, the filler sequence region is the FILL6 sequence region, the FILL7 sequence region, and the FILL14 sequence region. In one embodiment, the filler sequence region is the FILL6 sequence region, the FILL7 sequence region, and the FILL15 sequence region. In one embodiment, the filler sequence region is the FILL6 sequence region, the FILL7 sequence region, and the FILL16 sequence region. In one embodiment, the filler sequence region is the FILL6 sequence region, the FILL7 sequence region, and the FILL17 sequence region. In one embodiment, the filler sequence region is the FILL6 sequence region, the FILL7 sequence region, and the FILL18 sequence region. In one embodiment, the filler sequence region is the FILL6 sequence region, the FILL8 sequence region, and the FILL9 sequence region. In one embodiment, the filler sequence region is the FILL6 sequence region, the FILL8 sequence region, and the FILL10 sequence region.

[0650] In one embodiment, the filler sequence region is the FILL6 sequence region, the FILL8 sequence region, and the FILL11 sequence region. In one embodiment, the filler sequence region is the FILL6 sequence region, the FILL8 sequence region, and the FILL12 sequence region. In one embodiment, the filler sequence region is the FILL6 sequence region, the FILL8 sequence region, and the FILL13 sequence region. In one embodiment, the filler sequence region is the FILL6 sequence region, the FILL8 sequence region, and the FILL14 sequence region. In one embodiment, the filler sequence region is the FILL6 sequence region, the FILL8 sequence region, and the FILL15 sequence region. In one embodiment, the filler sequence region is the FILL6 sequence region, the FILL8 sequence region, and the FILL16 sequence region. In one embodiment, the filler sequence region is the FILL6 sequence region, the FILL8 sequence region, and the FILL17 sequence region. In one embodiment, the filler sequence region is the FILL6 sequence region, the FILL8 sequence region, and the FILL18 sequence region. In one embodiment, the filler sequence region is the FILL6 sequence region, the FILL9 sequence region, and the FILL10 sequence region.

[0651] In one embodiment, the filler sequence region is the FILL6 sequence region, the FILL9 sequence region, and the FILL11 sequence region. In one embodiment, the filler sequence region is the FILL6 sequence region, the FILL9 sequence region, and the FILL12 sequence region. In one embodiment, the filler sequence region is the FILL6 sequence region, the FILL9 sequence region, and the FILL13 sequence region. In one embodiment, the filler sequence region is the FILL6 sequence region, the FILL9 sequence region, and the FILL14 sequence region. In one embodiment, the filler sequence region is the FILL6 sequence region, the FILL9 sequence region, and the FILL15 sequence region. In one embodiment, the filler sequence region is the FILL6 sequence region, the FILL9 sequence region, and the FILL16 sequence region. In one embodiment, the filler sequence region is the FILL6 sequence region, the FILL9 sequence region, and the FILL17 sequence region. In one embodiment, the filler sequence region is the FILL6 sequence region, the FILL9 sequence region, and the FILL18 sequence region. In one embodiment, the filler sequence region is the FILL6 sequence region, the FILL10 sequence region, and the FILL11 sequence region.

[0652] In one embodiment, the filler sequence region is the FILL6 sequence region, the FILL10 sequence region, and the FILL12 sequence region. In one embodiment, the filler sequence region is the FILL6 sequence region, the FILL10 sequence region, and the FILL13 sequence region. In one embodiment, the filler sequence region is the FILL6 sequence region, the FILL10 sequence region, and the FILL14 sequence region. In one embodiment, the filler sequence region is the FILL6 sequence region, the FILL10 sequence region, and the FILL15 sequence region. In one embodiment, the filler sequence region is the FILL6 sequence region, the FILL10 sequence region, and the FILL16 sequence region. In one embodiment, the filler sequence region is the FILL6 sequence region, the FILL10 sequence region, and the FILL17 sequence region. In one embodiment, the filler sequence region is the FILL6 sequence region, the FILL10 sequence region, and the FILL18 sequence region. In one embodiment, the filler sequence region is the FILL6 sequence region, the FILL11 sequence region, and the FILL12 sequence region. In one embodiment, the filler sequence region is the FILL6 sequence region, the FILL11 sequence region, and the FILL13 sequence region. In one embodiment, the filler sequence region is the FILL6 sequence region, the FILL11 sequence region, and the FILL14 sequence region. In one embodiment, the filler sequence region is the FILL6 sequence region, the FILL11 sequence region, and the FILL15 sequence region. In one embodiment, the filler sequence region is the FILL6 sequence region, the FILL11 sequence region, and the FILL16 sequence region. In one embodiment, the filler sequence region is the FILL6 sequence region, the FILL11 sequence region, and the FILL17 sequence region. In one embodiment, the filler sequence region is the FILL6 sequence region, the FILL11 sequence region, and the FILL18 sequence region. In one embodiment, the filler sequence region is the FILL6 sequence region, the FILL12 sequence region, and the FILL13 sequence region. In one embodiment, the filler sequence region is the FILL6 sequence region, the FILL12 sequence region, and the FILL14 sequence region. In one embodiment, the filler sequence region is the FILL6 sequence region, the FILL12 sequence region, and the FILL15 sequence region. In one embodiment, the filler sequence region is the FILL6 sequence region, the FILL12 sequence region, and the FILL16 sequence region. In one embodiment, the filler sequence region is the FILL6 sequence region, the FILL12 sequence region, and the FILL17 sequence region. In one embodiment, the filler sequence region is the FILL6 sequence region, the FILL12 sequence region, and the FILL18 sequence region. In one embodiment, the filler sequence region is the FILL6 sequence region, the FILL13 sequence region, and the FILL14 sequence region. In one embodiment, the filler sequence region is the FILL6 sequence region, the FILL13 sequence region, and the FILL15 sequence region. In one embodiment, the filler sequence region is the FILL6 sequence region, the FILL13 sequence region, and the FILL16 sequence region. In one embodiment, the filler sequence region is the FILL6 sequence region, the FILL13 sequence region, and the FILL17 sequence region. In one embodiment, the filler sequence region is the FILL6 sequence region, the FILL13 sequence region, and the FILL18 sequence region. In one embodiment, the filler sequence region is the FILL6 sequence region, the FILL14 sequence region, and the FILL15 sequence region. In one embodiment, the filler sequence region is the FILL6 sequence region, the FILL14 sequence region, and the FILL16 sequence region. In one embodiment, the filler sequence region is the FILL6 sequence region, the FILL14 sequence region, and the FILL17 sequence region. In one embodiment, the filler sequence region is the FILL6 sequence region, the FILL14 sequence region, and the FILL18 sequence region. In one embodiment, the filler sequence region is the FILL6 sequence region, the FILL15 sequence region, and the FILL16 sequence region. In one embodiment, the filler sequence region is the FILL6 sequence region, the FILL15 sequence region, and the FILL17 sequence region. In one embodiment, the filler sequence region is the FILL6 sequence region, the FILL15 sequence region, and the FILL18 sequence region. In one embodiment, the filler sequence region is the FILL6 sequence region, the FILL16 sequence region, and the FILL17 sequence region. In one embodiment, the filler sequence region is the FILL6 sequence region, the FILL16 sequence region, and the FILL18 sequence region. In one embodiment, the filler sequence region is the FILL6 sequence region, the FILL17 sequence region, and the FILL18 sequence region. In one embodiment, the filler sequence region is the FILL7 sequence region, the FILL8 sequence region, and the FILL9 sequence region. In one embodiment, the filler sequence region is the FILL7 sequence region, the FILL8 sequence region, and the FILL10 sequence region. In one embodiment, the filler sequence region is the FILL7 sequence region, the FILL8 sequence region, and the FILL11 sequence region. In one embodiment, the filler sequence region is the FILL7 sequence region, the FILL8 sequence region, and the FILL12 sequence region. In one embodiment, the filler sequence region is the FILL7 sequence region, the FILL8 sequence region, and the FILL13 sequence region. In one embodiment, the filler sequence region is the FILL7 sequence region, the FILL8 sequence region, and the FILL14 sequence region.

[0653] In one embodiment, the filler sequence region is the FILL7 sequence region, the FILL8 sequence region, and the FILL15 sequence region. In one embodiment, the filler sequence region is the FILL7 sequence region, the FILL8 sequence region, and the FILL16 sequence region. In one embodiment, the filler sequence region is the FILL7 sequence region, the FILL8 sequence region, and the FILL17 sequence region. In one embodiment, the filler sequence region is the FILL7 sequence region, the FILL8 sequence region, and the FILL18 sequence region. In one embodiment, the filler sequence region is the FILL7 sequence region, the FILL9 sequence region, and the FILL10 sequence region. In one embodiment, the filler sequence region is the FILL7 sequence region, the FILL9 sequence region, and the FILL11 sequence region. In one embodiment, the filler sequence region is the FILL7 sequence region, the FILL9 sequence region, and the FILL12 sequence region. In one embodiment, the filler sequence region is the FILL7 sequence region, the FILL9 sequence region, and the FILL13 sequence region. In one embodiment, the filler sequence region is the FILL7 sequence region, the FILL9 sequence region, and the FILL14 sequence region.

[0654] In one embodiment, the filler sequence region is the FILL7 sequence region, the FILL9 sequence region, and the FILL15 sequence region. In one embodiment, the filler sequence region is the FILL7 sequence region, the FILL9 sequence region, and the FILL16 sequence region. In one embodiment, the filler sequence region is the FILL7 sequence region, the FILL9 sequence region, and the FILL17 sequence region. In one embodiment, the filler sequence region is the FILL7 sequence region, the FILL9 sequence region, and the FILL18 sequence region. In one embodiment, the filler sequence region is the FILL7 sequence region, the FILL10 sequence region, and the FILL11 sequence region. In one embodiment, the filler sequence region is the FILL7 sequence region, the FILL10 sequence region, and the FILL12 sequence region. In one embodiment, the filler sequence region is the FILL7 sequence region, the FILL10 sequence region, and the FILL13 sequence region. In one embodiment, the filler sequence region is the FILL7 sequence region, the FILL10 sequence region, and the FILL14 sequence region. In one embodiment, the filler sequence region is the FILL7 sequence region, the FILL10 sequence region, and the FILL15 sequence region.

[0655] In one embodiment, the filler sequence region is the FILL7 sequence region, the FILL10 sequence region, and the FILL16 sequence region. In one embodiment, the filler sequence region is the FILL7 sequence region, the FILL10 sequence region, and the FILL17 sequence region. In one embodiment, the filler sequence region is the FILL7 sequence region, the FILL10 sequence region, and the FILL18 sequence region. In one embodiment, the filler sequence region is the FILL7 sequence region, the FILL11 sequence region, and the FILL12 sequence region. In one embodiment, the filler sequence region is the FILL7 sequence region, the FILL11 sequence region, and the FILL13 sequence region. In one embodiment, the filler sequence region is the FILL7 sequence region, the FILL11 sequence region, and the FILL14 sequence region. In one embodiment, the filler sequence region is the FILL7 sequence region, the FILL11 sequence region, and the FILL15 sequence region. In one embodiment, the filler sequence region is the FILL7 sequence region, the FILL11 sequence region, and the FILL16 sequence region. In one embodiment, the filler sequence region is the FILL7 sequence region, the FILL11 sequence region, and the FILL17 sequence region. In one embodiment, the filler sequence region is the FILL7 sequence region, the FILL11 sequence region, and the FILL18 sequence region. In one embodiment, the filler sequence region is the FILL7 sequence region, the FILL12 sequence region, and the FILL13 sequence region. In one embodiment, the filler sequence region is the FILL7 sequence region, the FILL12 sequence region, and the FILL14 sequence region. In one embodiment, the filler sequence region is the FILL7 sequence region, the FILL12 sequence region, and the FILL15 sequence region. In one embodiment, the filler sequence region is the FILL7 sequence region, the FILL12 sequence region, and the FILL16 sequence region. In one embodiment, the filler sequence region is the FILL7 sequence region, the FILL12 sequence region, and the FILL17 sequence region. In one embodiment, the filler sequence region is the FILL7 sequence region, the FILL12 sequence region, and the FILL18 sequence region. In one embodiment, the filler sequence region is the FILL7 sequence region, the FILL13 sequence region, and the FILL14 sequence region. In one embodiment, the filler sequence region is the FILL7 sequence region, the FILL13 sequence region, and the FILL15 sequence region. In one embodiment, the filler sequence region is the FILL7 sequence region, the FILL13 sequence region, and the FILL16 sequence region. In one embodiment, the filler sequence region is the FILL7 sequence region, the FILL13 sequence region, and the FILL17 sequence region. In one embodiment, the filler sequence region is the FILL7 sequence region, the FILL13 sequence region, and the FILL18 sequence region. In one embodiment, the filler sequence region is the FILL7 sequence region, the FILL14 sequence region, and the FILL15 sequence region. In one embodiment, the filler sequence region is the FILL7 sequence region, the FILL14 sequence region, and the FILL16 sequence region. In one embodiment, the filler sequence region is the FILL7 sequence region, the FILL14 sequence region, and the FILL17 sequence region. In one embodiment, the filler sequence region is the FILL7 sequence region, the FILL14 sequence region, and the FILL18 sequence region. In one embodiment, the filler sequence region is the FILL7 sequence region, the FILL15 sequence region, and the FILL16 sequence region. In one embodiment, the filler sequence region is the FILL7 sequence region, the FILL15 sequence region, and the FILL17 sequence region. In one embodiment, the filler sequence region is the FILL7 sequence region, the FILL15 sequence region, and the FILL18 sequence region. In one embodiment, the filler sequence region is the FILL7 sequence region, the FILL16 sequence region, and the FILL17 sequence region. In one embodiment, the filler sequence region is the FILL7 sequence region, the FILL16 sequence region, and the FILL18 sequence region. In one embodiment, the filler sequence region is the FILL7 sequence region, the FILL17 sequence region, and the FILL18 sequence region. In one embodiment, the filler sequence region is the FILL8 sequence region, the FILL9 sequence region, and the FILL10 sequence region. In one embodiment, the filler sequence region is the FILL8 sequence region, the FILL9 sequence region, and the FILL11 sequence region. In one embodiment, the filler sequence region is the FILL8 sequence region, the FILL9 sequence region, and the FILL12 sequence region. In one embodiment, the filler sequence region is the FILL8 sequence region, the FILL9 sequence region, and the FILL13 sequence region. In one embodiment, the filler sequence region is the FILL8 sequence region, the FILL9 sequence region, and the FILL14 sequence region. In one embodiment, the filler sequence region is the FILL8 sequence region, the FILL9 sequence region, and the FILL15 sequence region.

[0656] In one embodiment, the filler sequence region is the FILL8 sequence region, the FILL9 sequence region, and the FILL16 sequence region. In one embodiment, the filler sequence region is the FILL8 sequence region, the FILL9 sequence region, and the FILL17 sequence region. In one embodiment, the filler sequence region is the FILL8 sequence region, the FILL9 sequence region, and the FILL18 sequence region. In one embodiment, the filler sequence region is the FILL8 sequence region, the FILL10 sequence region, and the FILL11 sequence region. In one embodiment, the filler sequence region is the FILL8 sequence region, the FILL10 sequence region, and the FILL12 sequence region. In one embodiment, the filler sequence region is the FILL8 sequence region, the FILL10 sequence region, and the FILL13 sequence region. In one embodiment, the filler sequence region is the FILL8 sequence region, the FILL10 sequence region, and the FILL14 sequence region. In one embodiment, the filler sequence region is the FILL8 sequence region, the FILL10 sequence region, and the FILL15 sequence region. In one embodiment, the filler sequence region is the FILL8 sequence region, the FILL10 sequence region, and the FILL16 sequence region. In one embodiment, the filler sequence region is the FILL8 sequence region, the FILL10 sequence region, and the FILL17 sequence region. In one embodiment, the filler sequence region is the FILL8 sequence region, the FILL10 sequence region, and the FILL18 sequence region. In one embodiment, the filler sequence region is the FILL8 sequence region, the FILL11 sequence region, and the FILL12 sequence region. In one embodiment, the filler sequence region is the FILL8 sequence region, the FILL11 sequence region, and the FILL13 sequence region. In one embodiment, the filler sequence region is the FILL8 sequence region, the FILL11 sequence region, and the FILL14 sequence region. In one embodiment, the filler sequence region is the FILL8 sequence region, the FILL11 sequence region, and the FILL15 sequence region. In one embodiment, the filler sequence region is the FILL8 sequence region, the FILL11 sequence region, and the FILL16 sequence region. In one embodiment, the filler sequence region is the FILL8 sequence region, the FILL11 sequence region, and the FILL17 sequence region. In one embodiment, the filler sequence region is the FILL8 sequence region, the FILL11 sequence region, and the FILL18 sequence region. In one embodiment, the filler sequence region is the FILL8 sequence region, the FILL12 sequence region, and the FILL13 sequence region. In one embodiment, the filler sequence region is the FILL8 sequence region, the FILL12 sequence region, and the FILL14 sequence region. In one embodiment, the filler sequence region is the FILL8 sequence region, the FILL12 sequence region, and the FILL15 sequence region. In one embodiment, the filler sequence region is the FILL8 sequence region, the FILL12 sequence region, and the FILL16 sequence region. In one embodiment, the filler sequence region is the FILL8 sequence region, the FILL12 sequence region, and the FILL17 sequence region. In one embodiment, the filler sequence region is the FILL8 sequence region, the FILL12 sequence region, and the FILL18 sequence region. In one embodiment, the filler sequence region is the FILL8 sequence region, the FILL13 sequence region, and the FILL14 sequence region. In one embodiment, the filler sequence region is the FILL8 sequence region, the FILL13 sequence region, and the FILL15 sequence region. In one embodiment, the filler sequence region is the FILL8 sequence region, the FILL13 sequence region, and the FILL16 sequence region. In one embodiment, the filler sequence region is the FILL8 sequence region, the FILL13 sequence region, and the FILL17 sequence region. In one embodiment, the filler sequence region is the FILL8 sequence region, the FILL13 sequence region, and the FILL18 sequence region. In one embodiment, the filler sequence region is the FILL8 sequence region, the FILL14 sequence region, and the FILL15 sequence region. In one embodiment, the filler sequence region is the FILL8 sequence region, the FILL14 sequence region, and the FILL16 sequence region. In one embodiment, the filler sequence region is the FILL8 sequence region, the FILL14 sequence region, and the FILL17 sequence region. In one embodiment, the filler sequence region is the FILL8 sequence region, the FILL14 sequence region, and the FILL18 sequence region. In one embodiment, the filler sequence region is the FILL8 sequence region, the FILL15 sequence region, and the FILL16 sequence region. In one embodiment, the filler sequence region is the FILL8 sequence region, the FILL15 sequence region, and the FILL17 sequence region. In one embodiment, the filler sequence region is the FILL8 sequence region, the FILL15 sequence region, and the FILL18 sequence region. In one embodiment, the filler sequence region is the FILL8 sequence region, the FILL16 sequence region, and the FILL17 sequence region. In one embodiment, the filler sequence region is the FILL8 sequence region, the FILL16 sequence region, and the FILL18 sequence region. In one embodiment, the filler sequence region is the FILL8 sequence region, the FILL17 sequence region, and the FILL18 sequence region. In one embodiment, the filler sequence region is the FILL9 sequence region, the FILL10 sequence region, and the FILL11 sequence region. In one embodiment, the filler sequence region is the FILL9 sequence region, the FILL10 sequence region, and the FILL12 sequence region. In one embodiment, the filler sequence region is the FILL9 sequence region, the FILL10 sequence region, and the FILL13 sequence region. In one embodiment, the filler sequence region is the FILL9 sequence region, the FILL10 sequence region, and the FILL14 sequence region. In one embodiment, the filler sequence region is the FILL9 sequence region, the FILL10 sequence region, and the FILL15 sequence region. In one embodiment, the filler sequence region is the FILL9 sequence region, the FILL10 sequence region, and the FILL16 sequence region. In one embodiment, the filler sequence region is the FILL9 sequence region, the FILL10 sequence region, and the FILL17 sequence region. In one embodiment, the filler sequence region is the FILL9 sequence region, the FILL10 sequence region, and the FILL18 sequence region. In one embodiment, the filler sequence region is the FILL9 sequence region, the FILL11 sequence region, and the FILL12 sequence region. In one embodiment, the filler sequence region is the FILL9 sequence region, the FILL11 sequence region, and the FILL13 sequence region. In one embodiment, the filler sequence region is the FILL9 sequence region, the FILL11 sequence region, and the FILL14 sequence region. In one embodiment, the filler sequence region is the FILL9 sequence region, the FILL11 sequence region, and the FILL15 sequence region. In one embodiment, the filler sequence region is the FILL9 sequence region, the FILL11 sequence region, and the FILL16 sequence region. In one embodiment, the filler sequence region is the FILL9 sequence region, the FILL11 sequence region, and the FILL17 sequence region. In one embodiment, the filler sequence region is the FILL9 sequence region, the FILL11 sequence region, and the FILL18 sequence region. In one embodiment, the filler sequence region is the FILL9 sequence region, the FILL12 sequence region, and the FILL13 sequence region. In one embodiment, the filler sequence region is the FILL9 sequence region, the FILL12 sequence region, and the FILL14 sequence region. In one embodiment, the filler sequence region is the FILL9 sequence region, the FILL12 sequence region, and the FILL15 sequence region. In one embodiment, the filler sequence region is the FILL9 sequence region, the FILL12 sequence region, and the FILL16 sequence region. In one embodiment, the filler sequence region is the FILL9 sequence region, the FILL12 sequence region, and the FILL17 sequence region. In one embodiment, the filler sequence region is the FILL9 sequence region, the FILL12 sequence region, and the FILL18 sequence region. In one embodiment, the filler sequence region is the FILL9 sequence region, the FILL13 sequence region, and the FILL14 sequence region. In one embodiment, the filler sequence region is the FILL9 sequence region, the FILL13 sequence region, and the FILL15 sequence region. In one embodiment, the filler sequence region is the FILL9 sequence region, the FILL13 sequence region, and the FILL16 sequence region. In one embodiment, the filler sequence region is the FILL9 sequence region, the FILL13 sequence region, and the FILL17 sequence region. In one embodiment, the filler sequence region is the FILL9 sequence region, the FILL13 sequence region, and the FILL18 sequence region. In one embodiment, the filler sequence region is the FILL9 sequence region, the FILL14 sequence region, and the FILL15 sequence region. In one embodiment, the filler sequence region is the FILL9 sequence region, the FILL14 sequence region, and the FILL16 sequence region. In one embodiment, the filler sequence region is the FILL9 sequence region, the FILL14 sequence region, and the FILL17 sequence region. In one embodiment, the filler sequence region is the FILL9 sequence region, the FILL14 sequence region, and the FILL18 sequence region. In one embodiment, the filler sequence region is the FILL9 sequence region, the FILL15 sequence region, and the FILL16 sequence region. In one embodiment, the filler sequence region is the FILL9 sequence region, the FILL15 sequence region, and the FILL17 sequence region. In one embodiment, the filler sequence region is the FILL9 sequence region, the FILL15 sequence region, and the FILL18 sequence region. In one embodiment, the filler sequence region is the FILL9 sequence region, the FILL16 sequence region, and the FILL17 sequence region. In one embodiment, the filler sequence region is the FILL9 sequence region, the FILL16 sequence region, and the FILL18 sequence region. In one embodiment, the filler sequence region is the FILL9 sequence region, the FILL17 sequence region, and the FILL18 sequence region. In one embodiment, the filler sequence region is the FILL10 sequence region, the FILL11 sequence region, and the FILL12 sequence region. In one embodiment, the filler sequence region is the FILL10 sequence region, the FILL11 sequence region, and the FILL13 sequence region. In one embodiment, the filler sequence region is the FILL10 sequence region, the FILL11 sequence region, and the FILL14 sequence region. In one embodiment, the filler sequence region is the FILL10 sequence region, the FILL11 sequence region, and the FILL15 sequence region. In one embodiment, the filler sequence region is the FILL10 sequence region, the FILL11 sequence region, and the FILL16 sequence region. In one embodiment, the filler sequence region is the FILL10 sequence region, the FILL11 sequence region, and the FILL17 sequence region. In one embodiment, the filler sequence region is the FILL10 sequence region, the FILL11 sequence region, and the FILL18 sequence region. In one embodiment, the filler sequence region is the FILL10 sequence region, the FILL12 sequence region, and the FILL13 sequence region. In one embodiment, the filler sequence region is the FILL10 sequence region, the FILL12 sequence region, and the FILL14 sequence region. In one embodiment, the filler sequence region is the FILL10 sequence region, the FILL12 sequence region, and the FILL15 sequence region. In one embodiment, the filler sequence region is the FILL10 sequence region, the FILL12 sequence region, and the FILL16 sequence region. In one embodiment, the filler sequence region is the FILL10 sequence region, the FILL12 sequence region, and the FILL17 sequence region. In one embodiment, the filler sequence region is the FILL10 sequence region, the FILL12 sequence region, and the FILL18 sequence region. In one embodiment, the filler sequence region is the FILL10 sequence region, the FILL13 sequence region, and the FILL14 sequence region. In one embodiment, the filler sequence region is the FILL10 sequence region, the FILL13 sequence region, and the FILL15 sequence region. In one embodiment, the filler sequence region is the FILL10 sequence region, the FILL13 sequence region, and the FILL16 sequence region. In one embodiment, the filler sequence region is the FILL10 sequence region, the FILL13 sequence region, and the FILL17 sequence region. In one embodiment, the filler sequence region is the FILL10 sequence region, the FILL13 sequence region, and the FILL18 sequence region. In one embodiment, the filler sequence region is the FILL10 sequence region, the FILL14 sequence region, and the FILL15 sequence region. In one embodiment, the filler sequence region is the FILL10 sequence region, the FILL14 sequence region, and the FILL16 sequence region. In one embodiment, the filler sequence region is the FILL10 sequence region, the FILL14 sequence region, and the FILL17 sequence region. In one embodiment, the filler sequence region is the FILL10 sequence region, the FILL14 sequence region, and the FILL18 sequence region. In one embodiment, the filler sequence region is the FILL10 sequence region, the FILL15 sequence region, and the FILL16 sequence region. In one embodiment, the filler sequence region is the FILL10 sequence region, the FILL15 sequence region, and the FILL17 sequence region. In one embodiment, the filler sequence region is the FILL10 sequence region, the FILL15 sequence region, and the FILL18 sequence region. In one embodiment, the filler sequence region is the FILL10 sequence region, the FILL16 sequence region, and the FILL17 sequence region. In one embodiment, the filler sequence region is the FILL10 sequence region, the FILL16 sequence region, and the FILL18 sequence region. In one embodiment, the filler sequence region is the FILL10 sequence region, the FILL17 sequence region, and the FILL18 sequence region. In one embodiment, the filler sequence region is the FILL11 sequence region, the FILL12 sequence region, and the FILL13 sequence region. In one embodiment, the filler sequence region is the FILL11 sequence region, the FILL12 sequence region, and the FILL14 sequence region. In one embodiment, the filler sequence region is the FILL11 sequence region, the FILL12 sequence region, and the FILL15 sequence region. In one embodiment, the filler sequence region is the FILL11 sequence region, the FILL12 sequence region, and the FILL16 sequence region. In one embodiment, the filler sequence region is the FILL11 sequence region, the FILL12 sequence region, and the FILL17 sequence region. In one embodiment, the filler sequence region is the FILL11 sequence region, the FILL12 sequence region, and the FILL18 sequence region. In one embodiment, the filler sequence region is the FILL11 sequence region, the FILL13 sequence region, and the FILL14 sequence region. In one embodiment, the filler sequence region is the FILL11 sequence region, the FILL13 sequence region, and the FILL15 sequence region. In one embodiment, the filler sequence region is the FILL11 sequence region, the FILL13 sequence region, and the FILL16 sequence region. In one embodiment, the filler sequence region is the FILL11 sequence region, the FILL13 sequence region, and the FILL17 sequence region. In one embodiment, the filler sequence region is the FILL11 sequence region, the FILL13 sequence region, and the FILL18 sequence region. In one embodiment, the filler sequence region is the FILL11 sequence region, the FILL14 sequence region, and the FILL15 sequence region. In one embodiment, the filler sequence region is the FILL11 sequence region, the FILL14 sequence region, and the FILL16 sequence region. In one embodiment, the filler sequence region is the FILL11 sequence region, the FILL14 sequence region, and the FILL17 sequence region. In one embodiment, the filler sequence region is the FILL11 sequence region, the FILL14 sequence region, and the FILL18 sequence region. In one embodiment, the filler sequence region is the FILL11 sequence region, the FILL15 sequence region, and the FILL16 sequence region. In one embodiment, the filler sequence region is the FILL11 sequence region, the FILL15 sequence region, and the FILL17 sequence region. In one embodiment, the filler sequence region is the FILL11 sequence region, the FILL15 sequence region, and the FILL18 sequence region. In one embodiment, the filler sequence region is the FILL11 sequence region, the FILL16 sequence region, and the FILL17 sequence region. In one embodiment, the filler sequence region is the FILL11 sequence region, the FILL16 sequence region, and the FILL18 sequence region. In one embodiment, the filler sequence region is the FILL11 sequence region, the FILL17 sequence region, and the FILL18 sequence region. In one embodiment, the filler sequence region is the FILL12 sequence region, the FILL13 sequence region, and the FILL14 sequence region. In one embodiment, the filler sequence region is the FILL12 sequence region, the FILL13 sequence region, and the FILL15 sequence region. In one embodiment, the filler sequence region is the FILL12 sequence region, the FILL13 sequence region, and the FILL16 sequence region. In one embodiment, the filler sequence region is the FILL12 sequence region, the FILL13 sequence region, and the FILL17 sequence region. In one embodiment, the filler sequence region is the FILL12 sequence region, the FILL13 sequence region, and the FILL18 sequence region. In one embodiment, the filler sequence region is the FILL12 sequence region, the FILL14 sequence region, and the FILL15 sequence region. In one embodiment, the filler sequence region is the FILL12 sequence region, the FILL14 sequence region, and the FILL16 sequence region. In one embodiment, the filler sequence region is the FILL12 sequence region, the FILL14 sequence region, and the FILL17 sequence region. In one embodiment, the filler sequence region is the FILL12 sequence region, the FILL14 sequence region, and the FILL18 sequence region. In one embodiment, the filler sequence region is the FILL12 sequence region, the FILL15 sequence region, and the FILL16 sequence region. In one embodiment, the filler sequence region is the FILL12 sequence region, the FILL15 sequence region, and the FILL17 sequence region. In one embodiment, the filler sequence region is the FILL12 sequence region, the FILL15 sequence region, and the FILL18 sequence region. In one embodiment, the filler sequence region is the FILL12 sequence region, the FILL16 sequence region, and the FILL17 sequence region. In one embodiment, the filler sequence region is the FILL12 sequence region, the FILL16 sequence region, and the FILL18 sequence region. In one embodiment, the filler sequence region is the FILL12 sequence region, the FILL17 sequence region, and the FILL18 sequence region. In one embodiment, the filler sequence region is the FILL13 sequence region, the FILL14 sequence region, and the FILL15 sequence region. In one embodiment, the filler sequence region is the FILL13 sequence region, the FILL14 sequence region, and the FILL16 sequence region. In one embodiment, the filler sequence region is the FILL13 sequence region, the FILL14 sequence region, and the FILL17 sequence region. In one embodiment, the filler sequence region is the FILL13 sequence region, the FILL14 sequence region, and the FILL18 sequence region. In one embodiment, the filler sequence region is the FILL13 sequence region, the FILL15 sequence region, and the FILL16 sequence region. In one embodiment, the filler sequence region is the FILL13 sequence region, the FILL15 sequence region, and the FILL17 sequence region. In one embodiment, the filler sequence region is the FILL13 sequence region, the FILL15 sequence region, and the FILL18 sequence region. In one embodiment, the filler sequence region is the FILL13 sequence region, the FILL16 sequence region, and the FILL17 sequence region. In one embodiment, the filler sequence region is the FILL13 sequence region, the FILL16 sequence region, and the FILL18 sequence region. In one embodiment, the filler sequence region is the FILL13 sequence region, the FILL17 sequence region, and the FILL18 sequence region. In one embodiment, the filler sequence region is the FILL14 sequence region, the FILL15 sequence region, and the FILL16 sequence region. In one embodiment, the filler sequence region is the FILL14 sequence region, the FILL15 sequence region, and the FILL17 sequence region. In one embodiment, the filler sequence region is the FILL14 sequence region, the FILL15 sequence region, and the FILL18 sequence region. In one embodiment, the filler sequence region is the FILL14 sequence region, the FILL16 sequence region, and the FILL17 sequence region. In one embodiment, the filler sequence region is the FILL14 sequence region, the FILL16 sequence region, and the FILL18 sequence region. In one embodiment, the filler sequence region is the FILL14 sequence region, the FILL17 sequence region, and the FILL18 sequence region. In one embodiment, the filler sequence region is the FILL15 sequence region, the FILL16 sequence region, and the FILL17 sequence region. In one embodiment, the filler sequence region is the FILL15 sequence region, the FILL16 sequence region, and the FILL18 sequence region. In one embodiment, the filler sequence region is the FILL15 sequence region, the FILL17 sequence region, and the FILL18 sequence region. In one embodiment, the filler sequence region is the FILL16 sequence region, the FILL17 sequence region, and the FILL18 sequence region.

[0657] In one embodiment, the AAV particle viral genome may comprise at least one enhancer sequence region. The enhancer sequence region(s) may, independently, have a length such as, but not limited to, 300, 301, 302, 303, 304, 305, 306, 307, 308, 309, 310, 311, 312, 313, 314, 315, 316, 317, 318, 319, 320, 321, 322, 323, 324, 325, 326, 327, 328, 329, 330, 331, 332, 333, 334, 335, 336, 337, 338, 339, 340, 341, 342, 343, 344, 345, 346, 347, 348, 349, 350, 351, 352, 353, 354, 355, 356, 357, 358, 359, 360, 361, 362, 363, 364, 365, 366, 367, 368, 369, 370, 371, 372, 373, 374, 375, 376, 377, 378, 379, 380, 381, 382, 383, 384, 385, 386, 387, 388, 389, 390, 391, 392, 393, 394, 395, 396, 397, 398, 399, and 400 nucleotides. The length of the enhancer region for the viral genome may be 300-310, 300-325, 305-315, 310-320, 315-325, 320-330, 325-335, 325-350, 330-340, 335-345, 340-350, 345-355, 350-360, 350-375, 355-365, 360-370, 365-375, 370-380, 375-385, 375-400, 380-390, 385-395, and 390-400 nucleotides. As a non-limiting example, the viral genome comprises an enhancer region that is about 303 nucleotides in length. As a non-limiting example, the viral genome comprises an enhancer region that is about 382 nucleotides in length.

[0658] In one embodiment, the AAV particle viral genome comprises at least one enhancer sequence region. Non-limiting examples of enhancer sequence regions are described in Table 13.

TABLE 13
Enhancer Sequence Regions

| Sequence Region Name | SEQ ID NO |
|---|---|
| Enhancer1 | 1397 |
| Enhancer2 | 1398 |

[0659] In one embodiment, the AAV particle viral genome comprises one enhancer sequence region. In one embodiment, the enhancer sequence regions is the Enhancer1 sequence region. In one embodiment, the enhancer sequence regions is the Enhancer2 sequence region.

[0660] In one embodiment, the AAV particle viral genome comprises two enhancer sequence regions. In one embodiment, the enhancer sequence regions are the Enhancer1 sequence region and the Enhancer 2 sequence region.

[0661] In one embodiment, the AAV particle viral genome may comprise at least one promoter sequence region. The promoter sequence region(s) may, independently, have a length such as, but not limited to, 4, 5, 6, 7, 8, 9, 10, 11, 12, 13, 14, 15, 16, 17, 18, 19, 20, 21, 22, 23, 24, 25, 26, 27, 28, 29, 30, 31, 32, 33, 34, 35, 36, 37, 38, 39, 40, 41, 42, 43, 44, 45, 46, 47, 48, 49, 50, 51, 52, 53, 54, 55, 56, 57, 58, 59, 60, 61, 62, 63, 64, 65, 66, 67, 68, 69, 70, 71, 72, 73, 74, 75, 76, 77, 78, 79, 80, 81, 82, 83, 84, 85, 86, 87, 88, 89, 90, 91, 92, 93, 94, 95, 96, 97, 98, 99, 100, 101, 102, 103, 104, 105, 106, 107, 108, 109, 110, 111, 112, 113, 114, 115, 116, 117, 118, 119, 120, 121, 122, 123, 124, 125, 126, 127, 128, 129, 130, 131, 132, 133, 134, 135, 136, 137, 138, 139, 140, 141, 142, 143, 144, 145, 146, 147, 148, 149, 150, 151, 152, 153, 154, 155, 156, 157, 158, 159, 160, 161, 162, 163, 164, 165, 166, 167, 168, 169, 170, 171, 172, 173, 174, 175, 176, 177, 178, 179, 180, 181, 182, 183, 184, 185, 186, 187, 188, 189, 190, 191, 192, 193, 194, 195, 196, 197, 198, 199, 200, 201, 202, 203, 204, 205, 206, 207, 208, 209, 210, 211, 212, 213, 214, 215, 216, 217, 218, 219, 220, 221, 222, 223, 224, 225, 226, 227, 228, 229, 230, 231, 232, 233, 234, 235, 236, 237, 238, 239, 240, 241, 242, 243, 244, 245, 246, 247, 248, 249, 250, 251, 252, 253, 254, 255, 256, 257, 258, 259, 260, 261, 262, 263, 264, 265, 266, 267, 268, 269, 270, 271, 272, 273, 274, 275, 276, 277, 278, 279, 280, 281, 282, 283, 284, 285, 286, 287, 288, 289, 290, 291, 292, 293, 294, 295, 296, 297, 298, 299, 300, 301, 302, 303, 304, 305, 306, 307, 308, 309, 310, 311, 312, 313, 314, 315, 316, 317, 318, 319, 320, 321, 322, 323, 324, 325, 326, 327, 328, 329, 330, 331, 332, 333, 334, 335, 336, 337, 338, 339, 340, 341, 342, 343, 344, 345, 346, 347, 348, 349, 350, 351, 352, 353, 354, 355, 356, 357, 358, 359, 360, 361, 362, 363, 364, 365, 366, 367, 368, 369, 370, 371, 372, 373, 374, 375, 376, 377, 378, 379, 380, 381, 382, 383, 384, 385, 386, 387, 388, 389, 390, 391, 392, 393, 394, 395, 396, 397, 398, 399, 400, 401, 402, 403, 404, 405, 406, 407, 408, 409, 410, 411, 412, 413, 414, 415, 416, 417, 418, 419, 420, 421, 422, 423, 424, 425, 426, 427, 428, 429, 430, 431, 432, 433, 434, 435, 436, 437, 438, 439, 440, 441, 442, 443, 444, 445, 446, 447, 448, 449, 450, 451, 452, 453, 454, 455, 456, 457, 458, 459, 460, 461, 462, 463, 464, 465, 466, 467, 468, 469, 470, 471, 472, 473, 474, 475, 476, 477, 478, 479, 480, 481, 482, 483, 484, 485, 486, 487, 488, 489, 490, 491, 492, 493, 494, 495, 496, 497, 498, 499, 500, 501, 502, 503, 504, 505, 506, 507, 508, 509, 510, 511, 512, 513, 514, 515, 516, 517, 518, 519, 520, 521, 522, 523, 524, 525, 526, 527, 528, 529, 530, 531, 532, 533, 534, 535, 536, 537, 538, 539, 540, 541, 542, 543, 544, 545, 546, 547, 548, 549, 550, 551, 552, 553, 554, 555, 556, 557, 558, 559, 560, 561, 562, 563, 564, 565, 566, 567, 568, 569, 570, 571, 572, 573, 574, 575, 576, 577, 578, 579, 580, 581, 582, 583, 584, 585, 586, 587, 588, 589, 590, 591, 592, 593, 594, 595, 596, 597, 598, 599, and 600 nucleotides. The length of the promoter region for the viral genome may be 4-10, 10-20, 10-50, 20-30, 30-40, 40-50, 50-60, 50-100, 60-70, 70-80, 80-90, 90-100, 100-110, 100-150, 110-120, 120-130, 130-140, 140-150, 150-160, 150-200, 160-170, 170-180, 180-190, 190-200, 200-210, 200-250, 210-220, 220-230, 230-240, 240-250, 250-260, 250-300, 260-270, 270-280, 280-290, 290-300, 300-310, 300-350, 310-320, 320-330, 330-340, 340-350, 350-360, 350-400, 360-370, 370-380, 380-390, 390-400, 400-410, 400-450, 410-420, 420-430, 430-440, 440-450, 450-460, 450-500, 460-470, 470-480, 480-490, 490-500, 500-510, 500-550, 510-520, 520-530, 530-540, 540-550, 550-560, 550-600, 560-570, 570-580, 580-590, and 590-600 nucleotides. As a non-limiting example, the viral genome comprises a promoter region that is about 4 nucleotides in length. As a non-limiting example, the viral genome comprises a promoter region that is about 17 nucleotides in length. As a non-limiting example, the viral genome comprises a promoter region that is about 204 nucleotides in length. As a non-limiting example, the viral genome comprises a promoter region that is about 219 nucleotides in length. As a non-limiting example, the viral genome comprises a promoter region that is about 260 nucleotides in length. As a non-limiting example, the viral genome comprises a promoter region that is about 303 nucleotides in length. As a non-limiting example, the viral genome comprises a promoter region that is about 382 nucleotides in length. As a non-limiting example, the viral genome comprises a promoter region that is about 588 nucleotides in length.

[0662] In one embodiment, the AAV particle viral genome comprises at least one promoter sequence region. Non-limiting examples of promoter sequence regions are described in Table 14.

TABLE 14
Promoter Sequence Regions

| | SEQ ID NO or |
|---|---|
| Sequence Region Name | Sequence |
| Promoter1 | 1399 |
| Promoter2 | 1400 |
| Promoter3 | GTTG |
| Promoter4 | 1401 |
| Promoter5 | 1402 |
| Promoter6 | 1403 |

[0663] In one embodiment, the AAV particle viral genome comprises one promoter sequence region. In one embodiment, the promoter sequence region is Promoter1. In one embodiment, the promoter sequence region is Promoter2. In one embodiment, the promoter sequence region is Promoter3. In one embodiment, the promoter sequence region is Promoter4. In one embodiment, the promoter sequence region is Promoter5. In one embodiment, the promoter sequence region is Promoter6.

[0664] In one embodiment, the AAV particle viral genome comprises two promoter sequence regions. In one embodiment, the promoter sequence region is Promoter1 sequence region, and the Promoter2 sequence region. In one embodiment, the promoter sequence region is Promoter1 sequence region, and the Promoter3 sequence region. In one embodiment, the promoter sequence region is Promoter1 sequence region, and the Promoter4 sequence region. In one embodiment, the promoter sequence region is Promoter1 sequence region, and the Promoter5 sequence region. In one embodiment, the promoter sequence region is Promoter1 sequence region, and the Promoter6 sequence region. In one embodiment, the promoter sequence region is Promoter2 sequence region, and the Promoter3 sequence region. In one embodiment, the promoter sequence region is Promoter2 sequence region, and the Promoter4 sequence region. In one embodiment, the promoter sequence region is Promoter2 sequence region, and the Promoter5 sequence region. In one embodiment, the promoter sequence region is Promoter2 sequence region, and the Promoter6 sequence region. In one embodiment, the promoter sequence region is Promoter3 sequence region, and the Promoter4 sequence region. In one embodiment, the promoter sequence region is Promoter3 sequence region, and the Promoter5 sequence region. In one embodiment, the promoter sequence region is Promoter3 sequence region, and the Promoter6 sequence region. In one embodiment, the promoter sequence region is Promoter4 sequence region, and the Promoter5 sequence region. In one embodiment, the promoter sequence region is Promoter4 sequence region, and the Promoter6 sequence region. In one embodiment, the promoter sequence region is Promoter5 sequence region, and the Promoter6 sequence region.

[0665] In one embodiment, the AAV particle viral genome may comprise at least one exon sequence region. The exon region(s) may, independently, have a length such as, but not limited to, 2, 3, 4, 5, 6, 7, 8, 9, 10, 11, 12, 13, 14, 15, 16, 17, 18, 19, 20, 21, 22, 23, 24, 25, 26, 27, 28, 29, 30, 31, 32, 33, 34, 35, 36, 37, 38, 39, 40, 41, 42, 43, 44, 45, 46, 47, 48, 49, 50, 51, 52, 53, 54, 55, 56, 57, 58, 59, 60, 61, 62, 63, 64, 65, 66, 67, 68, 69, 70, 71, 72, 73, 74, 75, 76, 77, 78, 79, 80, 81, 82, 83, 84, 85, 86, 87, 88, 89, 90, 91, 92, 93, 94, 95, 96, 97, 98, 99, 100, 101, 102, 103, 104, 105, 106, 107, 108, 109, 110, 111, 112, 113, 114, 115, 116, 117, 118, 119, 120, 121, 122, 123, 124, 125, 126, 127, 128, 129, 130, 131, 132, 133, 134, 135, 136, 137, 138, 139, 140, 141, 142, 143, 144, 145, 146, 147, 148, 149, and 150 nucleotides. The length of the exon region for the viral genome may be 2-10, 5-10, 5-15, 10-20, 10-30, 10-40, 15-20, 15-25, 20-30, 20-40, 20-50, 25-30, 25-35, 30-40, 30-50, 30-60, 35-40, 35-45, 40-50, 40-60, 40-70, 45-50, 45-55, 50-60, 50-70, 50-80, 55-60, 55-65, 60-70, 60-80, 60-90, 65-70, 65-75, 70-80, 70-90, 70-100, 75-80, 75-85, 80-90, 80-100, 80-110, 85-90, 85-95, 90-100, 90-110, 90-120, 95-100, 95-105, 100-110, 100-120, 100-130, 105-110, 105-115, 110-120, 110-130, 110-140, 115-120, 115-125, 120-130, 120-140, 120-150, 125-130, 125-135, 130-140, 130-150, 135-140, 135-145, 140-150, and 145-150 nucleotides. As a non-limiting example, the viral genome comprises an exon region that is about 53 nucleotides in length. As a non-limiting example, the viral genome comprises an exon region that is about 134 nucleotides in length.

[0666] In one embodiment, the AAV particle viral genome comprises at least one Exon sequence region. Non-limiting examples of Exon sequence regions are described in Table 15.

TABLE 15
Exon Sequence Regions

| Sequence Region Name | SEQ ID NO |
|---|---|
| Exon1 | 1404 |
| Exon2 | 1405 |

[0667] In one embodiment, the AAV particle viral genome comprises one Exon sequence region. In one embodiment, the Exon sequence regions is the Exon1 sequence region. In one embodiment, the Exon sequence regions is the Exon2 sequence region.

[0668] In one embodiment, the AAV particle viral genome comprises two Exon sequence regions. In one embodiment, the Exon sequence regions are the Exon1 sequence region and the Exon 2 sequence region.

[0669] In one embodiment, the AAV particle viral genome may comprise at least one intron sequence region. The intron region(s) may, independently, have a length such as, but not limited to, 25, 26, 27, 28, 29, 30, 31, 32, 33, 34, 35, 36, 37, 38, 39, 40, 41, 42, 43, 44, 45, 46, 47, 48, 49, 50, 51, 52, 53, 54, 55, 56, 57, 58, 59, 60, 61, 62, 63, 64, 65, 66, 67, 68, 69, 70, 71, 72, 73, 74, 75, 76, 77, 78, 79, 80, 81, 82, 83, 84, 85, 86, 87, 88, 89, 90, 91, 92, 93, 94, 95, 96, 97, 98, 99, 100, 101, 102, 103, 104, 105, 106, 107, 108, 109, 110, 111, 112, 113, 114, 115, 116, 117, 118, 119, 120, 121, 122, 123, 124, 125, 126, 127, 128, 129, 130, 131, 132, 133, 134, 135, 136, 137, 138, 139, 140, 141, 142, 143, 144, 145, 146, 147, 148, 149, 150, 151, 152, 153, 154, 155, 156, 157, 158, 159, 160, 161, 162, 163, 164, 165, 166, 167, 168, 169, 170, 171, 172, 173, 174, 175, 176, 177, 178, 179, 180, 181, 182, 183, 184, 185, 186, 187, 188, 189, 190, 191, 192, 193, 194, 195, 196, 197, 198, 199, 200, 201, 202, 203, 204, 205, 206, 207, 208, 209, 210, 211, 212, 213, 214, 215, 216, 217, 218, 219, 220, 221, 222, 223, 224, 225, 226, 227, 228, 229, 230, 231, 232, 233, 234, 235, 236, 237, 238, 239, 240, 241, 242, 243, 244, 245, 246, 247, 248, 249, 250, 251, 252, 253, 254, 255, 256, 257, 258, 259, 260, 261, 262, 263, 264, 265, 266, 267, 268, 269, 270, 271, 272, 273, 274, 275, 276, 277, 278, 279, 280, 281, 282, 283, 284, 285, 286, 287, 288, 289, 290, 291, 292, 293, 294, 295, 296, 297, 298, 299, 300, 301, 302, 303, 304, 305, 306, 307, 308, 309, 310, 311, 312, 313, 314, 315, 316, 317, 318, 319, 320, 321, 322, 323, 324, 325, 326, 327, 328, 329, 330, 331, 332, 333, 334, 335, 336, 337, 338, 339, 340, 341, 342, 343, 344, 345, 346, 347, 348, 349, and 350 nucleotides. The length of the intron region for the viral genome may be 25-35, 25-50, 35-45, 45-55, 50-75, 55-65, 65-75, 75-85, 75-100, 85-95, 95-105, 100-125, 105-115, 115-125, 125-135, 125-150, 135-145, 145-155, 150-175, 155-165, 165-175, 175-185, 175-200, 185-195, 195-205, 200-225, 205-215, 215-225, 225-235, 225-250, 235-245, 245-255, 250-275, 255-265, 265-275, 275-285, 275-300, 285-295, 295-305, 300-325, 305-315, 315-325, 325-335, 325-350, and 335-345 nucleotides. As a non-limiting example, the viral genome comprises an intron region that is about 32 nucleotides in length. As a non-limiting example, the viral genome comprises an intron region that is about 172 nucleotides in length. As a non-limiting example, the viral genome comprises an intron region that is about 201 nucleotides in length. As a non-limiting example, the viral genome comprises an intron region that is about 347 nucleotides in length.

[0670] In one embodiment, the AAV particle viral genome comprises at least one intron sequence region. Non-limiting examples of intron sequence regions are described in Table 16.

TABLE 16
Intron Sequence Regions

| Sequence Region Name | SEQ ID NO |
|---|---|
| Intron1 | 1406 |
| Intron2 | 1407 |
| Intron3 | 1408 |
| Intron4 | 1409 |

[0671] In one embodiment, the AAV particle viral genome comprises one intron sequence region. In one embodiment, the intron sequence regions is the Intron1 sequence region. In one embodiment, the intron sequence regions is the Intron2 sequence region. In one embodiment, the intron sequence regions is the Intron3 sequence region. In one embodiment, the intron sequence regions is the Intron4 sequence region.

[0672] In one embodiment, the AAV particle viral genome comprises two intron sequence regions. In one embodiment, the intron sequence regions are the Intron1 sequence region and the Intron2 sequence region. In one embodiment, the intron sequence regions are the Intron1 sequence region and the Intron3 sequence region. In one embodiment, the intron sequence regions are the Intron1 sequence region and the Intron4 sequence region. In one embodiment, the intron sequence regions are the Intron2 sequence region and the Intron3 sequence region. In one embodiment, the intron sequence regions are the Intron2 sequence region and the Intron4 sequence region. In one embodiment, the intron sequence regions are the Intron3 sequence region and the Intron4 sequence region.

[0673] In one embodiment, the AAV particle viral genome comprises three intron sequence regions. In one embodiment, the intron sequence regions are the Intron1 sequence region, the Intron2 sequence region, and the Intron3 sequence region. In one embodiment, the intron sequence regions are the Intron1 sequence region, the Intron2 sequence region, and the Intron4 sequence region. In one embodiment, the intron sequence regions are the Intron1 sequence region, the Intron3 sequence region, and the Intron4 sequence region. In one embodiment, the intron sequence regions are the Intron2 sequence region, the Intron3 sequence region, and the Intron4 sequence region.

[0674] In one embodiment, the AAV particle viral genome may comprise at least one polyadenylation signal sequence region. The polyadenylation signal region sequence region(s) may, independently, have a length such as, but not limited to, 4, 5, 6, 7, 8, 9, 10, 11, 12, 13, 14, 15, 16, 17, 18, 19, 20, 21, 22, 23, 24, 25, 26, 27, 28, 29, 30, 31, 32, 33, 34, 35, 36, 37, 38, 39, 40, 41, 42, 43, 44, 45, 46, 47, 48, 49, 50, 51, 52, 53, 54, 55, 56, 57, 58, 59, 60, 61, 62, 63, 64, 65, 66, 67, 68, 69, 70, 71, 72, 73, 74, 75, 76, 77, 78, 79, 80, 81, 82, 83, 84, 85, 86, 87, 88, 89, 90, 91, 92, 93, 94, 95, 96, 97, 98, 99, 100, 101, 102, 103, 104, 105, 106, 107, 108, 109, 110, 111, 112, 113, 114, 115, 116, 117, 118, 119, 120, 121, 122, 123, 124, 125, 126, 127, 128, 129, 130, 131, 132, 133, 134, 135, 136, 137, 138, 139, 140, 141, 142, 143, 144, 145, 146, 147, 148, 149, 150, 151, 152, 153, 154, 155, 156, 157, 158, 159, 160, 161, 162, 163, 164, 165, 166, 167, 168, 169, 170, 171, 172, 173, 174, 175, 176, 177, 178, 179, 180, 181, 182, 183, 184, 185, 186, 187, 188, 189, 190, 191, 192, 193, 194, 195, 196, 197, 198, 199, 200, 201, 202, 203, 204, 205, 206, 207, 208, 209, 210, 211, 212, 213, 214, 215, 216, 217, 218, 219, 220, 221, 222, 223, 224, 225, 226, 227, 228, 229, 230, 231, 232, 233, 234, 235, 236, 237, 238, 239, 240, 241, 242, 243, 244, 245, 246, 247, 248, 249, 250, 251, 252, 253, 254, 255, 256, 257, 258, 259, 260, 261, 262, 263, 264, 265, 266, 267, 268, 269, 270, 271, 272, 273, 274, 275, 276, 277, 278, 279, 280, 281, 282, 283, 284, 285, 286, 287, 288, 289, 290, 291, 292, 293, 294, 295, 296, 297, 298, 299, 300, 301, 302, 303, 304, 305, 306, 307, 308, 309, 310, 311, 312, 313, 314, 315, 316, 317, 318, 319, 320, 321, 322, 323, 324, 325, 326, 327, 328, 329, 330, 331, 332, 333, 334, 335, 336, 337, 338, 339, 340, 341, 342, 343, 344, 345, 346, 347, 348, 349, 350, 351, 352, 353, 354, 355, 356, 357, 358, 359, 360, 361, 362, 363, 364, 365, 366, 367, 368, 369, 370, 371, 372, 373, 374, 375, 376, 377, 378, 379, 380, 381, 382, 383, 384, 385, 386, 387, 388, 389, 390, 391, 392, 393, 394, 395, 396, 397, 398, 399, 400, 401, 402, 403, 404, 405, 406, 407, 408, 409, 410, 411, 412, 413, 414, 415, 416, 417, 418, 419, 420, 421, 422, 423, 424, 425, 426, 427, 428, 429, 430, 431, 432, 433, 434, 435, 436, 437, 438, 439, 440, 441, 442, 443, 444, 445, 446, 447, 448, 449, 450, 451, 452, 453, 454, 455, 456, 457, 458, 459, 460, 461, 462, 463, 464, 465, 466, 467, 468, 469, 470, 471, 472, 473, 474, 475, 476, 477, 478, 479, 480, 481, 482, 483, 484, 485, 486, 487, 488, 489, 490, 491, 492, 493, 494, 495, 496, 497, 498, 499, 500, 501, 502, 503, 504, 505, 506, 507, 508, 509, 510, 511, 512, 513, 514, 515, 516, 517, 518, 519, 520, 521, 522, 523, 524, 525, 526, 527, 528, 529, 530, 531, 532, 533, 534, 535, 536, 537, 538, 539, 540, 541, 542, 543, 544, 545, 546, 547, 548, 549, 550, 551, 552, 553, 554, 555, 556, 557, 558, 559, 560, 561, 562, 563, 564, 565, 566, 567, 568, 569, 570, 571, 572, 573, 574, 575, 576, 577, 578, 579, 580, 581, 582, 583, 584, 585, 586, 587, 588, 589, 590, 591, 592, 593, 594, 595, 596, 597, 598, 599, and 600 nucleotides. The length of the polyadenylation signal sequence region for the viral genome may be 4-10, 10-20, 10-50, 20-30, 30-40, 40-50, 50-60, 50-100, 60-70, 70-80, 80-90, 90-100, 100-110, 100-150, 110-120, 120-130, 130-140, 140-150, 150-160, 150-200, 160-170, 170-180, 180-190, 190-200, 200-210, 200-250, 210-220, 220-230, 230-240, 240-250, 250-260, 250-300, 260-270, 270-280, 280-290, 290-300, 300-310, 300-350, 310-320, 320-330, 330-340, 340-350, 350-360, 350-400, 360-370, 370-380, 380-390, 390-400, 400-410, 400-450, 410-420, 420-430, 430-440, 440-450, 450-460, 450-500, 460-470, 470-480, 480-490, 490-500, 500-510, 500-550, 510-520, 520-530, 530-540, 540-550, 550-560, 550-600, 560-570, 570-580, 580-590, and 590-600 nucleotides. As a non-limiting example, the viral genome comprises a polyadenylation signal sequence region that is about 127 nucleotides in length. As a non-limiting example, the viral genome comprises a polyadenylation signal sequence region that is about 225 nucleotides in length.

[0675] As a non-limiting example, the viral genome comprises a polyadenylation signal sequence region that is about 476 nucleotides in length. As a non-limiting example, the viral genome comprises a polyadenylation signal sequence region that is about 477 nucleotides in length.

[0676] In one embodiment, the AAV particle viral genome comprises at least one polyadenylation (polyA) signal sequence region. Non-limiting examples of polyA signal sequence regions are described in Table 17.

TABLE 17
PolyA Signal Sequence Regions

| Sequence Region Name | SEQ ID NO |
|---|---|
| PolyA1 | 1410 |
| PolyA2 | 1411 |
| PolyA3 | 1412 |
| PolyA4 | 1413 |

[0677] In one embodiment, the AAV particle viral genome comprises one polyA signal sequence region.

[0678] In one embodiment, the polyA signal sequence regions is the PolyA1 sequence region. In one embodiment, the polyA signal sequence regions is the PolyA2 sequence region. In one embodiment, the polyA signal sequence regions is the PolyA3 sequence region. In one embodiment, the polyA signal sequence regions is the PolyA4 sequence region.

[0679] In one embodiment, the AAV particle viral genome comprises more than one polyA signal sequence region.

[0680] Non-limiting examples of ITR to ITR sequences of AAV particles comprising a viral genome with a payload region comprising a modulatory polynucleotide sequence are described in Table 18.

TABLE 18
ITR to ITR Sequences of AAV Particles comprising
Modulatory Polynucleotides

| ITR to ITR | ITR to ITR | Modulatory Polynucleotide |
|---|---|---|
| Construct Name | SEQ ID NO | SEQ ID NO |
| VOYSOD1 | 1414 | 1326 |
| VOYSOD2 | 1415 | 1326 |
| VOYSOD3 | 1416 | 1317 |
| VOYSOD4 | 1417 | 1317 |
| VOYSOD5 | 2240 | 1326 |
| VOYSOD6 | 2241 | 1326 |

[0681] In one embodiment, the AAV particle comprises a viral genome which comprises a sequence which has a percent identity to any of SEQ ID NOs: 1414-1417, 2240, and 2241. The viral genome may have 1%, 2%, 3%, 4%, 5%, 6%, 7%, 8%, 9%, 10%, 15%, 20%, 25%, 30%, 35%, 40%, 45%, 50%, 55%, 60%, 65%, 70%, 75%, 80%, 85%, 90%, 95%, 99% or 100% identity to any of SEQ ID NOs: 1414-1417, 2240, and 2241. The viral genome may have 1-10%, 10-20%, 30-40%, 50-60%, 50-70%, 50-80%, 50-90%, 50-99%, 50-100%, 60-70%, 60-80%, 60-90%, 60-99%, 60-100%, 70-80%, 70-90%, 70-99%, 70-100%, 80-85%, 80-90%, 80-95%, 80-99%, 80-100%, 90-95%, 90-99%, or 90-100% to any of SEQ ID NOs: 1414-1417, 2240, and 2241. As a non-limiting example, the viral genome comprises a sequence which as 80% identity to any of SEQ ID NO: 1414-1417, 2240, and 2241. As another non-limiting example, the viral genome comprises a sequence which as 85% identity to any of SEQ ID NO: 1414-1417, 2240, and 2241. As another non-limiting example, the viral genome comprises a sequence which as 90% identity to any of SEQ ID NO: 1414-1417, 2240, and 2241. As another non-limiting example, the viral genome comprises a sequence which as 95% identity to any of SEQ ID NO: 1414-1417, 2240, and 2241. As another non-limiting example, the viral genome comprises a sequence which as 99% identity to any of SEQ ID NO: 1414-1417, 2240, and 2241.

[0682] In one embodiment, the AAV particle viral genome comprises at least one inverted terminal repeat (ITR) sequence region, at least one multiple cloning site (MCS) sequence region, at least one exon sequence region, at least one intron sequence region, at least one modulatory polynucleotide region, and at least one polyadenylation signal sequence region.

[0683] In one embodiment, the AAV particle viral genome comprises a 5′ inverted terminal repeat (ITR) sequence region and a 3′ ITR sequence region, two multiple cloning site (MCS) sequence regions, an exon sequence region, two intron sequence regions, a modulatory polynucleotide region, and a polyadenylation signal sequence region.

[0684] In one embodiment, the AAV particle viral genome comprises a 5′ inverted terminal repeat (ITR) sequence region and a 3′ ITR sequence region, two MCS sequence regions, an exon sequence regions (human beta globin (hbglobin) exon 3 or fragments thereof), two intron sequence regions (ie1 intron 1 and hbglobin intron 2 or fragments thereof), a modulatory polynucleotide region, and a rabbit betaglobin polyadenylation signal sequence region. A non-limiting example of an ITR to ITR sequence for use in the AAV particles of the present invention having all of the sequence modules above are described in Table 19. In Table 19, the sequence identifier or sequence of the sequence region (Region SEQ ID NO) and the length of the sequence region (Region length) are described as well as the name and sequence identifier of the ITR to ITR sequence (e.g., VOYSOD1 (SEQ ID NO: 1414)).

TABLE 19
Sequence Regions in ITR to ITR Sequences

| | VOYSOD1 (SEQ | | VOYSOD3 (SEQ | |
|---|---|---|---|---|
| | ID NO: 1414) | | ID NO: 1416) | |
| | Region | | Region | |
| Sequence | SEQ ID | Region | SEQ ID | Region |
| Regions | NO | length | NO | length |
| 5′ ITR | 1371 | 105 | 1371 | 105 |
| MCS | TCGAG | 5 | TCGAG | 5 |
| IE1 intron1 | 1407 | 32 | 1407 | 32 |
| hbglobin | 1408 | 347 | 1408 | 347 |
| intron2 | | | | |
| hbglobin | 1405 | 53 | 1405 | 53 |
| exon3 | | | | |
| Modulatory | 1328 | 260 | 1317 | 158 |
| Polynucleotide | | | | |
| MCS | TCGAG | 5 | TCGAG | 5 |
| Rabbit | 1410 | 127 | 1410 | 127 |
| betaglobin | | | | |
| polyA | | | | |
| 3′ ITR | 1373 | 130 | 1373 | 130 |

[0685] In one embodiment, the AAV particle viral genome comprises SEQ ID NO: 1414 (VOYSOD1) which comprises a 5′ inverted terminal repeat (ITR) sequence region and a 3′ ITR sequence region, two multiple cloning site (MCS) sequence regions, an exon sequence region, two intron sequence regions (ie1 intron 1 and hbglobin intron 2), a modulatory polynucleotide region, and a rabbit globin polyadenylation signal sequence region.

[0686] In one embodiment, the AAV particle viral genome comprises SEQ ID NO: 1416 (VOYSOD3) which comprises a 5′ inverted terminal repeat (ITR) sequence region and a 3′ ITR sequence region, two multiple cloning site (MCS) sequence regions, an exon sequence region, two intron sequence regions (ie1 intron 1 and hbglobin intron 2), a modulatory polynucleotide region, and a rabbit globin polyadenylation signal sequence region.

[0687] In one embodiment, the AAV particle viral genome comprises a 5′ inverted terminal repeat (ITR) sequence region and a 3′ ITR sequence region, a multiple cloning site (MCS) sequence region, two exon sequence regions, two intron sequence regions, a modulatory polynucleotide region, and a polyadenylation signal sequence region.

[0688] In one embodiment, the AAV particle viral genome comprises a 5′ inverted terminal repeat (ITR) sequence region and a 3′ ITR sequence region, a MCS sequence region, two exon sequence regions (ie1 exon 1, human beta globin (hbglobin) exon 3 or fragments thereof), two intron sequence regions (ie1 intron 1 and hbglobin intron 2 or fragments thereof), a modulatory polynucleotide region, and a rabbit betaglobin polyadenylation signal sequence region. A non-limiting example of an ITR to ITR sequence for use in the AAV particles of the present invention having all of the sequence modules above are described in Table 20. In Table 20, the sequence identifier or sequence of the sequence region (Region SEQ ID NO) and the length of the sequence region (Region length) are described as well as the name and sequence identifier of the ITR to ITR sequence (e.g., VOYSOD2 (SEQ ID NO: 1415)).

TABLE 20
Sequence Regions in ITR to ITR Sequences

| | VOYSOD2 (SEQ | | VOYSOD4 (SEQ | |
|---|---|---|---|---|
| | ID NO: 1415) | | ID NO: 1417) | |
| | Region | | Region | |
| Sequence | SEQ ID | Region | SEQ ID | Region |
| Regions | NO | length | NO | length |
| 5′ ITR | 1371 | 105 | 1371 | 105 |
| Ie1 exon1 | 1404 | 134 | 1404 | 134 |
| Ie1 intron1 | 1407 | 32 | 1407 | 32 |
| hbglobin | 1408 | 347 | 1408 | 347 |
| intron2 | | | | |
| hbglobin | 1405 | 53 | 1405 | 53 |
| exon3 | | | | |
| Modulatory | 1328 | 260 | 1317 | 158 |
| Polynucleotide | | | | |
| MCS | TCGAG | 5 | TCGAG | 5 |
| Rabbit | 1410 | 127 | 1410 | 127 |
| betaglobin | | | | |
| polyA | | | | |
| 3′ ITR | 1373 | 130 | 1373 | 130 |

[0689] In one embodiment, the AAV particle viral genome comprises SEQ ID NO: 1415 (VOYSOD2) which comprises a 5′ inverted terminal repeat (ITR) sequence region and a 3′ ITR sequence region, a multiple cloning site (MCS) sequence region, two exon sequence regions, two intron sequence regions (ie1 intron 1 and hbglobin intron 2), a modulatory polynucleotide region, and a rabbit globin polyadenylation signal sequence region.

[0690] In one embodiment, the AAV particle viral genome comprises SEQ ID NO: 1416 (VOYSOD4) which comprises a 5′ inverted terminal repeat (ITR) sequence region and a 3′ ITR sequence region, a multiple cloning site (MCS) sequence region, two exon sequence regions, two intron sequence regions (ie1 intron 1 and hbglobin intron 2), a modulatory polynucleotide region, and a rabbit globin polyadenylation signal sequence region.

[0691] AAV particles may be modified to enhance the efficiency of delivery. Such modified AAV particles comprising the nucleic acid sequence encoding the siRNA molecules of the present invention can be packaged efficiently and can be used to successfully infect the target cells at high frequency and with minimal toxicity.

[0692] In some embodiments, the AAV particle comprising a nucleic acid sequence encoding the siRNA molecules of the present invention may be a human serotype AAV particle. Such human AAV particle may be derived from any known serotype, e.g., from any one of serotypes AAV1-AAV11. As non-limiting examples, AAV particles may be vectors comprising an AAV1-derived genome in an AAV1-derived capsid; vectors comprising an AAV2-derived genome in an AAV2-derived capsid; vectors comprising an AAV4-derived genome in an AAV4 derived capsid; vectors comprising an AAV6-derived genome in an AAV6 derived capsid or vectors comprising an AAV9-derived genome in an AAV9 derived capsid.

[0693] In other embodiments, the AAV particle comprising a nucleic acid sequence for encoding siRNA molecules of the present invention may be a pseudotyped hybrid or chimeric AAV particle which contains sequences and/or components originating from at least two different AAV serotypes. Pseudotyped AAV particles may be vectors comprising an AAV genome derived from one AAV serotype and a capsid protein derived at least in part from a different AAV serotype. As non-limiting examples, such pseudotyped AAV particles may be vectors comprising an AAV2-derived genome in an AAV1-derived capsid; or vectors comprising an AAV2-derived genome in an AAV6-derived capsid; or vectors comprising an AAV2-derived genome in an AAV4-derived capsid; or an AAV2-derived genome in an AAV9-derived capsid. In like fashion, the present invention contemplates any hybrid or chimeric AAV particle.

[0694] In other embodiments, AAV particles comprising a nucleic acid sequence encoding the siRNA molecules of the present invention may be used to deliver siRNA molecules to the central nervous system (e.g., U.S. Pat. No. 6,180,613; the contents of which is herein incorporated by reference in its entirety).

[0695] In some aspects, the AAV particles comprising a nucleic acid sequence encoding the siRNA molecules of the present invention may further comprise a modified capsid including peptides from non-viral origin. In other aspects, the AAV particle may contain a CNS specific chimeric capsid to facilitate the delivery of encoded siRNA duplexes into the brain and the spinal cord. For example, an alignment of cap nucleotide sequences from AAV variants exhibiting CNS tropism may be constructed to identify variable region (VR) sequence and structure.

[0696] Viral Production

[0697] The present disclosure provides a method for the generation of parvoviral particles, e.g. AAV particles, by viral genome replication in a viral replication cell comprising contacting the viral replication cell with an AAV polynucleotide or AAV genome.

[0698] The present disclosure provides a method for producing an AAV particle having enhanced (increased, improved) transduction efficiency comprising the steps of: 1) co-transfecting competent bacterial cells with a bacmid vector and either a viral construct vector and/or AAV payload construct vector, 2) isolating the resultant viral construct expression vector and AAV payload construct expression vector and separately transfecting viral replication cells, 3) isolating and purifying resultant payload and viral construct particles comprising viral construct expression vector or AAV payload construct expression vector, 4) co-infecting a viral replication cell with both the AAV payload and viral construct particles comprising viral construct expression vector or AAV payload construct expression vector, 5) harvesting and purifying the viral particle comprising a parvoviral genome.

[0699] In one embodiment, the present invention provides a method for producing an AAV particle comprising the steps of 1) simultaneously co-transfecting mammalian cells, such as, but not limited to HEK293 cells, with a payload region, a construct expressing rep and cap genes and a helper construct, 2) harvesting and purifying the AAV particle comprising a viral genome.

[0700] Cells

[0701] The present disclosure provides a cell comprising an AAV polynucleotide and/or AAV genome. Viral production disclosed herein describes processes and methods for producing AAV particles that contact a target cell to deliver a payload construct, e.g. a recombinant viral construct, which comprises a polynucleotide sequence encoding a payload molecule.

[0702] In one embodiment, the AAV particles may be produced in a viral replication cell that comprises an insect cell.

[0703] Growing conditions for insect cells in culture, and production of heterologous products in insect cells in culture are well-known in the art, see U.S. Pat. No. 6,204,059, the contents of which are herein incorporated by reference in their entirety.

[0704] Any insect cell which allows for replication of parvovirus and which can be maintained in culture can be used in accordance with the present invention. Cell lines may be used from Spodoptera frugiperda, including, but not limited to the Sf9 or Sf21 cell lines, Drosophila cell lines, or mosquito cell lines, such as Aedes albopictus derived cell lines. Use of insect cells for expression of heterologous proteins is well documented, as are methods of introducing nucleic acids, such as vectors, e.g., insect-cell compatible vectors, into such cells and methods of maintaining such cells in culture. See, for example, Methods in Molecular Biology, ed. Richard, Humana Press, NJ (1995); O'Reilly et al., Baculovirus Expression Vectors, A Laboratory Manual, Oxford Univ. Press (1994); Samulski et al., J. Vir. 63:3822-8 (1989); Kajigaya et al., Proc. Nat'l. Acad. Sci. USA 88: 4646-50 (1991); Ruffing et al., J. Vir. 66:6922-30 (1992); Kimbauer et al., Vir. 219:37-44 (1996); Zhao et al., Vir. 272:382-93 (2000); and Samulski et al., U.S. Pat. No. 6,204,059, the contents of each of which is herein incorporated by reference in its entirety.

[0705] The viral replication cell may be selected from any biological organism, including prokaryotic (e.g., bacterial) cells, and eukaryotic cells, including, insect cells, yeast cells and mammalian cells. Viral replication cells may comprise mammalian cells such as A549, WEH1, 3T3, 10T1/2, BHK, MDCK, COS 1, COS 7, BSC 1, BSC 40, BMT 10, VERO. W138, HeLa, HEK293, Saos, C2C12, L cells, HT1080, HepG2 and primary fibroblast, hepatocyte and myoblast cells derived from mammals.

[0706] Viral replication cells comprise cells derived from mammalian species including, but not limited to, human, monkey, mouse, rat, rabbit, and hamster or cell type, including but not limited to fibroblast, hepatocyte, tumor cell, cell line transformed cell, etc.

[0707] Small Scale Production of AAV Particles

[0708] Viral production disclosed herein describes processes and methods for producing AAV particles that contact a target cell to deliver a payload, e.g. a recombinant viral construct, which comprises a polynucleotide sequence encoding a payload.

[0709] In one embodiment, the AAV particles may be produced in a viral replication cell that comprises a mammalian cell.

[0710] Viral replication cells commonly used for production of recombinant AAV particles include, but are not limited to 293 cells, COS cells, HeLa cells, KB cells, and other mammalian cell lines as described in U.S. Pat. Nos. 6,156,303, 5,387,484, 5,741,683, 5,691,176, and 5,688,676; U.S. patent application 2002/0081721, and International Patent Applications WO 00/47757, WO 00/24916, and WO 96/17947, the contents of each of which are herein incorporated by reference in their entireties.

[0711] In one embodiment, AAV particles are produced in mammalian-cells wherein all three VP proteins are expressed at a stoichiometry approaching 1:1:10 (VP1:VP2:VP3). The regulatory mechanisms that allow this controlled level of expression include the production of two mRNAs, one for VP1, and the other for VP2 and VP3, produced by differential splicing.

[0712] In another embodiment, AAV particles are produced in mammalian cells using a triple transfection method wherein a payload construct, parvoviral Rep and parvoviral Cap and a helper construct are comprised within three different constructs. The triple transfection method of the three components of AAV particle production may be utilized to produce small lots of virus for assays including transduction efficiency, target tissue (tropism) evaluation, and stability.

[0713] Baculovirus

[0714] Particle production disclosed herein describes processes and methods for producing AAV particles that contact a target cell to deliver a payload construct which comprises a polynucleotide sequence encoding a payload.

[0715] Briefly, the viral construct vector and the AAV payload construct vector are each incorporated by a transposon donor/acceptor system into a bacmid, also known as a baculovirus plasmid, by standard molecular biology techniques known and performed by a person skilled in the art. Transfection of separate viral replication cell populations produces two baculoviruses, one that comprises the viral construct expression vector, and another that comprises the AAV payload construct expression vector. The two baculoviruses may be used to infect a single viral replication cell population for production of AAV particles.

[0716] Baculovirus expression vectors for producing viral particles in insect cells, including but not limited to Spodoptera frugiperda (Sf9) cells, provide high titers of viral particle product. Recombinant baculovirus encoding the viral construct expression vector and AAV payload construct expression vector initiates a productive infection of viral replicating cells. Infectious baculovirus particles released from the primary infection secondarily infect additional cells in the culture, exponentially infecting the entire cell culture population in a number of infection cycles that is a function of the initial multiplicity of infection, see Urabe, M. et al., J Virol. 2006 February; 80 (4):1874-85, the contents of which are herein incorporated by reference in their entirety.

[0717] Production of AAV particles with baculovirus in an insect cell system may address known baculovirus genetic and physical instability. In one embodiment, the production system addresses baculovirus instability over multiple passages by utilizing a titerless infected-cells preservation and scale-up system. Small scale seed cultures of viral producing cells are transfected with viral expression constructs encoding the structural, non-structural, components of the viral particle. Baculovirus-infected viral producing cells are harvested into aliquots that may be cryopreserved in liquid nitrogen; the aliquots retain viability and infectivity for infection of large scale viral producing cell culture Wasilko D J et al., Protein Expr Purif. 2009 June; 65(2):122-32, the contents of which are herein incorporated by reference in their entirety.

[0718] A genetically stable baculovirus may be used to produce source of the one or more of the components for producing AAV particles in invertebrate cells. In one embodiment, defective baculovirus expression vectors may be maintained episomally in insect cells. In such an embodiment the bacmid vector is engineered with replication control elements, including but not limited to promoters, enhancers, and/or cell-cycle regulated replication elements.

[0719] In one embodiment, baculoviruses may be engineered with a (non-) selectable marker for recombination into the chitinase/cathepsin locus. The chia/v-cath locus is non-essential for propagating baculovirus in tissue culture, and the V-cath (EC 3.4.22.50) is a cysteine endoprotease that is most active on Arg-Arg dipeptide containing substrates. The Arg-Arg dipeptide is present in densovirus and parvovirus capsid structural proteins but infrequently occurs in dependovirus VP1.

[0720] In one embodiment, stable viral replication cells permissive for baculovirus infection are engineered with at least one stable integrated copy of any of the elements necessary for AAV replication and viral particle production including, but not limited to, the entire AAV genome, Rep and Cap genes, Rep genes, Cap genes, each Rep protein as a separate transcription cassette, each VP protein as a separate transcription cassette, the AAP (assembly activation protein), or at least one of the baculovirus helper genes with native or non-native promoters.

[0721] Large-Scale Production

[0722] In some embodiments, AAV particle production may be modified to increase the scale of production. Large scale viral production methods according to the present disclosure may include any of those taught in U.S. Pat. Nos. 5,756,283, 6,258,595, 6,261,551, 6,270,996, 6,281,010, 6,365,394, 6,475,769, 6,482,634, 6,485,966, 6,943,019, 6,953,690, 7,022,519, 7,238,526, 7,291,498 and 7,491,508 or International Publication Nos. WO1996039530, WO1998010088, WO1999014354, WO1999015685, WO1999047691, WO2000055342, WO2000075353 and WO2001023597, the contents of each of which are herein incorporated by reference in their entirety. Methods of increasing viral particle production scale typically comprise increasing the number of viral replication cells. In some embodiments, viral replication cells comprise adherent cells. To increase the scale of viral particle production by adherent viral replication cells, larger cell culture surfaces are required. In some cases, large-scale production methods comprise the use of roller bottles to increase cell culture surfaces. Other cell culture substrates with increased surface areas are known in the art. Examples of additional adherent cell culture products with increased surface areas include, but are not limited to CELLSTACK®, CELLCUBE® (Corning Corp., Corning, NY) and NUNC™ CELL FACTORY™ (Thermo Scientific, Waltham, MA.) In some cases, large-scale adherent cell surfaces may comprise from about 1,000 cm² to about 100,000 cm². In some cases, large-scale adherent cell cultures may comprise from about 10⁷ to about 10⁹ cells, from about 10⁸ to about 10¹⁰ cells, from about 10⁹ to about 10¹² cells or at least 10¹² cells. In some cases, large-scale adherent cultures may produce from about 10⁹ to about 10¹², from about 10¹⁰ to about 10¹³, from about 10¹¹ to about 10¹⁴, from about 10¹² to about 10¹⁵ or at least 10¹⁵ viral particles.

[0723] In some embodiments, large-scale viral production methods of the present disclosure may comprise the use of suspension cell cultures. Suspension cell culture allows for significantly increased numbers of cells. Typically, the number of adherent cells that can be grown on about 10-50 cm² of surface area can be grown in about 1 cm³ volume in suspension.

[0724] Transfection of replication cells in large-scale culture formats may be carried out according to any methods known in the art. For large-scale adherent cell cultures, transfection methods may include, but are not limited to the use of inorganic compounds (e.g. calcium phosphate), organic compounds [e.g. polyethyleneimine (PEI)] or the use of non-chemical methods (e.g. electroporation.) With cells grown in suspension, transfection methods may include, but are not limited to the use of calcium phosphate and the use of PEI. In some cases, transfection of large scale suspension cultures may be carried out according to the section entitled “Transfection Procedure” described in Feng, L. et al., 2008. Biotechnol Appl. Biochem. 50:121-32, the contents of which are herein incorporated by reference in their entirety. According to such embodiments, PEI-DNA complexes may be formed for introduction of plasmids to be transfected. In some cases, cells being transfected with PEI-DNA complexes may be ‘shocked’ prior to transfection. This comprises lowering cell culture temperatures to 4° C. for a period of about 1 hour. In some cases, cell cultures may be shocked for a period of from about 10 minutes to about 5 hours. In some cases, cell cultures may be shocked at a temperature of from about 0° C. to about 20° C.

[0725] In some cases, transfections may include one or more vectors for expression of an RNA effector molecule to reduce expression of nucleic acids from one or more AAV payload construct. Such methods may enhance the production of viral particles by reducing cellular resources wasted on expressing payload constructs. In some cases, such methods may be carried according to those taught in US Publication No. US2014/0099666, the contents of which are herein incorporated by reference in their entirety.

[0726] Bioreactors

[0727] In some embodiments, cell culture bioreactors may be used for large scale viral production. In some cases, bioreactors comprise stirred tank reactors. Such reactors generally comprise a vessel, typically cylindrical in shape, with a stirrer (e.g. impeller.) In some embodiments, such bioreactor vessels may be placed within a water jacket to control vessel temperature and/or to minimize effects from ambient temperature changes. Bioreactor vessel volume may range in size from about 500 ml to about 2 L, from about 1 L to about 5 L, from about 2.5 L to about 20 L, from about 10 L to about 50 L, from about 25 L to about 100 L, from about 75 L to about 500 L, from about 250 L to about 2,000 L, from about 1,000 L to about 10,000 L, from about 5,000 L to about 50,000 L or at least 50,000 L. Vessel bottoms may be rounded or flat. In some cases, animal cell cultures may be maintained in bioreactors with rounded vessel bottoms.

[0728] In some cases, bioreactor vessels may be warmed through the use of a thermocirculator. Thermocirculators pump heated water around water jackets. In some cases, heated water may be pumped through pipes (e.g. coiled pipes) that are present within bioreactor vessels. In some cases, warm air may be circulated around bioreactors, including, but not limited to air space directly above culture medium. Additionally, pH and C02 levels may be maintained to optimize cell viability.

[0729] In some cases, bioreactors may comprise hollow-fiber reactors. Hollow-fiber bioreactors may support the culture of both anchorage dependent and anchorage independent cells. Further bioreactors may include, but are not limited to packed-bed or fixed-bed bioreactors. Such bioreactors may comprise vessels with glass beads for adherent cell attachment. Further packed-bed reactors may comprise ceramic beads.

[0730] In some cases, viral particles are produced through the use of a disposable bioreactor. In some embodiments, such bioreactors may include WAVE™ disposable bioreactors.

[0731] In some embodiments, AAV particle production in animal cell bioreactor cultures may be carried out according to the methods taught in U.S. Pat. Nos. 5,064,764, 6,194,191, 6,566,118, 8,137,948 or US Patent Application No. US2011/0229971, the contents of each of which are herein incorporated by reference in their entirety.

[0732] Cell Lysis

[0733] Cells of the invention, including, but not limited to viral production cells, may be subjected to cell lysis according to any methods known in the art. Cell lysis may be carried out to obtain one or more agents (e.g. viral particles) present within any cells of the invention. In some embodiments, cell lysis may be carried out according to any of the methods listed in U.S. Pat. Nos. 7,326,555, 7,579,181, 7,048,920, 6,410,300, 6,436,394, 7,732,129, 7,510,875, 7,445,930, 6,726,907, 6,194,191, 7,125,706, 6,995,006, 6,676,935, 7,968,333, 5,756,283, 6,258,595, 6,261,551, 6,270,996, 6,281,010, 6,365,394, 6,475,769, 6,482,634, 6,485,966, 6,943,019, 6,953,690, 7,022,519, 7,238,526, 7,291,498 and 7,491,508 or International Publication Nos. WO1996039530, WO1998010088, WO1999014354, WO1999015685, WO1999047691, WO2000055342, WO2000075353 and WO2001023597, the contents of each of which are herein incorporated by reference in their entirety. Cell lysis methods may be chemical or mechanical. Chemical cell lysis typically comprises contacting one or more cells with one or more lysis agent. Mechanical lysis typically comprises subjecting one or more cells to one or more lysis condition and/or one or more lysis force.

[0734] In some embodiments, chemical lysis may be used to lyse cells. As used herein, the term “lysis agent” refers to any agent that may aid in the disruption of a cell. In some cases, lysis agents are introduced in solutions, termed lysis solutions or lysis buffers. As used herein, the term “lysis solution” refers to a solution (typically aqueous) comprising one or more lysis agent. In addition to lysis agents, lysis solutions may include one or more buffering agents, solubilizing agents, surfactants, preservatives, cryoprotectants, enzymes, enzyme inhibitors and/or chelators. Lysis buffers are lysis solutions comprising one or more buffering agent. Additional components of lysis solutions may include one or more solubilizing agent. As used herein, the term “solubilizing agent” refers to a compound that enhances the solubility of one or more components of a solution and/or the solubility of one or more entities to which solutions are applied. In some cases, solubilizing agents enhance protein solubility. In some cases, solubilizing agents are selected based on their ability to enhance protein solubility while maintaining protein conformation and/or activity.

[0735] Exemplary lysis agents may include any of those described in U.S. Pat. Nos. 8,685,734, 7,901,921, 7,732,129, 7,223,585, 7,125,706, 8,236,495, 8,110,351, 7,419,956, 7,300,797, 6,699,706 and 6,143,567, the contents of each of which are herein incorporated by reference in their entirety. In some cases, lysis agents may be selected from lysis salts, amphoteric agents, cationic agents, ionic detergents and non-ionic detergents. Lysis salts may include, but are not limited to sodium chloride (NaCl) and potassium chloride (KCl.) Further lysis salts may include any of those described in U.S. Pat. Nos. 8,614,101, 7,326,555, 7,579,181, 7,048,920, 6,410,300, 6,436,394, 7,732,129, 7,510,875, 7,445,930, 6,726,907, 6,194,191, 7,125,706, 6,995,006, 6,676,935 and 7,968,333, the contents of each of which are herein incorporated by reference in their entirety. Concentrations of salts may be increased or decreased to obtain an effective concentration for rupture of cell membranes. Amphoteric agents, as referred to herein, are compounds capable of reacting as an acid or a base. Amphoteric agents may include, but are not limited to lysophosphatidylcholine, 3-((3-Cholamidopropyl) dimethylammonium)-1-propanesulfonate (CHAPS), ZWITTERGENT® and the like. Cationic agents may include, but are not limited to cetyltrimethylammonium bromide (C (16) TAB) and Benzalkonium chloride. Lysis agents comprising detergents may include ionic detergents or non-ionic detergents. Detergents may function to break apart or dissolve cell structures including, but not limited to cell membranes, cell walls, lipids, carbohydrates, lipoproteins and glycoproteins. Exemplary ionic detergents include any of those taught in U.S. Pat. Nos. 7,625,570 and 6,593,123 or US Publication No. US2014/0087361, the contents of each of which are herein incorporated by reference in their entirety. Some ionic detergents may include, but are not limited to sodium dodecyl sulfate (SDS), cholate and deoxycholate. In some cases, ionic detergents may be included in lysis solutions as a solubilizing agent. Non-ionic detergents may include, but are not limited to octylglucoside, digitonin, lubrol, C12E8, TWEEN®-20, TWEEN®-80, Triton X-100 and Noniodet P-40. Non-ionic detergents are typically weaker lysis agents, but may be included as solubilizing agents for solubilizing cellular and/or viral proteins. Further lysis agents may include enzymes and urea. In some cases, one or more lysis agents may be combined in a lysis solution in order to enhance one or more of cell lysis and protein solubility. In some cases, enzyme inhibitors may be included in lysis solutions in order to prevent proteolysis that may be triggered by cell membrane disruption.

[0736] In some embodiments, mechanical cell lysis is carried out. Mechanical cell lysis methods may include the use of one or more lysis condition and/or one or more lysis force. As used herein, the term “lysis condition” refers to a state or circumstance that promotes cellular disruption. Lysis conditions may comprise certain temperatures, pressures, osmotic purity, salinity and the like. In some cases, lysis conditions comprise increased or decreased temperatures. According to some embodiments, lysis conditions comprise changes in temperature to promote cellular disruption. Cell lysis carried out according to such embodiments may include freeze-thaw lysis. As used herein, the term “freeze-thaw lysis” refers to cellular lysis in which a cell solution is subjected to one or more freeze-thaw cycle. According to freeze-thaw lysis methods, cells in solution are frozen to induce a mechanical disruption of cellular membranes caused by the formation and expansion of ice crystals. Cell solutions used according freeze-thaw lysis methods, may further comprise one or more lysis agents, solubilizing agents, buffering agents, cryoprotectants, surfactants, preservatives, enzymes, enzyme inhibitors and/or chelators. Once cell solutions subjected to freezing are thawed, such components may enhance the recovery of desired cellular products. In some cases, one or more cryoprotectants are included in cell solutions undergoing freeze-thaw lysis. As used herein, the term “cryoprotectant” refers to an agent used to protect one or more substance from damage due to freezing. Cryoprotectants may include any of those taught in US Publication No. US2013/0323302 or U.S. Pat. Nos. 6,503,888, 6,180,613, 7,888,096, 7,091,030, the contents of each of which are herein incorporated by reference in their entirety. In some cases, cryoprotectants may include, but are not limited to dimethyl sulfoxide, 1,2-propanediol, 2,3-butanediol, formamide, glycerol, ethylene glycol, 1,3-propanediol and n-dimethyl formamide, polyvinylpyrrolidone, hydroxyethyl starch, agarose, dextrans, inositol, glucose, hydroxyethylstarch, lactose, sorbitol, methyl glucose, sucrose and urea. In some embodiments, freeze-thaw lysis may be carried out according to any of the methods described in U.S. Pat. No. 7,704,721, the contents of which are herein incorporated by reference in their entirety.

[0737] As used herein, the term “lysis force” refers to a physical activity used to disrupt a cell. Lysis forces may include, but are not limited to mechanical forces, sonic forces, gravitational forces, optical forces, electrical forces and the like. Cell lysis carried out by mechanical force is referred to herein as “mechanical lysis.” Mechanical forces that may be used according to mechanical lysis may include high shear fluid forces. According to such methods of mechanical lysis, a microfluidizer may be used. Microfluidizers typically comprise an inlet reservoir where cell solutions may be applied. Cell solutions may then be pumped into an interaction chamber via a pump (e.g. high-pressure pump) at high speed and/or pressure to produce shear fluid forces. Resulting lysates may then be collected in one or more output reservoir. Pump speed and/or pressure may be adjusted to modulate cell lysis and enhance recovery of products (e.g. viral particles.) Other mechanical lysis methods may include physical disruption of cells by scraping.

[0738] Cell lysis methods may be selected based on the cell culture format of cells to be lysed. For example, with adherent cell cultures, some chemical and mechanical lysis methods may be used. Such mechanical lysis methods may include freeze-thaw lysis or scraping. In another example, chemical lysis of adherent cell cultures may be carried out through incubation with lysis solutions comprising surfactant, such as Triton-X-100. In some cases, cell lysates generated from adherent cell cultures may be treated with one more nuclease to lower the viscosity of the lysates caused by liberated DNA.

[0739] In one embodiment, a method for harvesting AAV particles without lysis may be used for efficient and scalable AAV particle production. In a non-limiting example, AAV particles may be produced by culturing an AAV particle lacking a heparin binding site, thereby allowing the AAV particle to pass into the supernatant, in a cell culture, collecting supernatant from the culture; and isolating the AAV particle from the supernatant, as described in US Patent Application 20090275107, the contents of which are incorporated herein by reference in their entirety.

[0740] Clarification

[0741] Cell lysates comprising viral particles may be subjected to clarification. Clarification refers to initial steps taken in purification of viral particles from cell lysates. Clarification serves to prepare lysates for further purification by removing larger, insoluble debris. Clarification steps may include, but are not limited to centrifugation and filtration. During clarification, centrifugation may be carried out at low speeds to remove larger debris only. Similarly, filtration may be carried out using filters with larger pore sizes so that only larger debris is removed. In some cases, tangential flow filtration may be used during clarification. Objectives of viral clarification include high throughput processing of cell lysates and to optimize ultimate viral recovery. Advantages of including a clarification step include scalability for processing of larger volumes of lysate. In some embodiments, clarification may be carried out according to any of the methods presented in U.S. Pat. Nos. 8,524,446, 5,756,283, 6,258,595, 6,261,551, 6,270,996, 6,281,010, 6,365,394, 6,475,769, 6,482,634, 6,485,966, 6,943,019, 6,953,690, 7,022,519, 7,238,526, 7,291,498, 7,491,508, US Publication Nos. US2013/0045186, US2011/0263027, US2011/0151434, US2003/0138772, and International Publication Nos. WO2002012455, WO1996039530, WO1998010088, WO1999014354, WO1999015685, WO1999047691, WO2000055342, WO2000075353 and WO2001023597, the contents of each of which are herein incorporated by reference in their entirety.

[0742] Methods of cell lysate clarification by filtration are well understood in the art and may be carried out according to a variety of available methods including, but not limited to passive filtration and flow filtration. Filters used may comprise a variety of materials and pore sizes. For example, cell lysate filters may comprise pore sizes of from about 1 μM to about 5 μM, from about 0.5 μM to about 2 μM, from about 0.1 μM to about 1 μM, from about 0.05 μM to about 0.05 μM and from about 0.001 μM to about 0.1 μM. Exemplary pore sizes for cell lysate filters may include, but are not limited to, 2.0, 1.9, 1.8, 1.7, 1.6, 1.5, 1.4, 1.3, 1.2, 1.1, 1, 0.9, 0.8, 0.7, 0.6, 0.5, 0.4, 0.3, 0.2, 0.1, 0.95, 0.9, 0.85, 0.8, 0.75, 0.7, 0.65, 0.6, 0.55, 0.5, 0.45, 0.4, 0.35, 0.3, 0.25, 0.2, 0.15, 0.1, 0.05, 0.22, 0.21, 0.20, 0.19, 0.18, 0.17, 0.16, 0.15, 0.14, 0.13, 0.12, 0.11, 0.1, 0.09, 0.08, 0.07, 0.06, 0.05, 0.04, 0.03, 0.02, 0.01, 0.02, 0.019, 0.018, 0.017, 0.016, 0.015, 0.014, 0.013, 0.012, 0.011, 0.01, 0.009, 0.008, 0.007, 0.006, 0.005, 0.004, 0.003, 0.002, 0.001 and 0.001 μM. In one embodiment, clarification may comprise filtration through a filter with 2.0 μM pore size to remove large debris, followed by passage through a filter with 0.45 μM pore size to remove intact cells.

[0743] Filter materials may be composed of a variety of materials. Such materials may include, but are not limited to polymeric materials and metal materials (e.g. sintered metal and pored aluminum.) Exemplary materials may include, but are not limited to nylon, cellulose materials (e.g. cellulose acetate), polyvinylidene fluoride (PVDF), polyethersulfone, polyamide, polysulfone, polypropylene, and polyethylene terephthalate. In some cases, filters useful for clarification of cell lysates may include, but are not limited to ULTIPLEAT PROFILE™ filters (Pall Corporation, Port Washington, NY), SUPOR™ membrane filters (Pall Corporation, Port Washington, NY) In some cases, flow filtration may be carried out to increase filtration speed and/or effectiveness. In some cases, flow filtration may comprise vacuum filtration. According to such methods, a vacuum is created on the side of the filter opposite that of cell lysate to be filtered. In some cases, cell lysates may be passed through filters by centrifugal forces. In some cases, a pump is used to force cell lysate through clarification filters. Flow rate of cell lysate through one or more filters may be modulated by adjusting one of channel size and/or fluid pressure.

[0744] According to some embodiments, cell lysates may be clarified by centrifugation. Centrifugation may be used to pellet insoluble particles in the lysate. During clarification, centrifugation strength [expressed in terms of gravitational units (g), which represents multiples of standard gravitational force] may be lower than in subsequent purification steps. In some cases, centrifugation may be carried out on cell lysates at from about 200 g to about 800 g, from about 500 g to about 1500 g, from about 1000 g to about 5000 g, from about 1200 g to about 10000 g or from about 8000 g to about 15000 g. In some embodiments, cell lysate centrifugation is carried out at 8000 g for 15 minutes. In some cases, density gradient centrifugation may be carried out in order to partition particulates in the cell lysate by sedimentation rate. Gradients used according to methods of the present disclosure may include, but are not limited to cesium chloride gradients and iodixanol step gradients.

[0745] Purification: Chromatography

[0746] In some cases, AAV particles may be purified from clarified cell lysates by one or more methods of chromatography. Chromatography refers to any number of methods known in the art for separating out one or more elements from a mixture. Such methods may include, but are not limited to ion exchange chromatography (e.g. cation exchange chromatography and anion exchange chromatography), immunoaffinity chromatography and size-exclusion chromatography. In some embodiments, methods of viral chromatography may include any of those taught in U.S. Pat. Nos. 5,756,283, 6,258,595, 6,261,551, 6,270,996, 6,281,010, 6,365,394, 6,475,769, 6,482,634, 6,485,966, 6,943,019, 6,953,690, 7,022,519, 7,238,526, 7,291,498 and 7,491,508 or International Publication Nos. WO1996039530, WO1998010088, WO1999014354, WO1999015685, WO1999047691, WO2000055342, WO2000075353 and WO2001023597, the contents of each of which are herein incorporated by reference in their entirety.

[0747] In some embodiments, ion exchange chromatography may be used to isolate viral particles. Ion exchange chromatography is used to bind viral particles based on charge-charge interactions between capsid proteins and charged sites present on a stationary phase, typically a column through which viral preparations (e.g. clarified lysates) are passed. After application of viral preparations, bound viral particles may then be eluted by applying an elution solution to disrupt the charge-charge interactions. Elution solutions may be optimized by adjusting salt concentration and/or pH to enhance recovery of bound viral particles. Depending on the charge of viral capsids being isolated, cation or anion exchange chromatography methods may be selected. Methods of ion exchange chromatography may include, but are not limited to any of those taught in U.S. Pat. Nos. 7,419,817, 6,143,548, 7,094,604, 6,593,123, 7,015,026 and 8,137,948, the contents of each of which are herein incorporated by reference in their entirety.

[0748] In some embodiments, immunoaffinity chromatography may be used. Immunoaffinity chromatography is a form of chromatography that utilizes one or more immune compounds (e.g. antibodies or antibody-related structures) to retain viral particles. Immune compounds may bind specifically to one or more structures on viral particle surfaces, including, but not limited to one or more viral coat protein. In some cases, immune compounds may be specific for a particular viral variant. In some cases, immune compounds may bind to multiple viral variants. In some embodiments, immune compounds may include recombinant single-chain antibodies. Such recombinant single chain antibodies may include those described in Smith, R. H. et al., 2009. Mol. Ther. 17(11):1888-96, the contents of which are herein incorporated by reference in their entirety. Such immune compounds are capable of binding to several AAV capsid variants, including, but not limited to AAV1, AAV2, AAV6 and AAV8.

[0749] In some embodiments, size-exclusion chromatography (SEC) may be used. SEC may comprise the use of a gel to separate particles according to size. In viral particle purification, SEC filtration is sometimes referred to as “polishing.” In some cases, SEC may be carried out to generate a final product that is near-homogenous. Such final products may in some cases be used in pre-clinical studies and/or clinical studies (Kotin, R. M. 2011. Human Molecular Genetics. 20(1):R2-R6, the contents of which are herein incorporated by reference in their entirety.) In some cases, SEC may be carried out according to any of the methods taught in U.S. Pat. Nos. 6,143,548, 7,015,026, 8,476,418, 6,410,300, 8,476,418, 7,419,817, 7,094,604, 6,593,123, and 8,137,948, the contents of each of which are herein incorporated by reference in their entirety.

[0750] In one embodiment, the compositions comprising at least one AAV particle may be isolated or purified using the methods described in U.S. Pat. No. 6,146,874, the contents of which are herein incorporated by reference in its entirety.

[0751] In one embodiment, the compositions comprising at least one AAV particle may be isolated or purified using the methods described in U.S. Pat. No. 6,660,514, the contents of which are herein incorporated by reference in its entirety.

[0752] In one embodiment, the compositions comprising at least one AAV particle may be isolated or purified using the methods described in U.S. Pat. No. 8,283,151, the contents of which are herein incorporated by reference in its entirety.

[0753] In one embodiment, the compositions comprising at least one AAV particle may be isolated or purified using the methods described in U.S. Pat. No. 8,524,446, the contents of which are herein incorporated by reference in its entirety.

### II. Formulation and Delivery

[0754] Pharmaceutical Compositions and Formulation

[0755] In addition to the pharmaceutical compositions (AAV particles comprising a modulatory polynucleotide sequence encoding the siRNA molecules), provided herein are pharmaceutical compositions which are suitable for administration to humans, it will be understood by the skilled artisan that such compositions are generally suitable for administration to any other animal, e.g., to non-human animals, e.g. non-human mammals. Modification of pharmaceutical compositions suitable for administration to humans in order to render the compositions suitable for administration to various animals is well understood, and the ordinarily skilled veterinary pharmacologist can design and/or perform such modification with merely ordinary, if any, experimentation. Subjects to which administration of the pharmaceutical compositions is contemplated include, but are not limited to, humans and/or other primates; mammals, including commercially relevant mammals such as cattle, pigs, horses, sheep, cats, dogs, mice, and/or rats; and/or birds, including commercially relevant birds such as poultry, chickens, ducks, geese, and/or turkeys.

[0756] In some embodiments, compositions are administered to humans, human patients or subjects. For the purposes of the present disclosure, the phrase “active ingredient” generally refers either to the synthetic siRNA duplexes, the modulatory polynucleotide encoding the siRNA duplex, or the AAV particle comprising a modulatory polynucleotide encoding the siRNA duplex described herein. Formulations of the pharmaceutical compositions described herein may be prepared by any method known or hereafter developed in the art of pharmacology. In general, such preparatory methods include the step of bringing the active ingredient into association with an excipient and/or one or more other accessory ingredients, and then, if necessary and/or desirable, dividing, shaping and/or packaging the product into a desired single- or multi-dose unit.

[0757] Relative amounts of the active ingredient, the pharmaceutically acceptable excipient, and/or any additional ingredients in a pharmaceutical composition in accordance with the invention will vary, depending upon the identity, size, and/or condition of the subject treated and further depending upon the route by which the composition is to be administered.

[0758] The AAV particles comprising the modulatory polynucleotide sequence encoding the siRNA molecules of the present invention can be formulated using one or more excipients to: (1) increase stability; (2) increase cell transfection or transduction; (3) permit the sustained or delayed release; or (4) alter the biodistribution (e.g., target the AAV particle to specific tissues or cell types such as brain and neurons).

[0759] Formulations of the present invention can include, without limitation, saline, lipidoids, liposomes, lipid nanoparticles, polymers, lipoplexes, core-shell nanoparticles, peptides, proteins, cells transfected with AAV particles (e.g., for transplantation into a subject), nanoparticle mimics and combinations thereof. Further, the AAV particles of the present invention may be formulated using self-assembled nucleic acid nanoparticles.

[0760] Formulations of the pharmaceutical compositions described herein may be prepared by any method known or hereafter developed in the art of pharmacology. In general, such preparatory methods include the step of associating the active ingredient with an excipient and/or one or more other accessory ingredients.

[0761] A pharmaceutical composition in accordance with the present disclosure may be prepared, packaged, and/or sold in bulk, as a single unit dose, and/or as a plurality of single unit doses. As used herein, a “unit dose” refers to a discrete amount of the pharmaceutical composition comprising a predetermined amount of the active ingredient. The amount of the active ingredient is generally equal to the dosage of the active ingredient which would be administered to a subject and/or a convenient fraction of such a dosage such as, for example, one-half or one-third of such a dosage. Relative amounts of the active ingredient, the pharmaceutically acceptable excipient, and/or any additional ingredients in a pharmaceutical composition in accordance with the present disclosure may vary, depending upon the identity, size, and/or condition of the subject being treated and further depending upon the route by which the composition is to be administered. For example, the composition may comprise between 0.1% and 99% (w/w) of the active ingredient. By way of example, the composition may comprise between 0.1% and 100%, e.g., between 0.5 and 50%, between 1-30%, between 5-80%, at least 80% (w/w) active ingredient.

[0762] In some embodiments, a pharmaceutically acceptable excipient may be at least 95%, at least 96%, at least 97%, at least 98%, at least 99%, or 100% pure. In some embodiments, an excipient is approved for use for humans and for veterinary use. In some embodiments, an excipient may be approved by United States Food and Drug Administration. In some embodiments, an excipient may be of pharmaceutical grade. In some embodiments, an excipient may meet the standards of the United States Pharmacopoeia (USP), the European Pharmacopoeia (EP), the British Pharmacopoeia, and/or the International Pharmacopoeia.

[0763] Excipients, which, as used herein, includes, but is not limited to, any and all solvents, dispersion media, diluents, or other liquid vehicles, dispersion or suspension aids, surface active agents, isotonic agents, thickening or emulsifying agents, preservatives, and the like, as suited to the particular dosage form desired. Various excipients for formulating pharmaceutical compositions and techniques for preparing the composition are known in the art (see Remington: The Science and Practice of Pharmacy, 21^{st} Edition, A. R. Gennaro, Lippincott, Williams & Wilkins, Baltimore, MD, 2006; incorporated herein by reference in its entirety). The use of a conventional excipient medium may be contemplated within the scope of the present disclosure, except insofar as any conventional excipient medium may be incompatible with a substance or its derivatives, such as by producing any undesirable biological effect or otherwise interacting in a deleterious manner with any other component(s) of the pharmaceutical composition.

[0764] Exemplary diluents include, but are not limited to, calcium carbonate, sodium carbonate, calcium phosphate, dicalcium phosphate, calcium sulfate, calcium hydrogen phosphate, sodium phosphate lactose, sucrose, cellulose, microcrystalline cellulose, kaolin, mannitol, sorbitol, inositol, sodium chloride, dry starch, cornstarch, powdered sugar, etc., and/or combinations thereof.

[0765] In some embodiments, the formulations may comprise at least one inactive ingredient. As used herein, the term “inactive ingredient” refers to one or more inactive agents included in formulations. In some embodiments, all, none or some of the inactive ingredients which may be used in the formulations of the present invention may be approved by the US Food and Drug Administration (FDA).

[0766] Formulations of vectors comprising the nucleic acid sequence for the siRNA molecules of the present invention may include cations or anions. In one embodiment, the formulations include metal cations such as, but not limited to, Zn2+, Ca2+, Cu2+, Mg+ and combinations thereof.

[0767] As used herein, “pharmaceutically acceptable salts” refers to derivatives of the disclosed compounds wherein the parent compound is modified by converting an existing acid or base moiety to its salt form (e.g., by reacting the free base group with a suitable organic acid). Examples of pharmaceutically acceptable salts include, but are not limited to, mineral or organic acid salts of basic residues such as amines; alkali or organic salts of acidic residues such as carboxylic acids; and the like. Representative acid addition salts include acetate, acetic acid, adipate, alginate, ascorbate, aspartate, benzenesulfonate, benzene sulfonic acid, benzoate, bisulfate, borate, butyrate, camphorate, camphorsulfonate, citrate, cyclopentanepropionate, digluconate, dodecylsulfate, ethanesulfonate, fumarate, glucoheptonate, glycerophosphate, hemisulfate, heptonate, hexanoate, hydrobromide, hydrochloride, hydroiodide, 2-hydroxy-ethanesulfonate, lactobionate, lactate, laurate, lauryl sulfate, malate, maleate, malonate, methanesulfonate, 2-naphthalenesulfonate, nicotinate, nitrate, oleate, oxalate, palmitate, pamoate, pectinate, persulfate, 3-phenylpropionate, phosphate, picrate, pivalate, propionate, stearate, succinate, sulfate, tartrate, thiocyanate, toluenesulfonate, undecanoate, valerate salts, and the like. Representative alkali or alkaline earth metal salts include sodium, lithium, potassium, calcium, magnesium, and the like, as well as nontoxic ammonium, quaternary ammonium, and amine cations, including, but not limited to ammonium, tetramethylammonium, tetraethylammonium, methylamine, dimethylamine, trimethylamine, triethylamine, ethylamine, and the like. The pharmaceutically acceptable salts of the present disclosure include the conventional non-toxic salts of the parent compound formed, for example, from non-toxic inorganic or organic acids. The pharmaceutically acceptable salts of the present disclosure can be synthesized from the parent compound which contains a basic or acidic moiety by conventional chemical methods. Generally, such salts can be prepared by reacting the free acid or base forms of these compounds with a stoichiometric amount of the appropriate base or acid in water or in an organic solvent, or in a mixture of the two; generally, nonaqueous media like ether, ethyl acetate, ethanol, isopropanol, or acetonitrile are preferred. Lists of suitable salts are found in Remington's Pharmaceutical Sciences, 17^{th} ed., Mack Publishing Company, Easton, Pa., 1985, p. 1418, Pharmaceutical Salts: Properties, Selection, and Use, P. H. Stahl and C. G. Wermuth (eds.), Wiley-VCH, 2008, and Berge et al., Journal of Pharmaceutical Science, 66, 1-19 (1977); the content of each of which is incorporated herein by reference in their entirety.

[0768] The term “pharmaceutically acceptable solvate,” as used herein, means a compound of the invention wherein molecules of a suitable solvent are incorporated in the crystal lattice. A suitable solvent is physiologically tolerable at the dosage administered. For example, solvates may be prepared by crystallization, recrystallization, or precipitation from a solution that includes organic solvents, water, or a mixture thereof. Examples of suitable solvents are ethanol, water (for example, mono-, di-, and tri-hydrates), N-methylpyrrolidinone (NMP), dimethyl sulfoxide (DMSO), N,N′-dimethylformamide (DMF), N,N′-dimethylacetamide (DMAC), 1,3-dimethyl-2-imidazolidinone (DMEU), 1,3-dimethyl-3,4,5,6-tetrahydro-2-(1H)-pyrimidinone (DMPU), acetonitrile (ACN), propylene glycol, ethyl acetate, benzyl alcohol, 2-pyrrolidone, benzyl benzoate, and the like. When water is the solvent, the solvate is referred to as a “hydrate.”

[0769] According to the present invention, the AAV particle comprising the modulatory polynucleotide sequence encoding for the siRNA molecules may be formulated for CNS delivery. Agents that cross the brain blood barrier may be used. For example, some cell penetrating peptides that can target siRNA molecules to the brain blood barrier endothelium may be used to formulate the siRNA duplexes targeting the gene of interest.

[0770] Inactive Ingredients

[0771] In some embodiments, formulations may comprise at least one excipient which is an inactive ingredient. As used herein, the term “inactive ingredient” refers to one or more inactive agents included in formulations. In some embodiments, all, none or some of the inactive ingredients which may be used in the formulations of the present disclosure may be approved by the US Food and Drug Administration (FDA).

[0772] Formulations of AAV particles described herein may include cations or anions. In one embodiment, the formulations include metal cations such as, but not limited to, Zn2+, Ca2+, Cu2+, Mg+ and combinations thereof. As a non-limiting example, formulations may include polymers and compositions described herein complexed with a metal cation (See e.g., U.S. Pat. Nos. 6,265,389 and 6,555,525, each of which is herein incorporated by reference in its entirety).

[0773] Delivery

[0774] In one embodiment, the AAV particles described herein may be administered or delivered using the methods for the delivery of AAV virions described in European Patent Application No. EP1857552, the contents of which are herein incorporated by reference in its entirety.

[0775] In one embodiment, the AAV particles described herein may be administered or delivered using the methods for delivering proteins using AAV particles described in European Patent Application No. EP2678433, the contents of which are herein incorporated by reference in its entirety.

[0776] In one embodiment, the AAV particle described herein may be administered or delivered using the methods for delivering DNA molecules using AAV particles described in U.S. Pat. No. 5,858,351, the contents of which are herein incorporated by reference in its entirety.

[0777] In one embodiment, the AAV particle described herein may be administered or delivered using the methods for delivering DNA to the bloodstream described in U.S. Pat. No. 6,211,163, the contents of which are herein incorporated by reference in its entirety.

[0778] In one embodiment, the AAV particle described herein may be administered or delivered using the methods for delivering AAV virions described in U.S. Pat. No. 6,325,998, the contents of which are herein incorporated by reference in its entirety.

[0779] In one embodiment, the AAV particle described herein may be administered or delivered using the methods for delivering a payload to the central nervous system described in U.S. Pat. No. 7,588,757, the contents of which are herein incorporated by reference in its entirety.

[0780] In one embodiment, the AAV particle described herein may be administered or delivered using the methods for delivering a payload described in U.S. Pat. No. 8,283,151, the contents of which are herein incorporated by reference in its entirety.

[0781] In one embodiment, the AAV particle described herein may be administered or delivered using the methods for delivering a payload using a glutamic acid decarboxylase (GAD) delivery vector described in International Patent Publication No. WO2001089583, the contents of which are herein incorporated by reference in its entirety.

[0782] In one embodiment, the AAV particle described herein may be administered or delivered using the methods for delivering a payload to neural cells described in International Patent Publication No. WO2012057363, the contents of which are herein incorporated by reference in its entirety.

[0783] Delivery to Cells

[0784] The present disclosure provides a method of delivering to a cell or tissue any of the above-described AAV polynucleotides or AAV genomes, comprising contacting the cell or tissue with said AAV polynucleotide or AAV genomes or contacting the cell or tissue with a particle comprising said AAV polynucleotide or AAV genome, or contacting the cell or tissue with any of the described compositions, including pharmaceutical compositions. The method of delivering the AAV polynucleotide or AAV genome to a cell or tissue can be accomplished in vitro, ex vivo, or in vivo.

[0785] Introduction into Cells—Synthetic dsRNA

[0786] To ensure the chemical and biological stability of siRNA molecules (e.g., siRNA duplexes and dsRNA), it is important to deliver siRNA molecules inside the target cells. In some embodiments, the cells may include, but are not limited to, cells of mammalian origin, cells of human origins, embryonic stem cells, induced pluripotent stem cells, neural stem cells, and neural progenitor cells. Nucleic acids, including siRNA, carry a net negative charge on the sugar-phosphate backbone under normal physiological conditions. In order to enter the cell, a siRNA molecule must come into contact with a lipid bilayer of the cell membrane, whose head groups are also negatively charged. The siRNA duplexes can be complexed with a carrier that allows them to traverse cell membranes such as package particles to facilitate cellular uptake of the siRNA. The package particles may include, but are not limited to, liposomes, nanoparticles, cationic lipids, polyethylenimine derivatives, dendrimers, carbon nanotubes and the combination of carbon-made nanoparticles with dendrimers. Lipids may be cationic lipids and/or neutral lipids. In addition to well established lipophilic complexes between siRNA molecules and cationic carriers, siRNA molecules can be conjugated to a hydrophobic moiety, such as cholesterol (e.g., U.S. Patent Publication No. 20110110937; the content of which is herein incorporated by reference in its entirety). This delivery method holds a potential of improving in vitro cellular uptake and in vivo pharmacological properties of siRNA molecules. The siRNA molecules of the present invention may also be conjugated to certain cationic cell-penetrating peptides (CPPs), such as MPG, transportan or penetratin covalently or non-covalently (e.g., U.S. Patent Publication No. 20110086425; the content of which is herein incorporated by reference in its entirety).

[0787] Introduction into Cells—AAV Particles

[0788] The siRNA molecules (e.g., siRNA duplexes) of the present invention may be introduced into cells using any of a variety of approaches such as, but not limited to, AAV particles. These AAV particles are engineered and optimized to facilitate the entry of siRNA molecule into cells that are not readily amendable to transfection. Also, some synthetic AAV particles possess an ability to integrate the shRNA into the cell genome, thereby leading to stable siRNA expression and long-term knockdown of a target gene. In this manner, AAV particles are engineered as vehicles for specific delivery while lacking the deleterious replication and/or integration features found in wild-type virus.

[0789] In some embodiments, the siRNA molecules of the present invention are introduced into a cell by contacting the cell with an AAV particle comprising a modulatory polynucleotide sequence encoding a siRNA molecule, and a lipophilic carrier. In other embodiments, the siRNA molecule is introduced into a cell by transfecting or infecting the cell with an AAV particle comprising a nucleic acid sequence capable of producing the siRNA molecule when transcribed in the cell. In some embodiments, the siRNA molecule is introduced into a cell by injecting into the cell an AAV particle comprising a nucleic acid sequence capable of producing the siRNA molecule when transcribed in the cell.

[0790] In some embodiments, prior to transfection, an AAV particle comprising a nucleic acid sequence encoding the siRNA molecules of the present invention may be transfected into cells.

[0791] In other embodiments, the AAV particles comprising the nucleic acid sequence encoding the siRNA molecules of the present invention may be delivered into cells by electroporation (e.g. U.S.

[0792] Patent Publication No. 20050014264; the content of which is herein incorporated by reference in its entirety).

[0793] Other methods for introducing AAV particles comprising the nucleic acid sequence encoding the siRNA molecules described herein may include photochemical internalization as described in U. S. Patent publication No. 20120264807; the content of which is herein incorporated by reference in its entirety.

[0794] In some embodiments, the formulations described herein may contain at least one AAV particle comprising the nucleic acid sequence encoding the siRNA molecules described herein. In one embodiment, the siRNA molecules may target the gene of interest at one target site. In another embodiment, the formulation comprises a plurality of AAV particles, each AAV particle comprising a nucleic acid sequence encoding a siRNA molecule targeting the gene of interest at a different target site. The gene of interest may be targeted at 2, 3, 4, 5 or more than 5 sites.

[0795] In one embodiment, the AAV particles from any relevant species, such as, but not limited to, human, dog, mouse, rat or monkey may be introduced into cells.

[0796] In one embodiment, the AAV particles may be introduced into cells which are relevant to the disease to be treated. As a non-limiting example, the disease is ALS and the target cells are neurons and astrocytes. As another non-limiting example, the disease is ALS and the target cells are medium spiny neurons, cortical neurons and astrocytes.

[0797] In one embodiment, the AAV particles may be introduced into cells which have a high level of endogenous expression of the target sequence.

[0798] In another embodiment, the AAV particles may be introduced into cells which have a low level of endogenous expression of the target sequence.

[0799] In one embodiment, the cells may be those which have a high efficiency of AAV transduction.

[0800] Delivery to Subjects

[0801] The present disclosure additionally provides a method of delivering to a subject, including a mammalian subject, any of the above-described AAV polynucleotides or AAV genomes comprising administering to the subject said AAV polynucleotide or AAV genome, or administering to the subject a particle comprising said AAV polynucleotide or AAV genome, or administering to the subject any of the described compositions, including pharmaceutical compositions.

[0802] The pharmaceutical compositions of AAV particles described herein may be characterized by one or more of bioavailability, therapeutic window and/or volume of distribution.

### III. Administration and Dosing

[0803] Administration

[0804] The AAV particles comprising a nucleic acid sequence encoding the siRNA molecules of the present invention may be administered by any route which results in a therapeutically effective outcome. These include, but are not limited to, within the parenchyma of an organ such as, but not limited to, a brain (e.g., intraparenchymal), corpus striatum (intrastriatal), enteral (into the intestine), gastroenteral, epidural, oral (by way of the mouth), transdermal, peridural, intracerebral (into the cerebrum), intracerebroventricular (into the cerebral ventricles), subpial (under the pia), epicutaneous (application onto the skin), intradermal, (into the skin itself), subcutaneous (under the skin), nasal administration (through the nose), intravenous (into a vein), intravenous bolus, intravenous drip, intraarterial (into an artery), intramuscular (into a muscle), intracardiac (into the heart), intraosseous infusion (into the bone marrow), intrathecal (into the spinal canal), intraganglionic (into the ganglion), intraperitoneal, (infusion or injection into the peritoneum), intravesical infusion, intravitreal, (through the eye), intracavernous injection (into a pathologic cavity) intracavitary (into the base of the penis), intravaginal administration, intrauterine, extra-amniotic administration, transdermal (diffusion through the intact skin for systemic distribution), transmucosal (diffusion through a mucous membrane), transvaginal, insufflation (snorting), sublingual, sublabial, enema, eye drops (onto the conjunctiva), in ear drops, auricular (in or by way of the ear), buccal (directed toward the cheek), conjunctival, cutaneous, dental (to a tooth or teeth), electro-osmosis, endocervical, endosinusial, endotracheal, extracorporeal, hemodialysis, infiltration, interstitial, intra-abdominal, intra-amniotic, intra-articular, intrabiliary, intrabronchial, intrabursal, intracartilaginous (within a cartilage), intracaudal (within the cauda equine), intracisternal (within the cisterna magna cerebellomedularis), intracorneal (within the cornea), dental intracornal, intracoronary (within the coronary arteries), intracorporus cavernosum (within the dilatable spaces of the corporus cavernosa of the penis), intradiscal (within a disc), intraductal (within a duct of a gland), intraduodenal (within the duodenum), intradural (within or beneath the dura), intraepidermal (to the epidermis), intraesophageal (to the esophagus), intragastric (within the stomach), intragingival (within the gingivae), intraileal (within the distal portion of the small intestine), intralesional (within or introduced directly to a localized lesion), intraluminal (within a lumen of a tube), intralymphatic (within the lymph), intramedullary (within the marrow cavity of a bone), intrameningeal (within the meninges), intraocular (within the eye), intraovarian (within the ovary), intrapericardial (within the pericardium), intrapleural (within the pleura), intraprostatic (within the prostate gland), intrapulmonary (within the lungs or its bronchi), intrasinal (within the nasal or periorbital sinuses), intraspinal (within the vertebral column), intrasynovial (within the synovial cavity of a joint), intratendinous (within a tendon), intratesticular (within the testicle), intrathecal (within the cerebrospinal fluid at any level of the cerebrospinal axis), intrathoracic (within the thorax), intratubular (within the tubules of an organ), intratumor (within a tumor), intratympanic (within the aurus media), intravascular (within a vessel or vessels), intraventricular (within a ventricle), iontophoresis (by means of electric current where ions of soluble salts migrate into the tissues of the body), irrigation (to bathe or flush open wounds or body cavities), laryngeal (directly upon the larynx), nasogastric (through the nose and into the stomach), occlusive dressing technique (topical route administration which is then covered by a dressing which occludes the area), ophthalmic (to the external eye), oropharyngeal (directly to the mouth and pharynx), parenteral, percutaneous, periarticular, peridural, perineural, periodontal, rectal, respiratory (within the respiratory tract by inhaling orally or nasally for local or systemic effect), retrobulbar (behind the pons or behind the eyeball), soft tissue, subarachnoid, subconjunctival, submucosal, topical, transplacental (through or across the placenta), transtracheal (through the wall of the trachea), transtympanic (across or through the tympanic cavity), ureteral (to the ureter), urethral (to the urethra), vaginal, caudal block, diagnostic, nerve block, biliary perfusion, cardiac perfusion, photopheresis or spinal.

[0805] In specific embodiments, compositions of AAV particles comprising a nucleic acid sequence encoding the siRNA molecules of the present invention may be administered in a way which facilitates the vectors or siRNA molecule to enter the central nervous system and penetrate into medium spiny and/or cortical neurons and/or astrocytes.

[0806] In some embodiments, the AAV particles comprising a nucleic acid sequence encoding the siRNA molecules of the present invention may be administered by intramuscular injection.

[0807] In one embodiment, the AAV particles comprising a nucleic acid sequence encoding the siRNA molecules of the present invention may be administered via intraparenchymal injection.

[0808] In one embodiment, the AAV particles comprising a nucleic acid sequence encoding the siRNA molecules of the present invention may be administered via intraparenchymal injection and intrathecal injection.

[0809] In one embodiment, the AAV particles comprising a nucleic acid sequence encoding the siRNA molecules of the present invention may be administered via intrastriatal injection.

[0810] In one embodiment, the AAV particles comprising a nucleic acid sequence encoding the siRNA molecules of the present invention may be administered via intrastriatal injection and another route of administration described herein.

[0811] In some embodiments, AAV particles that express siRNA duplexes of the present invention may be administered to a subject by peripheral injections (e.g., intravenous) and/or intranasal delivery. It was disclosed in the art that the peripheral administration of AAV particles for siRNA duplexes can be transported to the central nervous system, for example, to the neurons (e.g., U.S. Patent Publication Nos. 20100240739; and 20100130594; the content of each of which is incorporated herein by reference in their entirety).

[0812] In other embodiments, compositions comprising at least one AAV particle comprising a nucleic acid sequence encoding the siRNA molecules of the present invention may be administered to a subject by intracranial delivery (See, e.g., U.S. Pat. No. 8,119,611; the content of which is incorporated herein by reference in its entirety).

[0813] The AAV particle comprising a nucleic acid sequence encoding the siRNA molecules of the present invention may be administered in any suitable form, either as a liquid solution or suspension, as a solid form suitable for liquid solution or suspension in a liquid solution. The siRNA duplexes may be formulated with any appropriate and pharmaceutically acceptable excipient.

[0814] The AAV particle comprising a nucleic acid sequence encoding the siRNA molecules of the present invention may be administered in a “therapeutically effective” amount, i.e., an amount that is sufficient to alleviate and/or prevent at least one symptom associated with the disease, or provide improvement in the condition of the subject.

[0815] In one embodiment, the AAV particle may be administered to the CNS in a therapeutically effective amount to improve function and/or survival for a subject with ALS. As a non-limiting example, the vector may be administered by direct infusion into the striatum.

[0816] In one embodiment, the AAV particle may be administered to a subject (e.g., to the CNS of a subject via intrathecal administration) in a therapeutically effective amount for the siRNA duplexes or dsRNA to target the medium spiny neurons, cortical neurons and/or astrocytes. As a non-limiting example, the siRNA duplexes or dsRNA may target SOD1 and reduce the expression of SOD1 protein or mRNA. As another non-limiting example, the siRNA duplexes or dsRNA target SOD1 and can suppress SOD1 and reduce SOD1 mediated toxicity. The reduction of SOD1 protein and/or mRNA as well as SOD1 mediated toxicity may be accomplished with almost no enhanced inflammation.

[0817] In one embodiment, the AAV particle may be administered to a subject (e.g., to the CNS of a subject) in a therapeutically effective amount to slow the functional decline of a subject (e.g., determined using a known evaluation method). As a non-limiting example, the vector may be administered via intraparenchymal injection.

[0818] In one embodiment, the AAV particle may be administered to the cisterna magna in a therapeutically effective amount to transduce medium spiny neurons, cortical neurons and/or astrocytes. As a non-limiting example, the vector may be administered intrathecally.

[0819] In one embodiment, the AAV particle may be administered using intrathecal infusion in a therapeutically effective amount to transduce medium spiny neurons, cortical neurons and/or astrocytes. As a non-limiting example, the vector may be administered intrathecally.

[0820] In one embodiment, the AAV particle may be administered to the cisterna magna in a therapeutically effective amount to transduce medium spiny neurons, cortical neurons and/or astrocytes. As a non-limiting example, the vector may be administered by intraparenchymal injection.

[0821] In one embodiment, the AAV particle comprising a modulatory polynucleotide may be formulated.

[0822] As a non-limiting example the baricity and/or osmolality of the formulation may be optimized to ensure optimal drug distribution in the central nervous system or a region or component of the central nervous system.

[0823] In one embodiment, the AAV particle comprising a modulatory polynucleotide may be delivered to a subject via a single route administration.

[0824] In one embodiment, the AAV particle comprising a modulatory polynucleotide may be delivered to a subject via a multi-site route of administration. A subject may be administered the AAV particle comprising a modulatory polynucleotide at 2, 3, 4, 5 or more than 5 sites.

[0825] In one embodiment, a subject may be administered the AAV particle comprising a modulatory polynucleotide described herein using a bolus injection.

[0826] In some embodiments, the efficacy of administration of the AAV particle comprising a modulatory polynucleotide using a bolus injection may be measured by monitoring the gene transfer to the spinal cord, brain stem, or motor cortex. The biodistribution and cellular tropism may be monitored by any methods known in the art, such as, but not limited to, immunostaining, and the vector genome levels may be measured by digital PCR.

[0827] In one embodiment, a subject may be administered the AAV particle comprising a modulatory polynucleotide described herein using sustained delivery over a period of minutes, hours or days. The infusion rate may be changed depending on the subject, distribution, formulation or another delivery parameter.

[0828] In one embodiment, the AAV particle described herein is administered via putamen and caudate infusion. As a non-limiting example, the dual infusion provides a broad striatal distribution as well as a frontal and temporal cortical distribution.

[0829] In one embodiment, the AAV particle is AAV-DJ8 which is administered via unilateral putamen infusion. As a non-limiting example, the distribution of the administered AAV-DJ8 is similar to the distribution of AAV1 delivered via unilateral putamen infusion.

[0830] In one embodiment, the AAV particle described herein is administered via intrathecal (IT) infusion at C1. The infusion may be for 1, 2, 3, 4, 6, 7, 8, 9, 10, 11, 12, 13, 14, 15 or more than 15 hours.

[0831] In one embodiment, the selection of subjects for administration of the AAV particle described herein and/or the effectiveness of the dose, route of administration and/or volume of administration may be evaluated using imaging of the perivascular spaces (PVS) which are also known as Virchow-Robin spaces. PVS surround the arterioles and venules as they perforate brain parenchyma and are filled with cerebrospinal fluid (CSF)/interstitial fluid. PVS are common in the midbrain, basal ganglia, and centrum semiovale. While not wishing to be bound by theory, PVS may play a role in the normal clearance of metabolites and have been associated with worse cognition and several disease states including Parkinson's disease. PVS are usually are normal in size but they can increase in size in a number of disease states. Potter et al. (Cerebrovasc Dis. 2015 January; 39(4): 224-231; the contents of which are herein incorporated by reference in its entirety) developed a grading method where they studied a full range of PVS and rated basal ganglia, centrum semiovale and midbrain PVS. They used the frequency and range of PVS used by Mac and Lullich et al. (J Neurol Neurosurg Psychiatry. 2004 November; 75(11):1519-23; the contents of which are herein incorporated by reference in its entirety) and Potter et al. gave 5 ratings to basal ganglia and centrum semiovale PVS: 0 (none), 1 (1-10), 2 (11-20), 3 (21-40) and 4 (>40) and 2 ratings to midbrain PVS: 0 (non visible) or 1 (visible). The user guide for the rating system by Potter et al. can be found at: www.sbirc.ed.ac.uk/documents/epvs-rating-scale-user-guide.pdf.

[0832] Dosing

[0833] The pharmaceutical compositions of the present invention may be administered to a subject using any amount effective for reducing, preventing and/or treating a disease and/or disorder. The exact amount required will vary from subject to subject, depending on the species, age, and general condition of the subject, the severity of the disease, the particular composition, its mode of administration, its mode of activity, and the like.

[0834] The compositions of the present invention are typically formulated in unit dosage form for ease of administration and uniformity of dosage. It will be understood, however, that the total daily usage of the compositions of the present invention may be decided by the attending physician within the scope of sound medical judgment. The specific therapeutic effectiveness for any particular patient will depend upon a variety of factors including the disorder being treated and the severity of the disorder; the activity of the specific compound employed; the specific composition employed; the age, body weight, general health, sex and diet of the patient; the time of administration, route of administration, and rate of excretion of the siRNA duplexes employed; the duration of the treatment; drugs used in combination or coincidental with the specific compound employed; and like factors well known in the medical arts.

[0835] As a non-limiting example, the dose may be determined based on the total volume of CSF of a subject. For example cynomolgus monkeys have a total estimated cerebrospinal fluid (CSF) volume of approximately 6 to 12 mL and humans have a total estimated CSF of approximately 120 to 150 mL, a factor of at least 10 to 12-fold. Therefore, a factor of 10× to 12× may be used to determine a human dose based on the dose to a cynomolgus monkey. In one embodiment, the factor is 10×. In another embodiment the factor is 11×. In yet another embodiment, the factor is 12×.

[0836] In yet another embodiment, the factor may be, but is not limited to, 10×, 10.1×, 10.2×, 10.3×, 10.4×, 10.5×, 10.6×, 10.7×, 10.8×, 10.9×, 11×, 11.1×, 11.2×, 11.3×, 11.4×, 11.5×, 11.6×, 11.7×, 11.8×, 11.9×, 12×, 12.1×, 12.2×, 12.3×, 12.4×, and 12.5×.

[0837] In one embodiment, the age and sex of a subject may be used to determine the dose of the compositions of the present invention. As a non-limiting example, a subject who is older may receive a larger dose (e.g., 5-10%, 10-20%, 15-30%, 20-50%, 25-50% or at least 1%, 2%, 3%, 4%, 5%, 10%, 20%, 30%, 40%, 50%, 60%, 70%, 80%, 90% or more than 90% more) of the composition as compared to a younger subject. As another non-limiting example, a subject who is younger may receive a larger dose (e.g., 5-10%, 10-20%, 15-30%, 20-50%, 25-50% or at least 1%, 2%, 3%, 4%, 5%, 10%, 20%, 30%, 40%, 50%, 60%, 70%, 80%, 90% or more than 90% more) of the composition as compared to an older subject. As yet another non-limiting example, a subject who is female may receive a larger dose (e.g., 5-10%, 10-20%, 15-30%, 20-50%, 25-50% or at least 1%, 2%, 3%, 4%, 5%, 10%, 20%, 30%, 40%, 50%, 60%, 70%, 80%, 90% or more than 90% more) of the composition as compared to a male subject. As yet another non-limiting example, a subject who is male may receive a larger dose (e.g., 5-10%, 10-20%, 15-30%, 20-50%, 25-50% or at least 1%, 2%, 3%, 4%, 5%, 10%, 20%, 30%, 40%, 50%, 60%, 70%, 80%, 90% or more than 90% more) of the composition as compared to a female subject

[0838] In some specific embodiments, the doses of AAV particles for delivering siRNA duplexes of the present invention may be adapted depending on the disease condition, the subject and the treatment strategy.

[0839] In one embodiment, delivery of the compositions in accordance with the present invention to cells comprises a rate of delivery defined by [VG/hour=mL/hour*VG/mL] wherein VG is viral genomes, VG/mL is composition concentration, and mL/hour is rate of prolonged delivery.

[0840] In one embodiment, delivery of compositions in accordance with the present invention to cells may comprise a total concentration per subject between about 1×10⁶ VG and about 1×10¹⁶ VG. In some embodiments, delivery may comprise a composition concentration of about 1×10⁶, 2×10⁶, 3×10⁶, 4×10⁶, 5×10⁶, 6×10⁶, 7×10⁶, 8×10⁶, 9×10⁶, 1×10⁷, 2×10⁷, 3×10⁷, 4×10⁷, 5×10⁷, 6×10⁷, 7×10⁷, 8×10⁷, 9×10⁷, 1×10⁸, 2×10⁸, 3×10⁸, 4×10⁸, 5×10⁸, 6×10⁸, 7×10⁸, 8×10⁸, 9×10⁸, 1×10⁹, 2×10⁹, 3×10⁹, 4×10⁹, 5×10⁹, 6×10⁹, 7×10⁹, 8×10⁹, 9×10⁹, 1×10¹⁰, 2×10¹⁰, 3×10¹⁰, 4×10¹⁰, 5×10¹⁰, 6×10¹⁰, 7×10¹⁰, 8×10¹⁰, 9×10¹⁰, 1×10¹¹, 1.1×10¹¹, 1.2×10¹¹, 1.3×10¹¹, 1.4×10¹¹, 1.5×10¹¹, 1.6×10¹¹, 1.7×10¹¹, 1.8×10¹¹, 1.9×10¹¹, 2×10¹¹, 2.1×10¹¹, 2.2×10¹¹, 2.3×10¹¹, 2.4×10¹¹, 2.5×10¹¹, 2.6×10¹¹, 2.7×10¹¹, 2.8×10¹¹, 2.9×10¹¹, 3×10¹¹, 4×10¹¹, 5×10¹¹, 6×10¹¹, 7×10¹¹, 7.1×10¹¹, 7.2×10¹¹, 7.3×10¹¹, 7.4×10¹¹, 7.5×10¹¹, 7.6×10¹¹, 7.7×10¹¹, 7.8×10¹¹, 7.9×10¹¹, 8×10¹¹, 9×10¹¹, 1×10¹², 1.1×10¹², 1.2×10¹², 1.3×10¹², 1.4×10¹², 1.5×10¹², 1.6×10¹², 1.7×10¹², 1.8×10¹², 1.9×10¹², 2×10¹², 2.1×10¹², 2.2×10¹², 2.3×10¹², 2.4×10¹², 2.5×10¹², 2.6×10¹², 2.7×10¹², 2.8×10¹², 2.9×10¹², 3×10¹², 3.1×10¹², 3.2×10¹², 3.3×10¹², 3.4×10¹², 3.5×10¹², 3.6×10¹², 3.7×10¹², 3.8×10¹², 3.9×10¹², 4×10¹², 4.1×10¹², 4.2×10¹², 4.3×10¹², 4.4×10¹², 4.5×10¹², 4.6×10¹², 4.7×10¹², 4.8×10¹², 4.9×10¹², 5×10¹², 6×10¹², 6.1×10¹², 6.2×10¹², 6.3×10¹², 6.4×10¹², 6.5×10¹², 6.6×10¹², 6.7×10¹², 6.8×10¹², 6.9×10¹², 7×10¹², 8×10¹², 8.1×10¹², 8.2×10¹², 8.3×10¹², 8.4×10¹², 8.5×10¹², 8.6×10¹², 8.7×10¹², 8.8×10¹², 8.9×10¹², 9×10¹², 1×10¹³, 1.1×10¹³, 1.2×10¹³, 1.3×10¹³, 1.4×10¹³, 1.5×10¹³, 1.6×10¹³, 1.7×10¹³, 1.8×10¹³, 1.9×10¹³, 2×10¹³, 3×10¹³, 4×10¹³, 5×10¹³, 6×10¹³, 6.7×10¹³, 7×10¹³, 8×10¹³, 9×10¹³, 1×10¹⁴, 2×10¹⁴, 3×10¹⁴, 4×10¹⁴, 5×10¹⁴, 6×10¹⁴, 7×10¹⁴, 8×10¹⁴, 9×10¹⁴, 1×10¹⁵, 2×10¹⁵, 3×10¹⁵, 4×10¹⁵, 5×10¹⁵, 6×10¹⁵, 7×10¹⁵, 8×10¹⁵, 9×10¹⁵, or 1×10¹⁶ VG/subject.

[0841] In one embodiment, delivery of compositions in accordance with the present invention to cells may comprise a total concentration per subject between about 1×10⁶ VG/kg and about 1×10¹⁶ VG/kg. In some embodiments, delivery may comprise a composition concentration of about 1×10⁶, 2×10⁶, 3×10⁶, 4×10⁶, 5×10⁶, 6×10⁶, 7×10⁶, 8×10⁶, 9×10⁶, 1×10⁷, 2×10⁷, 3×10⁷, 4×10⁷, 5×10⁷, 6×10⁷, 7×10⁷, 8×10⁷, 9×10⁷, 1×10⁸, 2×10⁸, 3×10⁸, 4×10⁸, 5×10⁸, 6×10⁸, 7×10⁸, 8×10⁸, 9×10⁸, 1×10⁹, 2×10⁹, 3×10⁹, 4×10⁹, 5×10⁹, 6×10⁹, 7×10⁹, 8×10⁹, 9×10⁹, 1×10¹⁰, 2×10¹⁰, 3×10¹⁰, 4×10¹⁰, 5×10¹⁰, 6×10¹⁰, 7×10¹⁰, 8×10¹⁰, 9×10¹⁰, 1×10¹¹, 1.1×10¹¹, 1.2×10¹¹, 1.3×10¹¹, 1.4×10¹¹, 1.5×10¹¹, 1.6×10¹¹, 1.7×10¹¹, 1.8×10¹¹, 1.9×10¹¹, 2×10¹¹, 2.1×10¹¹, 2.2×10¹¹, 2.3×10¹¹, 2.4×10¹¹, 2.5×10¹¹, 2.6×10¹¹, 2.7×10¹¹, 2.8×10¹¹, 2.9×10¹¹, 3×10¹¹, 4×10¹¹, 5×10¹¹, 6×10¹¹, 7×10¹¹, 7.1×10¹¹, 7.2×10¹¹, 7.3×10¹¹, 7.4×10¹¹, 7.5×10¹¹, 7.6×10¹¹, 7.7×10¹¹, 7.8×10¹¹, 7.9×10¹¹, 8×10¹¹, 9×10¹¹, 1×10¹², 1.1×10¹², 1.2×10¹², 1.3×10¹², 1.4×10¹², 1.5×10¹², 1.6×10¹², 1.7×10¹², 1.8×10¹², 1.9×10¹², 2×10¹², 2.1×10¹², 2.2×10¹², 2.3×10¹², 2.4×10¹², 2.5×10¹², 2.6×10¹², 2.7×10¹², 2.8×10¹², 2.9×10¹², 3×10¹², 3.1×10¹², 3.2×10¹², 3.3×10¹², 3.4×10¹², 3.5×10¹², 3.6×10¹², 3.7×10¹², 3.8×10¹², 3.9×10¹², 4×10¹², 4.1×10¹², 4.2×10¹², 4.3×10¹², 4.4×10¹², 4.5×10¹², 4.6×10¹², 4.7×10¹², 4.8×10¹², 4.9×10¹², 5×10¹², 6×10¹², 6.1×10¹², 6.2×10¹², 6.3×10¹², 6.4×10¹², 6.5×10¹², 6.6×10¹², 6.7×10¹², 6.8×10¹², 6.9×10¹², 7×10¹², 8×10¹², 8.1×10¹², 8.2×10¹², 8.3×10¹², 8.4×10¹², 8.5×10¹², 8.6×10¹², 8.7×10¹², 8.8×10¹², 8.9×10¹², 9×10¹², 1×10¹³, 1.1×10¹³, 1.2×10¹³, 1.3×10¹³, 1.4×10¹³, 1.5×10¹³, 1.6×10¹³, 1.7×10¹³, 1.8×10¹³, 1.9×10¹³, 2×10¹³, 3×10¹³, 4×10¹³, 5×10¹³, 6×10¹³, 6.7×10¹³, 7×10¹³, 8×10¹³, 9×10¹³, 1×10¹⁴, 2×10¹⁴, 3×10¹⁴, 4×10¹⁴, 5×10¹⁴, 6×10¹⁴, 7×10¹⁴, 8×10¹⁴, 9×10¹⁴, 1×10¹⁵, 2×10¹⁵, 3×10¹⁵, 4×10¹⁵, 5×10¹⁵, 6×10¹⁵, 7×10¹⁵, 8×10¹⁵, 9×10¹⁵, or 1×10¹⁶ VG/kg.

[0842] In one embodiment, about 10⁵ to 10⁶ viral genome (unit) may be administered per dose.

[0843] In one embodiment, delivery of the compositions in accordance with the present invention to cells may comprise a total concentration between about 1×10⁶ VG/mL and about 1×10¹⁶ VG/mL. In some embodiments, delivery may comprise a composition concentration of about 1×10⁶, 2×10⁶, 3×10⁶, 4×10⁶, 5×10⁶, 6×10⁶, 7×10⁶, 8×10⁶, 9×10⁶, 1×10⁷, 2×10⁷, 3×10⁷, 4×10⁷, 5×10⁷, 6×10⁷, 7×10⁷, 8×10⁷, 9×10⁷, 1×10⁸, 2×10⁸, 3×10⁸, 4×10⁸, 5×10⁸, 6×10⁸, 7×10⁸, 8×10⁸, 9×10⁸, 1×10⁹, 2×10⁹, 3×10⁹, 4×10⁹, 5×10⁹, 6×10⁹, 7×10⁹, 8×10⁹, 9×10⁹, 1×10¹⁰, 2×10¹⁰, 3×10¹⁰, 4×10¹⁰, 5×10¹⁰, 6×10¹⁰, 7×10¹⁰, 8×10¹⁰, 9×10¹⁰, 1×10¹¹, 1.1×10¹¹, 1.2×10¹¹, 1.3×10¹¹, 1.4×10¹¹, 1.5×10¹¹, 1.6×10¹¹, 1.7×10¹¹, 1.8×10¹¹, 1.9×10¹¹, 2×10¹¹, 3×10¹¹, 4×10¹¹, 5×10¹¹, 6×10¹¹, 7×10¹¹, 8×10¹¹, 9×10¹¹, 1×10¹², 1.1×10¹², 1.2×10¹², 1.3×10¹², 1.4×10¹², 1.5×10¹², 1.6×10¹², 1.7×10¹², 1.8×10¹², 1.9×10¹², 2×10¹², 2.1×10¹², 2.2×10¹², 2.3×10¹², 2.4×10¹², 2.5×10¹², 2.6×10¹², 2.7×10¹², 2.8×10¹², 2.9×10¹², 3×10¹², 3.1×10¹², 3.2×10¹², 3.3×10¹², 3.4×10¹², 3.5×10¹², 3.6×10¹², 3.7×10¹², 3.8×10¹², 3.9×10¹², 4×10¹², 4.1×10¹², 4.2×10¹², 4.3×10¹², 4.4×10¹², 4.5×10¹², 4.6×10¹², 4.7×10¹², 4.8×10¹², 4.9×10¹², 5×10¹², 6×10¹², 6.1×10¹², 6.2×10¹², 6.3×10¹², 6.4×10¹², 6.5×10¹², 6.6×10¹², 6.7×10¹², 6.8×10¹², 6.9×10¹², 7×10¹², 8×10¹², 9×10¹², 1×10¹³, 1.1×10¹³, 1.2×10¹³, 1.3×10¹³, 1.4×10¹³, 1.5×10¹³, 1.6×10¹³, 1.7×10¹³, 1.8×10¹³, 1.9×10¹³, 2×10¹³, 3×10¹³, 4×10¹³, 5×10¹³, 6×10¹³, 6.7×10¹³, 7×10¹³, 8×10¹³, 9×10¹³, 1×10¹⁴, 2×10¹⁴, 3×10¹⁴, 4×10¹⁴, 5×10¹⁴, 6×10¹⁴, 7×10¹⁴, 8×10¹⁴, 9×10¹⁴, 1×10¹⁵, 2×10¹⁵, 3×10¹⁵, 4×10¹⁵, 5×10¹⁵, 6×10¹⁵, 7×10¹⁵, 8×10¹⁵, 9×10¹⁵, or 1×10¹⁶ VG/mL.

[0844] In certain embodiments, the desired siRNA duplex dosage may be delivered using multiple administrations (e.g., two, three, four, five, six, seven, eight, nine, ten, eleven, twelve, thirteen, fourteen, or more administrations). When multiple administrations are employed, split dosing regimens such as those described herein may be used. As used herein, a “split dose” is the division of single unit dose or total daily dose into two or more doses, e.g., two or more administrations of the single unit dose. As used herein, a “single unit dose” is a dose of any modulatory polynucleotide therapeutic administered in one dose/at one time/single route/single point of contact, i.e., single administration event. As used herein, a “total daily dose” is an amount given or prescribed in a 24 hour period. It may be administered as a single unit dose. In one embodiment, the AAV particles comprising the modulatory polynucleotides of the present invention are administered to a subject in split doses. They may be formulated in buffer only or in a formulation described herein.

[0845] In one embodiment, the dose, concentration and/or volume of the composition described herein may be adjusted depending on the contribution of the caudate or putamen to cortical and subcortical distribution after administration. The administration may be intracerebroventricular, intraputamenal, intrathalmic, intraparenchymal, subpial, and/or intrathecal administration.

[0846] In one embodiment, the dose, concentration and/or volume of the composition described herein may be adjusted depending on the cortical and neuraxial distribution following administration by intracerebroventricular, intraputamenal, intrathalmic, intraparenchymal, subpial, and/or intrathecal delivery.

### IV. Methods and Uses of the Compositions of the Invention

[0847] Amyotrophic Lateral Sclerosis (ALS)

[0848] Amyotrophic Lateral Sclerosis (ALS)

[0849] Amyotrophic lateral sclerosis (ALS), an adult-onset neurodegenerative disorder, is a progressive and fatal disease characterized by the selective death of motor neurons in the motor cortex, brainstem and spinal cord. The incidence of ALS is about 1.9 per 100,000. Patients diagnosed with ALS develop a progressive muscle phenotype characterized by spasticity, hyperreflexia or hyporeflexia, fasciculations, muscle atrophy and paralysis. These motor impairments are caused by the denervation of muscles due to the loss of motor neurons. The major pathological features of ALS include degeneration of the corticospinal tracts and extensive loss of lower motor neurons (LMNs) or anterior horn cells (Ghatak et al., J Neuropathol Exp Neurol., 1986, 45, 385-395), degeneration and loss of Betz cells and other pyramidal cells in the primary motor cortex (Udaka et al., Acta Neuropathol, 1986, 70, 289-295; Maekawa et al., Brain, 2004, 127, 1237-1251) and reactive gliosis in the motor cortex and spinal cord (Kawamata et al., Am J Pathol., 1992, 140, 691-707; and Schiffer et al., J Neurol Sci., 1996, 139, 27-33). ALS is usually fatal within 3 to 5 years after the diagnosis due to respiratory defects and/or inflammation (Rowland L P and Shneibder N A, N Engl. J. Med., 2001, 344, 1688-1700).

[0850] A cellular hallmark of ALS is the presence of proteinaceous, ubiquitinated, cytoplasmic inclusions in degenerating motor neurons and surrounding cells (e.g., astrocytes). Ubiquitinated inclusions (i.e., Lewy body-like inclusions or Skein-like inclusions) are the most common and specific type of inclusion in ALS and are found in LMNs of the spinal cord and brainstem, and in corticospinal upper motor neurons (UMNs) (Matsumoto et al., J Neurol Sci., 1993, 115, 208-213; and Sasak and Maruyama, Acta Neuropathol., 1994, 87, 578-585). A few proteins have been identified to be components of the inclusions, including ubiquitin, Cu/Zn superoxide dismutase 1 (SOD1), peripherin and Dorfin. Neurofilamentous inclusions are often found in hyaline conglomerate inclusions (HCIs) and axonal ‘spheroids’ in spinal cord motor neurons in ALS. Other types and less specific inclusions include Bunina bodies (cystatin C-containing inclusions) and Crescent shaped inclusions (SCIs) in upper layers of the cortex. Other neuropathological features seen in ALS include fragmentation of the Golgi apparatus, mitochondrial vacuolization and ultrastructural abnormalities of synaptic terminals (Fujita et al., Acta Neuropathol. 2002, 103, 243-247).

[0851] In addition, in frontotemporal dementia ALS (FTD-ALS) cortical atrophy (including the frontal and temporal lobes) is also observed, which may cause cognitive impairment in FTD-ALS patients. ALS is a complex and multifactorial disease and multiple mechanisms hypothesized as responsible for ALS pathogenesis include, but are not limited to, dysfunction of protein degradation, glutamate excitotoxicity, mitochondrial dysfunction, apoptosis, oxidative stress, inflammation, protein misfolding and aggregation, aberrant RNA metabolism, and altered gene expression.

[0852] About 10%-15% of ALS cases have family history of the disease, and these patients are referred to as familial ALS (fALS) or inherited patients, commonly with a Mendelian dominant mode of inheritance and high penetrance. The remainder (approximately 85%-95%) is classified as sporadic ALS (sALS), as they are not associated with a documented family history, but instead are thought to be due to other risk factors including, but not limited to environmental factors, genetic polymorphisms, somatic mutations, and possibly gene-environmental interactions. In most cases, familial (or inherited) ALS is inherited as autosomal dominant disease, but pedigrees with autosomal recessive and X-linked inheritance and incomplete penetrance exist. Sporadic and familial forms are clinically indistinguishable suggesting a common pathogenesis. The precise cause of the selective death of motor neurons in ALS remains elusive. Progress in understanding the genetic factors in fALS may shed light on both forms of the disease.

[0853] Recently, an exploration into genetic causes of ALS has discovered mutations in more than 10 different genes that are known to cause fALS. The most common ones are found in the genes encoding Cu/Zn superoxide dismutase 1 (SOD1; ˜20%) (Rosen D R et al., Nature, 1993, 362, 59-62), fused in sarcoma/translated in liposarcoma (FUS/TLS; 1-5%) and TDP-43 (TARDBP; 1-5%). Recently, a hexanucleotide repeat expansion (GGGGCC)n in the C9orF72 gene was identified as the most frequent cause of fALS (˜40%) in the Western population (reviewed by Renton et al., Nat. Neurosci., 2014, 17, 17-23). Other genes mutated in ALS include alsin (ALS2), senataxin (SETX), vesicle-associated membrane protein (VAPB), and angiogenin (ANG). fALS genes control different cellular mechanisms, suggesting that the pathogenesis of ALS is complicated and may be related to several different processes finally leading to motor neuron degeneration.

[0854] Subjects with ALS and an identified mutation in a known ALS-causative gene may be referred to as having “genetically defined ALS.” Non-limiting examples of ALS-causative genes include SOD1, C9orf72, TARDBP (also termed TDP-43), FUS/TLS, OPTN, UBQLN2, PFN1, DCTN1, and TBK1.

[0855] SOD1 is one of the three human superoxide dismutases identified and characterized in mammals: copper-zinc superoxide dismutase (Cu/ZnSOD or SOD1), manganese superoxide dismutase (MnSOD or SOD2), and extracellular superoxide dismutase (ECSOD or SOD3). SOD1 is a 32 kDa homodimer of a 153-residue polypeptide with one copper- and one zinc-binding site per subunit, which is encoded by the SOD1 gene (GeneBank access No.: NM_000454.4; SEQ ID NO: 1254) on human chromosome 21. SOD1 catalyzes the reaction of superoxide anion (O²⁻) into molecular oxygen (O₂) and hydrogen peroxide (H₂O₂) at a bound copper ion. The intracellular concentration of SOD1 is high (ranging from 10 to 100 μM), accounting for 1% of the total protein content in the central nervous system (CNS). The protein is localized not only in the cytoplasm but also in the nucleus, lysosomes, peroxisomes, and mitochondrial intermembrane spaces in eukaryotic cells (Lindenau J et al., Glia, 2000, 29, 25-34).

[0856] Mutations in the SOD1 gene are carried by 15-20% of fALS patients and by 1-2% of all ALS cases. Currently, at least 170 different mutations distributed throughout the 153-amino acid SOD1 polypeptide have been found to cause ALS, and an updated list can be found at the ALS online Genetic Database (ALSOD) (Wroe R et al., Amyotroph Lateral Scler., 2008, 9, 249-250). Table 21 lists some examples of mutations in SOD1 in ALS. These mutations are predominantly single amino acid substitutions (i.e. missense mutations) although deletions, insertions, and C-terminal truncations also occur. Different SOD1 mutations display different geographic distribution patterns. For instance, 40-50% of all Americans with ALS caused by SOD1 gene mutations have a particular mutation Ala4Val (or A4V). The A4V mutation is typically associated with more severe signs and symptoms and the survival period is typically 2-3 years. The I113T mutation is by far the most common mutation in the United Kingdom. The most prevalent mutation in Europe is D90A substitute and the survival period is usually greater than 10 years.

TABLE 21
Examples of SOD1 mutations in ALS

| Location | Mutations |
|---|---|
| Exon1 (220 bp) | Q22L; E2IK, G; F20C; N19S; G16A, S; V14M, S; |
| | G12R; G1OG, V, R; L8Q, V; V7E; C6G, F; V5L; |
| | A4T, V, S |
| Exon2 (97 bp) | T54R; E49K; H48R, Q; V47F, A; H46R; F45C; H43R; |
| | G41S, D; G37R; V29, insA |
| Exon3 (70 bp) | D76Y, V, G72S, C; L67R, P66A; N65S; S59I, S |
| Exon4 (118 bp) | D124G, V; V118L, InsAAAAC; L117V; T116T; R115G; |
| | G114A; I113T, F; I112M, T; G108V; L106V, F; |
| | S106L, deITCACTC; I104F; D101G, Y, H, N, |
| | E100G, K; I99V, V97L, M; D96N, V, A95T, V; |
| | G93S, V, A, C, R, D; D90V, A; A89T, V; |
| | T88delACTGCTGAC, V87A, M; N861, S, D, K, |
| | G85R, S; L84V, F; H80R |
| Exon5 (461 bp) | I151T, S; I149T; V148I, G; G147D, R; C146R, stop; |
| | A145T, G; L144F, S; G141E, stop; A140A, G; |
| | N139D, K, H, N; G138E; T137R; S134N; E133V, |
| | delGAA, insTT; E132insTT; G127R, InsTGGG; |
| | L126S, delITT, stop; D126, delTT |

[0857] To investigate the mechanism of neuronal death associated with SOD1 gene defects, several rodent models of SOD1-linked ALS were developed in the art, which express the human SOD1 gene with different mutations, including missense mutations, small deletions or insertions. Non-limiting examples of ALS mouse models include SOD1^{G93A}, SOD1^{A4V}, SOD1^{G37R}, SOD1^{G85R}, SOD1^{D90A}, SOD1^{L84V}, SOD1^{I113T}, SOD1^{H36R/H48Q}, SOD1^{G127X}, SOD1^{L126X} and SOD1^{L126delTT}. There are two transgenic rat models carrying two different human SOD1 mutations: SOD1^{H46R} and SOD1^{G93R} These rodent ALS models can develop muscle weakness similar to human ALS patients and other pathogenic features that reflect several characteristics of the human disease, in particular, the selective death of spinal motor neurons, aggregation of protein inclusions in motor neurons and microglial activation. It is well known in the art that the transgenic rodents are good models of human SOD1-associated ALS disease and provide models for studying disease pathogenesis and developing disease treatment.

[0858] Studies in animal and cellular models showed that SOD1 pathogenic variants cause ALS by gain of function. That is to say, the superoxide dismutase enzyme gains new but harmful properties when altered by SOD1 mutations. For example, some SOD1 mutated variants in ALS increase oxidative stress (e.g., increased accumulation of toxic superoxide radicals) by disrupting the redox cycle. Other studies also indicate that some SOD1 mutated variants in ALS might acquire toxic properties that are independent of its normal physiological function (such as abnormal aggregation of misfolded SOD1 variants. In the aberrant redox chemistry model, mutant SOD1 is unstable and through aberrant chemistry interacts with nonconventional substrates causing overproduction of reactive oxygen species (ROS). In the protein toxicity model, unstable, misfolded SOD1 aggregates into cytoplasmic inclusion bodies, sequestering proteins crucial for cellular processes. These two hypotheses are not mutually exclusive. It has been shown that oxidation of selected histidine residues that bind metals in the active site mediates SOD1 aggregation.

[0859] The aggregated mutant SOD1 protein may also induce mitochondrial dysfunction (Vehvilainen P et al., Front Cell Neurosci., 2014, 8, 126), impairment of axonal transport, aberrant RNA metabolism, glial cell pathology and glutamate excitotoxicity. In some sporadic ALS cases, misfolded wild-type SOD1 protein is found in diseased motor neurons which forms a “toxic conformation” that is similar to that which is seen with familial ALS-linked SOD1 variants (Rotunno M S and Bosco D A, Front Cell Neurosci., 2013, 16, 7, 253). Such evidence suggests that ALS is a protein folding diseases analogous to other neurodegenerative diseases such as Alzheimer's disease and Parkinson's disease.

[0860] Currently, no curative treatments are available for patients suffering from ALS. The only FDA approved drug Riluzole, an inhibitor of glutamate release, has a moderate effect on ALS, only extending survival by 2-3 months if it is taken for 18 months. Unfortunately, patients taking riluzole do not experience any slowing in disease progression or improvement in muscle function.

[0861] Therefore, riluzole does not present a cure, or even an effective treatment. Researchers continue to search for better therapeutic agents.

[0862] Therapeutic approaches that may prevent or ameliorate SOD1 aggregation have been tested previously. For example, arimoclomol, a hydroxylamine derivative, is a drug that targets heat shock proteins, which are cellular defense mechanisms against these aggregates. Studies demonstrated that treatment with arimoclomol improved muscle function in SOD1 mouse models. Other drugs that target one or more cellular defects in ALS may include AMPA antagonists such as talampanel, beta-lactam antibiotics, which may reduce glutamate-induced excitotoxicity to motor neurons; Bromocriptine that may inhibit oxidative induced motor neuron death (e.g. U.S. Patent publication No. 20110105517; the content of which is incorporated herein by reference in its entirety); 1,3-diphenylurea derivative or multikinase inhibitor which may reduce SOD1 gene expression (e.g., U.S. Patent Publication No. 20130225642; the content of which is incorporated herein by reference in its entirety); dopamine agonist pramipexole and its anantiomer dexpramipexole, which may ameliorate the oxidative response in mitochondria; nimesulide, which inhibits cyclooxygenase enzyme (e.g., U.S. Patent Publication No. 20060041022; the content of which is incorporated herein by reference in its entirety); drugs that act as free radical scavengers (e.g. U.S. Pat. No. 6,933,310 and PCT Patent Publication No.: WO2006075434; the content of each of which is incorporated herein by reference in their entirety).

[0863] Another approach to inhibit abnormal SOD1 protein aggregation is to silence/inhibit SOD1 gene expression in ALS. It has been reported that small interfering RNAs for specific gene silencing of the mutated allele are therapeutically beneficial for the treatment of fALS (e.g., Ralgh G S et al., Nat. Medicine, 2005, 11(4), 429-433; and Raoul C et al., Nat. Medicine, 2005, 11(4), 423-428; and Maxwell M M et al., PNAS, 2004, 101(9), 3178-3183; and Ding H et al., Chinese Medical J., 2011, 124(1), 106-110; and Scharz D S et al., Plos Genet., 2006, 2(9), e140; the content of each of which is incorporated herein by reference in their entirety).

[0864] Many other RNA therapeutic agents that target the SOD1 gene and modulate SOD1 expression in ALS are taught in the art. Such RNA based agents include antisense oligonucleotides and double stranded small interfering RNAs. See, e.g., Wang H et al., J Biol. Chem., 2008, 283(23), 15845-15852); U.S. Pat. Nos. 7,498,316; 7,632,938; 7,678,895; 7,951,784; 7,977,314; 8,183,219; 8,309,533 and 8, 586, 554; and U.S. Patent publication Nos. 2006/0229268 and 2011/0263680; the content of each of which is herein incorporated by reference in their entirety.

[0865] The present invention provides AAV particles comprising modulatory polynucleotides comprising sequences encoding siRNA molecules targeting the SOD1 gene and methods for their design and manufacture. The AAV particles comprising the nucleic acid sequence encoding the siRNA molecules of the present invention may increase the delivery of active agents into motor neurons. The siRNA duplexes or encoding dsRNA targeting the SOD1 gene may be able to inhibit SOD1 gene expression (e.g., mRNA level) significantly inside cells; therefore, ameliorating SOD1 expression induced stress inside the cells such as aggregation of protein and formation of inclusions, increased free radicals, mitochondrial dysfunction and RNA metabolism.

[0866] Such siRNA mediated SOD1 expression inhibition may be used for treating ALS. According to the present invention, methods for treating and/or ameliorating ALS in a patient comprises administering to the patient an effective amount of AAV particle comprising a nucleic acid sequence encoding the siRNA molecules of the present invention into cells. The administration of the AAV particle comprising such a nucleic acid sequence will encode the siRNA molecules which cause the inhibition/silence of SOD1 gene expression.

[0867] In one embodiment, the AAV particle comprising the modulatory polynucleotide, reduce the expression of mutant SOD1 in a subject. The reduction of mutant SOD1 can also reduce the formation of toxic aggregates which can cause mechanisms of toxicity such as, but not limited to, oxidative stress, mitochondrial dysfunction, impaired axonal transport, aberrant RNA metabolism, glial cell pathology and/or glutamate excitotoxicity.

[0868] In one embodiment, the vector, e.g., AAV particles, reduces the amount of SOD1 in a subject in need thereof and thus provides a therapeutic benefit as described herein.

[0869] Methods of Treatment of ALS

[0870] Provided in the present invention are methods for introducing the AAV particles comprising modulatory polynucleotides comprising sequences comprising a nucleic acid sequence encoding the siRNA molecules of the present invention into cells, the method comprising introducing into said cells any of the vectors in an amount sufficient for degradation of target SOD1 mRNA to occur, thereby activating target-specific RNAi in the cells. In some aspects, the cells may be stem cells, neurons such as motor neurons, muscle cells and glial cells such as astrocytes.

[0871] Disclosed in the present invention are methods for treating ALS associated with abnormal SOD1 function in a subject in need of treatment. The method optionally comprises administering to the subject a therapeutically effective amount of a composition comprising at least AAV particles comprising modulatory polynucleotides comprising a nucleic acid sequence encoding the siRNA molecules of the present invention. As a non-limiting example, the siRNA molecules can silence SOD1 gene expression, inhibit SOD1 protein production, and reduce one or more symptoms of ALS in the subject such that ALS is therapeutically treated.

[0872] In some embodiments, the composition comprising the AAV particles comprising modulatory polynucleotides comprising a nucleic acid sequence encoding the siRNA molecules of the present invention is administered to the central nervous system of the subject. In other embodiments, the composition comprising the AAV particles comprising modulatory polynucleotides comprising a nucleic acid sequence encoding the siRNA molecules of the present invention is administered to the muscles of the subject

[0873] In particular, the AAV particles comprising modulatory polynucleotides comprising a nucleic acid sequence encoding the siRNA molecules of the present invention may be delivered into specific types of targeted cells, including motor neurons; glial cells including oligodendrocyte, astrocyte and microglia; and/or other cells surrounding neurons such as T cells. Studies in human ALS patients and animal SOD1 ALS models implicate glial cells as playing an early role in the dysfunction and death of motor neurons. Normal SOD1 in the surrounding, protective glial cells can prevent the motor neurons from dying even though mutant SOD1 is present in motor neurons (e.g., reviewed by Philips and Rothstein, Exp. Neurol., 2014, May 22. pii: 50014-4886(14)00157-5; the content of which is incorporated herein by reference in its entirety).

[0874] In some specific embodiments, the AAV particles comprising modulatory polynucleotides comprising a nucleic acid sequence encoding the siRNA molecules of the present invention may be used as a therapy for ALS.

[0875] In some embodiments, the present composition is administered as a solo therapeutics or combination therapeutics for the treatment of ALS.

[0876] The AAV particles comprising modulatory polynucleotides comprising a nucleic acid sequence encoding the siRNA molecules targeting the SOD1 gene may be used in combination with one or more other therapeutic agents. By “in combination with,” it is not intended to imply that the agents must be administered at the same time and/or formulated for delivery together, although these methods of delivery are within the scope of the present disclosure. Compositions can be administered concurrently with, prior to, or subsequent to, one or more other desired therapeutics or medical procedures. In general, each agent will be administered at a dose and/or on a time schedule determined for that agent.

[0877] Therapeutic agents that may be used in combination with the AAV particles comprising modulatory polynucleotides comprising a nucleic acid sequence encoding the siRNA molecules of the present invention can be small molecule compounds which are antioxidants, anti-inflammatory agents, anti-apoptosis agents, calcium regulators, antiglutamatergic agents, structural protein inhibitors, and compounds involved in metal ion regulation.

[0878] Compounds tested for treating ALS which may be used in combination with the vectors described herein include, but are not limited to, antiglutamatergic agents: Riluzole, Topiramate, Talampanel, Lamotrigine, Dextromethorphan, Gabapentin and AMPA antagonist; Anti-apoptosis agents: Minocycline, Sodium phenylbutyrate and Arimoclomol; Anti-inflammatory agent: ganglioside, Celecoxib, Cyclosporine, Azathioprine, Cyclophosphamide, Plasmaphoresis, Glatiramer acetate and thalidomide; Ceftriaxone (Berry et al., Plos One, 2013, 8(4)); Beat-lactam antibiotics; Pramipexole (a dopamine agonist) (Wang et al., Amyotrophic Lateral Scler., 2008, 9(1), 50-58); Nimesulide in U.S. Patent Publication No. 20060074991; Diazoxide disclosed in U.S. Patent Publication No. 20130143873); pyrazolone derivatives disclosed in US Patent Publication No. 20080161378; free radical scavengers that inhibit oxidative stress-induced cell death, such as bromocriptine (US. Patent Publication No. 20110105517); phenyl carbamate compounds discussed in PCT Patent Publication No. 2013100571; neuroprotective compounds disclosed in U.S. Pat. Nos. 6,933,310 and 8,399,514 and US Patent Publication Nos. 20110237907 and 20140038927; and glycopeptides taught in U.S. Patent Publication No. 20070185012; the content of each of which is incorporated herein by reference in their entirety.

[0879] Therapeutic agents that may be used in combination therapy with the AAV particles comprising modulatory polynucleotides comprising a nucleic acid sequence encoding the siRNA molecules of the present invention may be hormones or variants that can protect neuronal loss, such as adrenocorticotropic hormone (ACTH) or fragments thereof (e.g., U.S. Patent Publication No. 20130259875); Estrogen (e.g., U.S. Pat. Nos. 6,334,998 and 6,592,845); the content of each of which is incorporated herein by reference in their entirety.

[0880] Neurotrophic factors may be used in combination therapy with the AAV particles comprising modulatory polynucleotides comprising a nucleic acid sequence encoding the siRNA molecules of the present invention for treating ALS. Generally, a neurotrophic factor is defined as a substance that promotes survival, growth, differentiation, proliferation and/or maturation of a neuron, or stimulates increased activity of a neuron. In some embodiments, the present methods further comprise delivery of one or more trophic factors into the subject in need of treatment. Trophic factors may include, but are not limited to, IGF-I, GDNF, BDNF, CTNF, VEGF, Colivelin, Xaliproden, Thyrotrophin-releasing hormone and ADNF, and variants thereof.

[0881] In one aspect, the vector, e.g., AAV particle, encoding the nucleic acid sequence for the at least one siRNA duplex targeting the SOD1 gene may be co-administered with AAV particles expressing neurotrophic factors such as AAV-IGF-I (Vincent et al., Neuromolecular medicine, 2004, 6, 79-85; the content of which is incorporated herein by reference in its entirety) and AAV-GDNF (Wang et al., J Neurosci., 2002, 22, 6920-6928; the content of which is incorporated herein by reference in its entirety).

[0882] In some embodiments, the composition of the present invention for treating ALS is administered to the subject in need intravenously, intramuscularly, subcutaneously, intraperitoneally, intrathecally and/or intraventricularly, allowing the siRNA molecules or vectors comprising the siRNA molecules to pass through one or both the blood-brain barrier and the blood spinal cord barrier. In some aspects, the method includes administering (e.g., intraventricularly administering and/or intrathecally administering) directly to the central nervous system (CNS) of a subject (using, e.g., an infusion pump and/or a delivery scaffold) a therapeutically effective amount of a composition comprising AAV particles comprising modulatory polynucleotides comprising a nucleic acid sequence encoding the siRNA molecules of the present invention. The vectors may be used to silence or suppress SOD1 gene expression, and/or reducing one or more symptoms of ALS in the subject such that ALS is therapeutically treated.

[0883] In certain aspects, the symptoms of ALS include, but are not limited to, motor neuron degeneration, muscle weakness, muscle atrophy, the stiffness of muscle, difficulty in breathing, slurred speech, fasciculation development, frontotemporal dementia and/or premature death are improved in the subject treated. In other aspects, the composition of the present invention is applied to one or both of the brain and the spinal cord. In other aspects, one or both of muscle coordination and muscle function are improved. In other aspects, the survival of the subject is prolonged.

[0884] In one embodiment, administration of the AAV particles comprising modulatory polynucleotides comprising a nucleic acid sequence encoding the siRNA molecules of the present invention, to a subject may lower mutant SOD1 in the CNS of a subject. In another embodiment, administration of the AAV particles, to a subject may lower wild-type SOD1 in the CNS of a subject. In yet another embodiment, administration of the AAV particles, to a subject may lower both mutant SOD1 and wild-type SOD1 in the CNS of a subject. The mutant and/or wild-type SOD1 may be lowered by about 30%, 40%, 50%, 60%, 70%, 80%, 85%, 90%, 95% and 100%, or at least 20-30%, 20-40%, 20-50%, 20-60%, 20-70%, 20-80%, 20-90%, 20-95%, 20-100%, 30-40%, 30-50%, 30-60%, 30-70%, 30-80%, 30-90%, 30-95%, 30-100%, 40-50%, 40-60%, 40-70%, 40-80%, 40-90%, 40-95%, 40-100%, 50-60%, 50-70%, 50-80%, 50-90%, 50-95%, 50-100%, 60-70%, 60-80%, 60-90%, 60-95%, 60-100%, 70-80%, 70-90%, 70-95%, 70-100%, 80-90%, 80-95%, 80-100%, 90-95%, 90-100% or 95-100% in the CNS, a region of the CNS, or a specific cell of the CNS of a subject. As a non-limiting example, the AAV particles may lower the expression of wild-type SOD1 by at least 50% in the motor neurons (e.g., ventral horn motor neurons) and/or astrocytes. As another non-limiting example, the AAV particles may lower the expression of mutant SOD1 by at least 50% in the motor neurons (e.g., ventral horn motor neurons) and/or astrocytes. As yet another non-limiting example, the AAV particles may lower the expression of wild-type SOD1 and mutant SOD1 by at least 50% in the motor neurons (e.g., ventral horn motor neurons) and/or astrocytes.

[0885] In one embodiment, administration of the AAV particles, to a subject will reduce the expression of mutant and/or wild-type SOD1 in the spinal cord and the reduction of expression of the mutant and/or wild-type SOD1 will reduce the effects of ALS in a subject.

[0886] In one embodiment, the AAV particles may be administered to a subject who is in the early stages of ALS. Early stage symptoms include, but are not limited to, muscles which are weak and soft or stiff, tight and spastic, cramping and twitching (fasciculations) of muscles, loss of muscle bulk (atrophy), fatigue, poor balance, slurred words, weak grip, and/or tripping when walking. The symptoms may be limited to a single body region or a mild symptom may affect more than one region. As a non-limiting example, administration of the AAV particles may reduce the severity and/or occurrence of the symptoms of ALS.

[0887] In one embodiment, the AAV particles may be administered to a subject who is in the middle stages of ALS. The middle stage of ALS includes, but is not limited to, more widespread muscle symptoms as compared to the early stage, some muscles are paralyzed while others are weakened or unaffected, continued muscle twitchings (fasciculations), unused muscles may cause contractures where the joints become rigid, painful and sometimes deformed, weakness in swallowing muscles may cause choking and greater difficulty eating and managing saliva, weakness in breathing muscles can cause respiratory insufficiency which can be prominent when lying down, and/or a subject may have bouts of uncontrolled and inappropriate laughing or crying (pseudobulbar affect). As a non-limiting example, administration of the AAV particles may reduce the severity and/or occurrence of the symptoms of ALS.

[0888] In one embodiment, the AAV particles may be administered to a subject who is in the late stages of ALS. The late stage of ALS includes, but is not limited to, voluntary muscles which are mostly paralyzed, the muscles that help move air in and out of the lungs are severely compromised, mobility is extremely limited, poor respiration may cause fatigue, fuzzy thinking, headaches and susceptibility to infection or diseases (e.g., pneumonia), speech is difficult and eating or drinking by mouth may not be possible.

[0889] In one embodiment, the AAV particles may be used to treat a subject with ALS who has a C9orf72 mutation.

[0890] In one embodiment, the AAV particles may be used to treat a subject with ALS who has TDP-43 mutations.

[0891] In one embodiment, the AAV particles may be used to treat a subject with ALS who has FUS mutations.

[0892] In one embodiment, the AAV particle of the present invention comprises an AAVrh10 capsid and a self-complementary AAV viral genome comprising an H1 promoter, a stuffer sequence originating from a pLKO.1 lentiviral vector and a SOD1 targeting payload.

[0893] In one embodiment, the AAV particle of the present invention comprises an AAV2 capsid and a self-complementary AAV viral genome.

[0894] In one embodiment, the AAV particle of the present invention comprises an AAV2 capsid and a self-complementary AAV viral genome comprising an H1 promoter, a stuffer sequence originating from a pLKO.1 lentiviral vector and a SOD1 targeting payload.

### V. Definitions

[0895] Unless stated otherwise, the following terms and phrases have the meanings described below. The definitions are not meant to be limiting in nature and serve to provide a clearer understanding of certain aspects of the present invention.

[0896] As used herein, the term “nucleic acid”, “polynucleotide” and ‘oligonucleotide” refer to any nucleic acid polymers composed of either polydeoxyribonucleotides (containing 2-deoxy-D-ribose), or polyribonucleotides (containing D-ribose), or any other type of polynucleotide which is an N glycoside of a purine or pyrimidine base, or modified purine or pyrimidine bases. There is no intended distinction in length between the term “nucleic acid”, “polynucleotide” and “oligonucleotide”, and these terms will be used interchangeably. These terms refer only to the primary structure of the molecule. Thus, these terms include double- and single-stranded DNA, as well as double- and single stranded RNA.

[0897] As used herein, the term “RNA” or “RNA molecule” or “ribonucleic acid molecule” refers to a polymer of ribonucleotides; the term “DNA” or “DNA molecule” or “deoxyribonucleic acid molecule” refers to a polymer of deoxyribonucleotides. DNA and RNA can be synthesized naturally, e.g., by DNA replication and transcription of DNA, respectively; or be chemically synthesized. DNA and RNA can be single-stranded (i.e., ssRNA or ssDNA, respectively) or multi-stranded (e.g., double stranded, i.e., dsRNA and dsDNA, respectively). The term “mRNA” or “messenger RNA”, as used herein, refers to a single stranded RNA that encodes the amino acid sequence of one or more polypeptide chains.

[0898] As used herein, the term “RNA interfering” or “RNAi” refers to a sequence specific regulatory mechanism mediated by RNA molecules which results in the inhibition or interfering or “silencing” of the expression of a corresponding protein-coding gene. RNAi has been observed in many types of organisms, including plants, animals and fungi. RNAi occurs in cells naturally to remove foreign RNAs (e.g., viral RNAs). Natural RNAi proceeds via fragments cleaved from free dsRNA which direct the degradative mechanism to other similar RNA sequences. RNAi is controlled by the RNA-induced silencing complex (RISC) and is initiated by short/small dsRNA molecules in cell cytoplasm, where they interact with the catalytic RISC component argonaute. The dsRNA molecules can be introduced into cells exogenously. Exogenous dsRNA initiates RNAi by activating the ribonuclease protein Dicer, which binds and cleaves dsRNAs to produce double-stranded fragments of 21-25 base pairs with a few unpaired overhang bases on each end. These short double stranded fragments are called small interfering RNAs (siRNAs).

[0899] As used herein, the terms “short interfering RNA,” “small interfering RNA” or “siRNA” refer to an RNA molecule (or RNA analog) comprising between about 5-60 nucleotides (or nucleotide analogs) which is capable of directing or mediating RNAi. Preferably, a siRNA molecule comprises between about 15-30 nucleotides or nucleotide analogs, such as between about 16-25 nucleotides (or nucleotide analogs), between about 18-23 nucleotides (or nucleotide analogs), between about 19-22 nucleotides (or nucleotide analogs) (e.g., 19, 20, 21 or 22 nucleotides or nucleotide analogs), between about 19-25 nucleotides (or nucleotide analogs), and between about 19-24 nucleotides (or nucleotide analogs). The term “short” siRNA refers to a siRNA comprising 5-23 nucleotides, preferably 21 nucleotides (or nucleotide analogs), for example, 19, 20, 21 or 22 nucleotides. The term “long” siRNA refers to a siRNA comprising 24-60 nucleotides, preferably about 24-25 nucleotides, for example, 23, 24, 25 or 26 nucleotides. Short siRNAs may, in some instances, include fewer than 19 nucleotides, e.g., 16, 17 or 18 nucleotides, or as few as 5 nucleotides, provided that the shorter siRNA retains the ability to mediate RNAi. Likewise, long siRNAs may, in some instances, include more than 26 nucleotides, e.g., 27, 28, 29, 30, 35, 40, 45, 50, 55, or even 60 nucleotides, provided that the longer siRNA retains the ability to mediate RNAi or translational repression absent further processing, e.g., enzymatic processing, to a short siRNA. siRNAs can be single stranded RNA molecules (ss-siRNAs) or double stranded RNA molecules (ds-siRNAs) comprising a sense strand and an antisense strand which hybridized to form a duplex structure called siRNA duplex.

[0900] As used herein, the term “the antisense strand” or “the first strand” or “the guide strand” of a siRNA molecule refers to a strand that is substantially complementary to a section of about 10-50 nucleotides, e.g., about 15-30, 16-25, 18-23 or 19-22 nucleotides of the mRNA of the gene targeted for silencing. The antisense strand or first strand has sequence sufficiently complementary to the desired target mRNA sequence to direct target-specific silencing, e.g., complementarity sufficient to trigger the destruction of the desired target mRNA by the RNAi machinery or process.

[0901] As used herein, the term “the sense strand” or “the second strand” or “the passenger strand” of a siRNA molecule refers to a strand that is complementary to the antisense strand or first strand. The antisense and sense strands of a siRNA molecule are hybridized to form a duplex structure. As used herein, a “siRNA duplex” includes a siRNA strand having sufficient complementarity to a section of about 10-50 nucleotides of the mRNA of the gene targeted for silencing and a siRNA strand having sufficient complementarity to form a duplex with the other siRNA strand.

[0902] As used herein, the term “complementary” refers to the ability of polynucleotides to form base pairs with one another. Base pairs are typically formed by hydrogen bonds between nucleotide units in antiparallel polynucleotide strands. Complementary polynucleotide strands can form base pair in the Watson-Crick manner (e.g., A to T, A to U, C to G), or in any other manner that allows for the formation of duplexes. As persons skilled in the art are aware, when using RNA as opposed to DNA, uracil rather than thymine is the base that is considered to be complementary to adenosine.

[0903] However, when a U is denoted in the context of the present invention, the ability to substitute a T is implied, unless otherwise stated. Perfect complementarity or 100% complementarity refers to the situation in which each nucleotide unit of one polynucleotide strand can form hydrogen bond with a nucleotide unit of a second polynucleotide strand. Less than perfect complementarity refers to the situation in which some, but not all, nucleotide units of two strands can form hydrogen bond with each other. For example, for two 20-mers, if only two base pairs on each strand can form hydrogen bond with each other, the polynucleotide strands exhibit 10% complementarity. In the same example, if 18 base pairs on each strand can form hydrogen bonds with each other, the polynucleotide strands exhibit 90% complementarity.

[0904] As used herein, the term “substantially complementary” means that the siRNA has a sequence (e.g., in the antisense strand) which is sufficient to bind the desired target mRNA, and to trigger the RNA silencing of the target mRNA.

[0905] As used herein, “targeting” means the process of design and selection of nucleic acid sequence that will hybridize to a target nucleic acid and induce a desired effect.

[0906] The term “gene expression” refers to the process by which a nucleic acid sequence undergoes successful transcription and in most instances translation to produce a protein or peptide. For clarity, when reference is made to measurement of “gene expression”, this should be understood to mean that measurements may be of the nucleic acid product of transcription, e.g., RNA or mRNA or of the amino acid product of translation, e.g., polypeptides or peptides. Methods of measuring the amount or levels of RNA, mRNA, polypeptides and peptides are well known in the art.

[0907] As used herein, the term “mutation” refers to any changing of the structure of a gene, resulting in a variant (also called “mutant”) form that may be transmitted to subsequent generations. Mutations in a gene may be caused by the alternation of single base in DNA, or the deletion, insertion, or rearrangement of larger sections of genes or chromosomes.

[0908] As used herein, the term “vector” means any molecule or moiety which transports, transduces or otherwise acts as a carrier of a heterologous molecule such as the siRNA molecule of the invention.

[0909] A “viral genome” or “vector genome” or “viral vector” refers to a sequence which comprises one or more polynucleotide regions encoding or comprising a molecule of interest, e.g., a transgene, a polynucleotide encoding a polypeptide or multi-polypeptide or a modulatory nucleic acid such as small interfering RNA (siRNA). Viral genomes are commonly used to deliver genetic materials into cells. Viral genomes are often modified for specific applications. Types of viral genome sequence include retroviral viral genome sequences, lentiviral viral genome sequences, adenoviral viral genome sequences and adeno-associated viral genome sequences.

[0910] The term “adeno-associated virus” or “AAV” as used herein refers to any vector which comprises or derives from components of an adeno-associated vector and is suitable to infect mammalian cells, preferably human cells. The term AAV vector typically designates an AAV type viral particle or virion comprising a payload. The AAV vector may be derived from various serotypes, including combinations of serotypes (i.e., “pseudotyped” AAV) or from various genomes (e.g., single stranded or self-complementary). In addition, the AAV vector may be replication defective and/or targeted.

[0911] As used herein, the phrase “inhibit expression of a gene” means to cause a reduction in the amount of an expression product of the gene. The expression product can be a RNA molecule transcribed from the gene (e.g., an mRNA) or a polypeptide translated from an mRNA transcribed from the gene. Typically a reduction in the level of an mRNA results in a reduction in the level of a polypeptide translated therefrom. The level of expression may be determined using standard techniques for measuring mRNA or protein.

[0912] As used herein, the term “in vitro” refers to events that occur in an artificial environment, e.g., in a test tube or reaction vessel, in cell culture, in a Petri dish, etc., rather than within an organism (e.g., animal, plant, or microbe).

[0913] As used herein, the term “in vivo” refers to events that occur within an organism (e.g., animal, plant, or microbe or cell or tissue thereof).

[0914] As used herein, the term “modified” refers to a changed state or structure of a molecule of the invention. Molecules may be modified in many ways including chemically, structurally, and functionally.

[0915] As used herein, the term “synthetic” means produced, prepared, and/or manufactured by the hand of man. Synthesis of polynucleotides or polypeptides or other molecules of the present invention may be chemical or enzymatic.

[0916] As used herein, the term “transfection” refers to methods to introduce exogenous nucleic acids into a cell. Methods of transfection include, but are not limited to, chemical methods, physical treatments and cationic lipids or mixtures. The list of agents that can be transfected into a cell is large and includes, but is not limited to, siRNA, sense and/or anti-sense sequences, DNA encoding one or more genes and organized into an expression plasmid, proteins, protein fragments, and more.

[0917] As used herein, “off target” refers to any unintended effect on any one or more target, gene, or cellular transcript.

[0918] As used herein, the phrase “pharmaceutically acceptable” is employed herein to refer to those compounds, materials, compositions, and/or dosage forms which are, within the scope of sound medical judgment, suitable for use in contact with the tissues of human beings and animals without excessive toxicity, irritation, allergic response, or other problem or complication, commensurate with a reasonable benefit/risk ratio.

[0919] As used herein, the term “effective amount” of an agent is that amount sufficient to effect beneficial or desired results, for example, clinical results, and, as such, an “effective amount” depends upon the context in which it is being applied. For example, in the context of administering an agent that treats ALS, an effective amount of an agent is, for example, an amount sufficient to achieve treatment, as defined herein, of ALS, as compared to the response obtained without administration of the agent.

[0920] As used herein, the term “therapeutically effective amount” means an amount of an agent to be delivered (e.g., nucleic acid, drug, therapeutic agent, diagnostic agent, prophylactic agent, etc.) that is sufficient, when administered to a subject suffering from or susceptible to an infection, disease, disorder, and/or condition, to treat, improve symptoms of, diagnose, prevent, and/or delay the onset of the infection, disease, disorder, and/or condition.

[0921] As used herein, the term “subject” or “patient” refers to any organism to which a composition in accordance with the invention may be administered, e.g., for experimental, diagnostic, prophylactic, and/or therapeutic purposes. Typical subjects include animals (e.g., mammals such as mice, rats, rabbits, non-human primates such as chimpanzees and other apes and monkey species, and humans) and/or plants.

[0922] As used herein, the term “preventing” or “prevention” refers to delaying or forestalling the onset, development or progression of a condition or disease for a period of time, including weeks, months, or years.

[0923] The term “treatment” or “treating,” as used herein, refers to the application of one or more specific procedures used for the cure or amelioration of a disease. In certain embodiments, the specific procedure is the administration of one or more pharmaceutical agents. In the context of the present invention, the specific procedure is the administration of one or more siRNA molecules.

[0924] As used herein, the term “amelioration” or “ameliorating” refers to a lessening of severity of at least one indicator of a condition or disease. For example, in the context of neurodegeneration disorder, amelioration includes the reduction of neuron loss.

[0925] As used herein, the term “administering” refers to providing a pharmaceutical agent or composition to a subject.

[0926] As used herein, the term “neurodegeneration” refers to a pathologic state which results in neural cell death. A large number of neurological disorders share neurodegeneration as a common pathological state. For example, Alzheimer's disease, Parkinson's disease, Huntington's disease, and amyotrophic lateral sclerosis (ALS) all cause chronic neurodegeneration, which is characterized by a slow, progressive neural cell death over a period of several years, whereas acute neurodegeneration is characterized by a sudden onset of neural cell death as a result of ischemia, such as stroke, or trauma, such as traumatic brain injury, or as a result of axonal transection by demyelination or trauma caused, for example, by spinal cord injury or multiple sclerosis. In some neurological disorders, mainly one type of neuronal cell is degenerative, for example, medium spiny neuron degeneration in early ALS.

### VI. Equivalents and Scope

[0927] Those skilled in the art will recognize, or be able to ascertain using no more than routine experimentation, many equivalents to the specific embodiments in accordance with the invention described herein. The scope of the present invention is not intended to be limited to the above Description, but rather is as set forth in the appended claims.

[0928] In the claims, articles such as “a,” “an,” and “the” may mean one or more than one unless indicated to the contrary or otherwise evident from the context. Claims or descriptions that include “or” between one or more members of a group are considered satisfied if one, more than one, or all of the group members are present in, employed in, or otherwise relevant to a given product or process unless indicated to the contrary or otherwise evident from the context. The invention includes embodiments in which exactly one member of the group is present in, employed in, or otherwise relevant to a given product or process. The invention includes embodiments in which more than one, or the entire group members are present in, employed in, or otherwise relevant to a given product or process.

[0929] It is also noted that the term “comprising” is intended to be open and permits but does not require the inclusion of additional elements or steps. When the term “comprising” is used herein, the term “consisting of” is thus also encompassed and disclosed.

[0930] Where ranges are given, endpoints are included. Furthermore, it is to be understood that unless otherwise indicated or otherwise evident from the context and understanding of one of ordinary skill in the art, values that are expressed as ranges can assume any specific value or subrange within the stated ranges in different embodiments of the invention, to the tenth of the unit of the lower limit of the range, unless the context clearly dictates otherwise.

[0931] In addition, it is to be understood that any particular embodiment of the present invention that falls within the prior art may be explicitly excluded from any one or more of the claims. Since such embodiments are deemed to be known to one of ordinary skill in the art, they may be excluded even if the exclusion is not set forth explicitly herein. Any particular embodiment of the compositions of the invention (e.g., any antibiotic, therapeutic or active ingredient; any method of production; any method of use; etc.) can be excluded from any one or more claims, for any reason, whether or not related to the existence of prior art.

[0932] It is to be understood that the words which have been used are words of description rather than limitation, and that changes may be made within the purview of the appended claims without departing from the true scope and spirit of the invention in its broader aspects.

[0933] While the present invention has been described at some length and with some particularity with respect to the several described embodiments, it is not intended that it should be limited to any such particulars or embodiments or any particular embodiment, but it is to be construed with references to the appended claims so as to provide the broadest possible interpretation of such claims in view of the prior art and, therefore, to effectively encompass the intended scope of the invention.

### VII. Examples

### Example 1. SOD1 siRNA Design, Synthesis and Analysis

[0934] SOD1 siRNA Design

[0935] siRNA design is carried out to identify siRNAs targeting human SOD1 gene. The design uses the SOD1 transcripts for human (Genebank access NO. NM_000454.4 (SEQ ID NO: 1254).

[0936] The siRNA duplexes are designed to have 100% identity to the human SOD1 transcript for positions 2-18 of the antisense strand, and partial or 100% identity to the non-human primate SOD1 transcript for positions 2-18 of the antisense strand. In all siRNA duplexes, position 1 of the antisense strand is engineered to have a U and position 19 of the sense strand is engineered to have a C, in order to unpair the duplex at this position.

[0937] SOD1 siRNA Sequence Selection and Synthesis

[0938] Based on predicted selectivity of the antisense strand for human, cynomolgus and rhesus SOD1 genes, and lack of match of the seed sequence at positions 2-7 of the antisense strand to human sequences in miRBase20.0, sense human SOD1 derived oligonucleotides are synthesized and formed into duplexes. Examples of SOD1 derived oligonucleotides and duplexes can be found in Table 3 of International Patent Application No. PCT/US2015/060562, the contents of which is herein incorporated by reference in its entirety. The siRNA duplexes are then tested for in vitro inhibitory activity on endogenous SOD1 gene expression (SOD1 mRNA levels). The oligoribonucleotides are synthesized as described in Example 1, SOD1 siRNA synthesis, of International Patent Application No. PCT/US2015/060562, the contents of which is herein incorporated by reference in its entirety.

[0939] In Vitro Screening of SOD1 siRNAs

[0940] Human SOD1 targeting siRNAs are assayed for inhibition of endogenous SOD1 expression in HeLa cells, using the bDNA (branched DNA) assay to quantify SOD1 mRNA. Results from two dose assays are used to select a subset of SOD1 dsRNA duplexes for dose response experiments in 4 types of cultured cells to calculate IC₅₀'s.

[0941] Cell Culture, Transfection and Assays

[0942] HeLa cells are obtained from ATCC (ATCC in Partnership with LGC Standards, Wesel, Germany) and cultured in HAM's F-12 Medium (Biochrom GmbH, Berlin, Germany) supplemented to contain 10% fetal calf serum (Ultra-low IgG from GIBCO/Life Technologies) and 1% Pen/Strep (Biochrom GmbH, Berlin, Germany) at 37° C. in an atmosphere with 5% CO₂ in a humidified incubator.

[0943] For transfection with siRNA, HeLa cells are seeded at a density of 19,000-20,000 cells/well in 96-well plates. Transfection of siRNA is carried out with Lipofectamine 2000 (Invitrogen/Life Technologies) according to the manufacturer's instructions. For the two-dose screen, SOD1 siRNA concentrations of 1 nM or 0.1 nM are used. Dose response experiments are done with SOD1 siRNA concentrations of 10, 2.5, 0.6, 0.16, 0.039, 0.0098, 0.0024, 0.0006, 0.00015, and 0.000038 nM. Control wells are transfected with luciferase siRNA, Aha-1 siRNA, PLGF siRNA, or a control mix of unrelated siRNAs.

[0944] After a 24-hour incubation with siRNA, media is removed and cells are lysed and prepped for analysis by QuantiGene 2.0 and then bDNA data analysis as described in Example 2 of International Patent Application No. PCT/US2015/060562, the contents of which is herein incorporated by reference in its entirety.

### Example 2. In Vitro Screen of Selected SOD1 siRNAs Against Endogenous SOD1 mRNA Expression in SH-SY5Y Cells, U87 Cells and Primary Human Astrocytes

[0945] SH-SY5Y cells are obtained from ATCC (ATCC in Partnership with LGC Standards, Wesel, Germany) and cultured in Dulbecco's MEM (Biochrom GmbH, Berlin, Germany) supplemented to contain 15% FCS (Ultra-low IgG from GIBCO/Life Technologies), 1% L-Glutamine (Biochrom GmbH, Berlin, Germany) and 1% Pen/Strep (Biochrom GmbH, Berlin, Germany) at 37° C. in an atmosphere with 5% C02 in a humidified incubator.

[0946] U87MG cells are obtained from ATCC (ATCC in Partnership with LGC Standards, Wesel, Germany) and cultured in ATCC-formulated Eagle's Minimum Essential Medium (ATCC in Partnership with LGC Standards, Wesel, Germany) supplemented to contain 10% FCS (Ultra-low IgG from GIBCO/Life Technologies) and 1% Pen/Strep (Biochrom GmbH, Berlin, Germany) at 37° C. in an atmosphere with 5% C02 in a humidified incubator.

[0947] Primary human astrocytes are obtained from LONZA (Lonza Sales Ltd, Basel, Switzerland) and cultured in ABM Basal Medium (Lonza Sales Ltd, Basel, Switzerland) supplemented with AGM SingleQuot Kit (Lonza Sales Ltd, Basel, Switzerland) at 37° C. in an atmosphere with 5% C02 in a humidified incubator.

[0948] Transfection of SH-SY5Y cells, U87MG cells and primary human astrocytes with selected siRNAs, and quantitation of SOD1 and GAPDH mRNA levels with bDNA are performed in a similar manner to that described for HeLa cells, except that the transfection reagents are Lipofectamine2000 (Invitrogen/Life Technologies) for SH-SY5Y cells, RNAiMAX (Invitrogen/Life Technologies) for U87 cells, and Lipofectamine2000 (Invitrogen/Life Technologies) for primary human astrocytes.

### Example 3. siRNA Targeting SOD1

[0949] The passenger-guide strand duplexes of the SOD1 siRNA found to be efficacious are engineered into expression vectors and transfected into cells of the central nervous system or neuronal cell lines. Even though overhang utilized in the siRNA knockdown study is a canonical dTdT for siRNA, the overhang in the constructs may comprise any dinucleotide overhang.

[0950] The cells used may be primary cells or derived from induced pluripotent stem cells (iPS cells). SOD1 knockdown is then measured and deep sequencing performed to determine the exact passenger and guide strand processed from each construct administered in the expression vector. A guide to passenger strand ratio is calculated to determine the efficiency of knockdown, e.g., of RNA Induced Silencing Complex (RISC) processing.

[0951] The N-terminus is sequenced to determine the cleavage site and to determine the percent homogeneous cleavage of the target. It is expected that cleavage will be higher than 90 percent. HeLa cells are co-transfected in a parallel study to analyze in vitro knockdown of SOD1. A luciferase construct is used as a control to determine off-target effects.

[0952] Deep sequencing is again performed.

### Example 4. SOD1 siRNA Constructs in AAV-miRNA Vectors

[0953] The passenger-guide strand duplexes of the SOD1 siRNA are engineered into AAV-miRNA expression vectors. The construct from ITR to ITR, recited 5′ to 3′, comprises a mutant ITR, a promoter (either a CMV (which includes an SV40 intron or a beta-globin intron), a U6, H1 or the CBA promoter (which includes a CMVie enhancer, a CB promoter and an SV40 intron or a beta-globin intron)), the passenger and guide strand (with a loop between the passenger and guide strand, a 5′ flanking region before the passenger strand and a 3′ flanking region after the guide strand, a rabbit globin polyA and wild type ITR. In vitro and in vivo studies are performed to test the efficacy of the AAV-miRNA expression vectors.

[0954] Exemplary ITR to ITR sequences are shown in Table 22. These sequences comprise either a CBA promoter with a beta-globin intron or a CMV promoter with a beta globin (0-Globin) intron as well as a modulatory polynucleotide including a 5′ flanking region, passenger strand, loop, guide strand and a 3′ flanking region.

TABLE 22
ITR to ITR Sequences

| | | | Modulatory | Modulatory |
|---|---|---|---|---|
| Construct | | ITR to ITR | Polynucleotide Name | Polynucleotide |
| Name | ITR to ITR Promoter and Intron | SEQ ID NO | Description | SEQ ID |
| VOYSOD1 | CBA promoter; β-Globin intron | 1414 | VOYmiR-127.860 | 1326 |
| VOYSOD2 | CMV promoter; β-Globin intron | 1415 | VOYmiR-127.860 | 1326 |
| VOYSOD3 | CBA promoter; β-Globin intron | 1416 | VOYmiR-114.861 | 1327 |
| VOYSOD4 | CMV promoter; β-Globin intron | 1417 | VOYmiR-114.861 | 1327 |

### Example 5. Activity of Constructs

[0955] HeLa Cells

[0956] SOD1 siRNA constructs and a control are transfected in HeLa cells at a MOI of 1e4 vg/cell, 1e3 vg/cell, or 1e2 vg/cell to test the activity of the constructs. After 48-72 hours the endogenous mRNA expression is evaluated using methods known in the art.

[0957] HEK293 Cells

[0958] SOD1 siRNA constructs and a control are transfected into HEK293 cells at a MOI of 1e4 vg/cell, 1e3 vg/cell, or 1e2 vg/cell to test the activity of the constructs. After 24-48 hours the endogenous mRNA expression is evaluated using methods known in the art.

[0959] Human Motor Neuron Progenitors (HMNPs)

[0960] SOD1 siRNA constructs and a control are transfected into human motor neuron progenitor (HMNP) cells at a MOI of 1e4 vg/cell, 1e3 vg/cell, or 1e2 vg/cell to test the activity of the constructs. After 48 hours the endogenous mRNA expression is evaluated using methods known in the art.

[0961] U251MG

[0962] SOD1 siRNA constructs and a control are transfected into the human astrocyte cell line U251MG at a MOI of 1e4 vg/cell, 1e3 vg/cell, or 1e2 vg/cell to test the activity of the constructs. After 48-60 hours the endogenous mRNA expression is evaluated using methods known in the art.

[0963] Human Astrocyte (HA)

[0964] SOD1 siRNA constructs and a control are transfected into primary human astrocyte cells at a MOI of 1e4 vg/cell, 1e3 vg/cell, or 1e2 vg/cell to test the activity of the constructs. After 48-60 hours the endogenous mRNA expression is evaluated using methods known in the art.

### Example 6. SOD1 Knock-Down In Vivo

[0965] Self-complementary pri-miRNAs are packaged in AAV and are administered by a 10 minute intrastriatal infusion. Female or male Tg(SOD1)3Cje/J mice (Jackson Laboratory, Bar Harbor, ME), which express human SOD1, and of approximately 20-30 g body weight, receive unilateral injections of 5 uL test article which is targeted to the striatum (anteroposterior+0.5 mm, mediolateral+2 mm, relative to bregma; dorsoventral 3.8 mm, relative to skull surface). Test articles are injected (5 animals per test article) at 0.5 uL/min. using pre-filled, pump-regulated Hamilton micro-syringes (1701 model, 10 μl) with 33 gauge needles. At 1, 2, 3, 4 or 6 weeks following the injection, animals are sacrificed, brains are removed, and ipsilateral striata encompassing the infusion site from a 1 mm coronal slab, as well as striatal tissue from the adjacent 1 mm coronal slabs are dissected and flash frozen. Mouse tissue samples are lysed, and human SOD1 protein levels, and SOD1 and mouse GAPDH (mGAPDH) mRNA levels are quantified. SOD1 protein levels are quantified by ELISA (eBioscience (Affymetrix, San Diego, CA)), and total protein levels are quantified by BCA analysis (ThermoFisher Scientific, Waltham, MA). For each tissue sample, the level of SOD1 protein normalized to total protein is calculated as an average of 2 determinations. These normalized SOD1 protein levels are further normalized to the vehicle group, then averaged to obtain a group (treatment) average. SOD1 and mGAPDH mRNA levels are quantified by qRT-PCR. For each tissue sample, the ratio of SOD1/mGAPDH (normalized SOD1 mRNA level) is calculated as an average of 3 determinations. These ratios are then averaged to obtain a group (treatment) average. These group averages are further normalized to the vehicle group.

[0966] In non-human primates, test articles (1×10¹³-3×10¹³ vg of pri-miRNA packaged in AAV) or vehicle are administered by intrathecal lumbar bolus. Female cynomolgus monkeys (Macaca fascicularis, CR Research Model Houston, Houston, TX) of approximately 2.5-8.5 kg body weight, receive implanted single intrathecal catheters with the tip of the catheter located at the lumbar spine. Test articles are administered (4 animals per test article) three 1 mL bolus injections (1 mL/minute), at approximately 60 minute intervals. At 4 to 6 weeks following the administration, animals are sacrificed, and selected tissues harvested for bioanalytical and histological evaluation. SOD1 protein and mRNA levels are assessed for suppression after treatment with pri-miRNA packaged in AAV-DJ with a CBA promoter, relative to the vehicle group.

### Example 7. SOD1 Knock-Down In Vivo

[0967] hSOD1 Transgenic Mice

[0968] Self-complementary pri-miRNAs targeting SOD1 as described herein were packaged in AAV-DJ. Female or male Tg(SOD1)3Cje/J mice (Jackson Laboratory, Bar Harbor, ME) (n=11-13/group), which express human SOD1 received a single unilateral injection of 5 uL vector comprising self-complementary pri-miRNA targeting SOD1 (VOYmir102.860, VOYmir104.861, VOYmir109.861, VOYmir109.866, VOYmir116.860, VOYmir116.866, VOYmir127.860, VOYmir127.866, VOYmir109.860, VOYmir114.861, VOYmir114.860, or VOYmir102.861; Table 23 and Table 24) packaged in AAV-DJ, or vehicle which was targeted to the striatum. Test articles were injected at 0.5 uL/min with 3.1 to 6.4×10¹² vg/ml vector concentrations (total doses were 1.5 to 3.2×10¹⁰ vg) using pre-filled, pump-regulated Hamilton micro-syringes (1701 model, 10 μl) with 33-gauge needles. At 22 (n=6) or 29 (n=5 to 7) days following the injection, animals were sacrificed, brains were removed, and ipsilateral striata encompassing the infusion site from a 1 mm coronal slab, as well as striatal tissue from the adjacent 1 mm coronal slabs were dissected and flash frozen. The striatum tissue samples from adjacent 1 mm coronal slabs were pooled for each hemisphere and used for hSOD1 mRNA quantification. The striatum tissue samples from the infusion site were collected and used for hSOD1 protein quantification. SOD1 and mGAPDH mRNA levels were quantified by qRT-PCR. Total RNA was extracted from striatal tissue samples using the RNeasy Mini Kit according to the manufacturer's protocol (QIAGEN). Complementary DNA synthesis was performed by reverse transcription using the High-Capacity cDNA Reverse Transcription Kit (Applied Biosystems). All TaqMan assays and master mixes were ordered from Life Technologies and used according to the manufacturer's recommendations. RT-qPCR was performed using the LightCycler 48011 (Roche) or the CFX384 real-time system (BIO-RAD) and data were analyzed with the ΔΔCT method. hSOD1 mRNA levels were normalized to mGAPDH mRNA levels, and then further normalized to the vehicle control group. These group averages were calculated to obtain a group (treatment) average. SOD1 protein levels were quantified by ELISA (eBioscience (Affymetrix, San Diego, CA)), and total protein levels were quantified by BCA analysis (ThermoFisher Scientific, Waltham, MA). The SOD1 protein levels were normalized to the vehicle group, then averaged to obtain a group (treatment) average. Along with the dose, the results for days 22 and 29 are shown below in Table 23 (qRT-PCR mRNA) and Table 24 (ELISA protein).

TABLE 23
Modulatory Polynucleotide, Dose, and qRT-PCR mRNA Results

| | |
|---|---|
| | SOD1 mRNA |
| Modulatory | normalized to GAPDH |
| Polynucleotide | (% of Vehicle ± SD) |

| Name | Dose | Day 22 | Day 29 |
|---|---|---|---|
| VOYmir102.860 | 1.9E10 | 92 ± 25 | 66 ± 13 |
| VOYmir104.861 | 2.3E10 | 94 ± 20 | 66 ± 8 |
| VOYmir109.861 | 2.1E10 | 74 ± 3 | 65 ± 7 |
| VOYmir109.866 | 2.4E10 | 93 ± 10 | 87 ± 16 |
| VOYmir116.860 | 2.5E10 | 68 ± 10 | 62 ± 13 |
| VOYmir116.866 | 2.8E10 | 83 ± 6 | 82 ± 9 |
| VOYmir127.860 | 2.9E10 | 47 ± 5 | 54 ± 32 |
| VOYmir127.866 | 3.2E10 | 98 ± 20 | 64 ± 8 |
| VOYmir109.860 | 1.7E10 | 64 ± 14 | 56 ± 8 |
| VOYmir114.861 | 3.2E10 | 58 ± 6 | 64 ± 5 |
| VOYmir114.860 | 1.5E10 | 78 ± 6 | 55 ± 14 |
| VOYmir102.861 | 1.9E10 | 77 ± 13 | 68 ± 15 |
| N/A (Vehicle only) | 0 | 100 ± 19 | 100 ± 9 |

TABLE 24
Modulatory Polynucleotide, Dose, and EL1SA Protein Results

| | |
|---|---|
| | SOD1 miRNA |
| Modulatory | normalized to Vehicle |
| Polynucleotide | (% of Vehicle ± SD) |

| Name | Dose | Day 22 | Day 29 |
|---|---|---|---|
| VOYmir102.860 | 1.9E10 | 90.3 ± 5.2 | 80.8 ± 3.6 |
| VOYmir104.861 | 2.3E10 | 88.8 ± 9.4 | 73.1 ± 5 |
| VOYmir109.861 | 2.1E10 | 103.7 ± 16.3 | 70.7 ± 2.5 |
| VOYmir109.866 | 2.4E10 | 129.8 ± 17.6 | 75.8 ± 6.9 |
| VOYmir116.860 | 2.5E10 | 103.4 ± 9.8 | 77.2 ± 5.9 |
| VOYmir116.866 | 2.8E10 | 94.0 ± 6.1 | 83.0 ± 4.2 |
| VOYmir127.860 | 2.9E10 | 75.3 ± 8.6 | 75.9 ± 14.4 |
| VOYmir127.866 | 3.2E10 | 87.8 ± 8.2 | 76.9 ± 5.9 |
| VOYmir109.860 | 1.7E10 | 89.2 ± 5.3 | 80.2 ± 3.7 |
| VOYmir114.861 | 3.2E1.0 | 86.1 ± 4.4 | 78.0 ± 3.6 |
| VOYmir114.860 | 1.5E10 | 81.4 ± 6.6 | 88.2 ± 5.5 |
| VOYmir102.861 | 1.9E10 | 87.5 ± 2.8 | 92.4 ± 5.2 |
| N/A (Vehicle only) | 0 | 100 ± 11.7 | 100 ± 7.8 |

[0969] VOYmiR127.860 and VOYmiR114.861 packaged in AAV-DJ resulted in the greatest SOD1 mRNA suppression of 53% (p<0.0001) and 42% (p<0.001) reduction at 22 days, respectively, and 46% (p<0.0001) and 36% (p<0.001) reduction at 29 days respectfully, relative to the vehicle group. VOYmiR127.860 and VOYmiR114.861 packaged in AAV-DJ also resulted in protein suppression of 25% (p<0.001) and 14% reduction at 22 days, respectively, and 24% (p<0.0001) and 22% (p<0.0001) reduction at 29 days, respectively, relative to the vehicle group.

[0970] Additionally, deep sequencing was performed for VOYmiR127.860 and VOYmiR114.861 packaged in AAV-DJ, from mouse striatum samples (n=2-3) 4 weeks after a single unilateral injection of 5 uL of vector at 0.5 ul/min, for a total dose of 2.9E10 vg for VOYmiR127.860 or 3.2E10 vg for VOYmiR114.861. In brief, total RNA from striatum was isolated using mirVana miRNA Isolation kit (Cat #AM1560, ThermoFisher Scientific, Waltham, MA). Small RNA sequencing libraries were prepared using Illumina TruSeq Small RNA library Prep Kit (Cat #RS-200-0012, Illumina, San Diego, CA), starting from 1 μg RNA, according to the manufacturer's protocol. Libraries were pooled and sequenced on the Illumina HiSeq2500. The results showed high guide: passenger ratios (99 for VOYmiR127.860 and 11.5 for VOYmiR114.861) demonstrating that the primary miRNA is processed primarily to the guide strand (the strand targeting SOD1 mRNA for RNAi-mediated reduction) with relatively low levels of the passenger strand. Low levels of guide and passenger strands relative to the total endogenous pool of miRNAs (0.3% for both VOYmiR127.860 and VOYmiR114.861) was also measured.

[0971] In an additional study, transgenic mice expressing human wild-type SOD1 (C57BL/6-Tg(SOD1)3Cje/J) (n=4-5 per group) were treated with self-complementary pri-miRNA targeting SOD1 (VOYmiR127.860 or VOYmiR114.861) packaged in AAVrh10, or vehicle by a single unilateral intrastriatal infusion of 5 ul of vector (1.6×10¹² vg/ml) at 0.5 ul/min, for a total dose of 8×10⁹ vg). Three weeks after dosing, striatal tissues from the site of administration were evaluated for SOD1 mRNA suppression by the same RT-qPCR method as described above. Treatment with VOYmiR127.860 packaged in AAVrh10 resulted in the suppression of SOD1 mRNA by 36±17.5% (average±SD) (p<0.01). Treatment with VOYmiR11.861 packaged in AAVrh10 resulted in the suppression of SOD1 mRNA by 30±9.7% (average±SD) (p<0.01).

[0972] Non-Human Primates

[0973] In non-human primates, self-complementary pri-miRNA targeting SOD1 (VOYmiR127.860) packaged in AAVrh10 at 1.1×10¹³ vg/ml, or vehicle was administered by intrathecal lumbar infusion. Four female cynomolgus monkeys (Macaca fascicularis, CR Research Model Houston, Houston, TX) of approximately 2.5-8.5 kg body weight, received implanted single intrathecal catheters with the tip of the catheter located at the lumbar spine. Test articles were administered two 2.5 mL IT lumbar (L1) injections (over 20 minutes in the Trendelenburg position) 6 hours apart. The total dose administered was 5.4×10¹³ vg per animal. Tolerability as assessed by body weight, clinical signs, clinical pathology, cerebral spinal fluid (CSF) chemistry, and CSF total cell counts was evaluated, as well as neutralizing antibodies in serum and CSF before and after dosing, as described below. At four weeks following the administration, animals were sacrificed, and selected tissues were harvested for evaluation of SOD1 mRNA by RT-qPCR, co-detection of vector genomes (Vg) and cynomolgus SOD1 mRNA by duplex RNAscope in situ hybridization assay, vector genome levels by droplet digital PCR, precision and efficiency of pri-miRNA processing by deep sequencing, and histopathology, as described below.

[0974] All animals survived until the scheduled termination. There were no significant test article-related effects of VOYmiR127.860 packaged in AAVrh10 on body weight, clinical signs, clinical pathology (comprising serum chemistry, hematology, and coagulation on Day 15 and Day 29), cerebral spinal fluid (CSF) chemistry, or CSF total cell counts on Day 29.

[0975] Serum and CSF samples were evaluated for neutralizing antibodies at approximately one week prior to dosing, approximately Day 15 (serum only) and approximately Day 29 at the time of necropsy, using a functional in vitro assay that quantifies inhibition of AAVrh10.GFP (green fluorescent protein) infection using flow cytometric analysis. Nonhuman primates were pre-screened for absent or minimal circulating neutralizing antibodies in serum prior to enrollment into the study. Neutralizing antibodies were evaluated again in both serum and CSF samples at approximately 1 week prior to dosing, confirming the absence or minimal circulating neutralizing antibodies in all but three animals. On Day 15 and Day 29 post-dosing, there were significant neutralizing antibodies present in both serum and CSF of all animals.

[0976] SOD1 mRNA levels were assessed for suppression after treatment with pri-miRNA VOYmiR127.860 packaged in AAVrh10, relative to the vehicle group. RT-qPCR on laser captured lumbar and sacral motor neurons was evaluated (approximately 500 motor neurons per pool for the lumbar samples and 250 motor neurons per pool for the sacral samples). For laser captured motor neuron samples, SOD1 mRNA, levels of a motor neuron specific gene (choline acetyltransferase (ChAT)), and two reference genes (alanyl-tRNA synthetase (AARS) and Beta-actin (ACTB)) were determined by qRT-PCR. hSOD1 mRNA levels were normalized to the geometric mean of the two reference gene mRNA levels, and then expressed relative to the vehicle control group. Intrathecal infusion of pri-miRNA VOYmiR127.860 packaged in AAVrh10, resulted in 33+/−17.8% (average±SD, p<0.05) and 78+/−12.7% (average±SD, p<0.0001) suppression of SOD1 mRNA in laser captured motor neurons from the lumbar and sacral spinal cord, respectively, relative to the vehicle group.

[0977] In addition, a duplex RNAscope in situ hybridization (ISH) assay was used for co-detection of vector genomes (Vg) and cynomolgus SOD1 mRNA in motor neurons in the non-human primate lumbar spinal cord after treatment with pri-miRNA VOYmiR127.860 packaged in AAVrh10, relative to the vehicle group. RNA ISH for vg and cynomolgus SOD1 was performed on an automation platform using the RNAscope 2.5 LS Duplex Reagent Kit (Advanced Cell Diagnostics, Inc., Newark, CA) according to the manufacturer's instructions. Briefly, 5 μm formalin fixed, paraffin embedded (FFPE) tissue sections were pretreated with heat and protease prior to hybridization with the target oligo probes. Preamplifier, amplifier and HRP/AP-labels oligo was then hybridized sequentially, followed by chromogenic precipitate development. Each sample was quality controlled for RNA integrity with a RNAscope probe specific to PPIB/POLR2A RNA and for background with a probe specific to bacterial dapB RNA. Specific RNA staining signal was identified as green (C1) and red (C2), punctate dots. Samples were counterstained with Mayer's Hematoxylin. Visual scoring was performed by a qualified scientist to assign a single score to a sample based on the average number of dots per cell throughout the entire sample. SOD1 expression levels in the Vg+ lumbar motor neurons were scored and there was a 53+/−11.2% (average±SD, p=0.0002) reduction of SOD1 signal observed in Vg+ lumbar motor neurons from animals treated with pri-miRNA VOYmiR127.860 packaged in AAVrh10, as compared to vehicle control lumbar motor neurons. In contrast, there was a 10+/−13.4% (average±SD, p=0.17) reduction of SOD1 signal observed in Vg-lumbar motor neurons from animals treated with pri-miRNA VOYmiR127.860 packaged in AAVrh10, as compared to vehicle control lumbar motor neurons.

[0978] Shown in Table 25 and Table 26 are the levels of the vector genome in different tissues. Vector genome was determined by Droplet Digital PCR (ddPCR). Briefly, DNA was purified from LCM samples with DNA Clean and Concentrator Kit (Zymoresearch) and whole cell DNA was prepared from tissue by DNeasy Blood and Tissue Kit (Qiagen, catalog #69506) under the conditions recommended by the manufacturer. This DNA was used as template in ddPCR reactions utilizing QX200 Droplet Digital PCR System (Bio-Rad). Briefly, reactions comprised of template, 2× Supermix (BioRad, catalog #1863023), HindIII restriction endonuclease (New England Biolabs) and oligonucleotide probesets with homology specific to the vector (FAM labelled) and non-human primate host RNaseP gene (VIC labelled, [ThermoFisher Scientific, #4403328]) were set up. Reactions were incorporated into droplets with Bio-Rad Automatic Droplet Generator with conditions and reagents recommended by the manufacturer. Droplets underwent 40 cycles of thermocycling to endpoint. After PCR was complete, samples were read on QX200 Droplet Reader (Bio-Rad). Data were analyzed by QuantaSoft software to yield copies/reaction of each target. Vector genome distribution was reported as copies of vector genome per diploid cell (VG/DC) by normalizing the copies of vector to half the copies of host. Included in the tables are the averaged group data with and without the neutralizing antibody-positive animals. The presence of neutralizing antibodies did not diminish the VG/DC levels in the CNS tissues sampled, whereas the VG/DC levels in peripheral tissues were lower than in animals that were negative for neutralizing antibodies. In the laser captured motor neurons (approximately 75 motor neurons per pool), significant vector genomes averaging 13.64 VG/DC were measured. In spinal cord white matter sections (depleted of ventral horn gray matter and pia), average (all 4 animals) levels of 35.4 vg/dc were observed. In the liver, the vg levels averaged 120.36+/−121.01 VG/DC (all 4 animals) whereas the sero-negative animals averaged 224.75+/−4.23 VG/DC. Vector genome levels in heart, lung, kidney, and ovary were markedly lower than those observed in liver or spinal cord white matter, with the levels in ovary and kidney at or approaching the limit of detection for the assay.

TABLE 25
Biodistribution by Vector Genome Determination in Nonhuman Primate Peripheral Tissues

| | Number of | Average Vector genomes/cell (VG/DC) | | | | |
|---|---|---|---|---|---|---|
| Construct | animals | Liver | Heart | Lung | Ovary | Kidney |
| Vehicle | 4 | 1.95 +/− 0.01 | 1.97 +/− 0.01 | 1.99 +/− 0.00 | 1.98 +/− 0.02 | 1.97 +/− 0.01 |
| VOYmiR127.860 | 4 | 120.36 +/− 121.01 | 3.30 +/− 1.90 | 2.69 +/− 0.82 | 2.03 +/− 0.07 | 2.19 +/− 0.19 |
| | 2 (without | 224.75 +/− 4.23 | 4.60 +/− 2.02 | 3.29 +/− 0.74 | 2.09 +/− 0.02 | 2.24 +/− 0.25 |
| | neutralizing | | | | | |
| | antibody-positive | | | | | |
| | animals) | | | | | |

TABLE 26
Biodistribution by Vector Genome Determination in
Nonhuman Primate Spinal Cord Samples

| | | Average Vector genomes/cell (VG/DC) | | |
|---|---|---|---|---|
| | Number of | | | Laser Captured |
| Construct | animals | Pia Mater | White Matter | Motor Neurons |
| Vehicle | 4 | 1.96 +/− 0.01 | 1.97 +/− 0.07 | 1.58 +/− 0.63 |
| VOYmiR127.860 | 4 | 201.84 +/− 107.93 | 35.40 +/− 8.59 | 13.64 +/− 11.67 |
| | 2 (without | 141.82 +/− 85.84 | 31.86 +/− 4.14 | 6.59 |
| | neutralizing | | | |
| | antibody-positive | | | |
| | animals) | | | |

[0979] Precision and efficiency of pri-miRNA processing was evaluated by deep sequencing of ventral horn punches from the lumbar spinal cord, using the same methods as described above. These results showed that treatment with VOYmiR127.860 packaged in AAVrh10 resulted in a high guide to passenger ratio (>30.5), a high percentage of miRNAs with precise processing at the 5′ end (90.7+/−4.5%), and a low level of guide and passenger strands relative to the total endogenous pool of miRNAs (0.00096+/−0.00054%).

[0980] Histology was conducted on animals euthanized on Day 29. No animals in any treatment group had gross lesions at necropsy. Microscopic histopathology was conducted on spinal cord and liver, and no histopathological findings related to VOYmiR127.860 packaged in AAVrh10 were detected.

### Example 8. SOD1 Knock-Down Mammalian Studies

[0981] Pharmacology and Efficacy

[0982] To study the efficacy and pharmacology of the VOYmiR127.860, studies will be conducted in SOD1-G93A mouse models of ALS.

[0983] Mice will be administered by IT administration of at least 2 dosage levels (low and high vg). Alternatively, IV dosing will be used as a surrogate route of administration.

[0984] For the pharmacology study, three groups of 10 mice/group, approximately 40 to 50 days of age and balanced for gender, will receive vehicle or VOYmiR127.860 packaged in AAVrh10 at either high or low dose levels. All animals will be euthanized after four weeks and spinal cord tissue samples will be evaluated for SOD1 suppression by RT-qPCR. Body weights and cage-side observation will also be collected.

[0985] After the pharmacology study, an efficacy study of VOYmiR127.860 packaged in AAVrh10 will be conducted in SOD1-G93A mice. Two groups of approximately 32 mice/group, approximately 40 to 50 days of age and balanced for gender will receive vehicle or VOYmiR127-860 packaged in AAVrh10 at a high or low dose level. Endpoints will include body weight, neurological monitoring, and survival. Spinal cord tissue samples will also be evaluated for SOD1 suppression by RT-qPCR.

[0986] Pharmacology, Toxicity, and Biodistribution Study in NHPs

[0987] In order to evaluate the safety and distribution of VOYmiR127.860 packaged in AAVrh10, a study in NHP with a one-time IT infusion, will be conducted. Three time points—4, 13 and 26 weeks—will be evaluated. The 4-week survival period after a one-time dose is intended to provide sufficient time for SOD1 suppression to be attained and to provide information on the short-term effects of VOYmiR127.860 packaged in AAVrh10. The 13-week and 26-week time points is intended to provide information on the long-term effects of VOYmiR127.860 packaged in AAVrh10. Prior to enrollment, animals will be screened for the presence of neutralizing antibodies to the AAVrh10 capsid, as well as for abnormal serum chemistry profiles. Three dose levels will be tested. A control of vehicle only will also be tested.

[0988] Vector genomes will be quantified in all of the dose groups at 4 weeks. Tissues that have no detectable vector genomes at four weeks will not be evaluated at the 13-week or 26-week time points. Tissues that have detectable vector genomes at four weeks will be evaluated at the 13-week time point. All tissues and organs will be archived for possible vg quantification.

[0989] Primary outcome measures will include a PCR analysis of vector genomes within different CNS regions and major peripheral organs, including heart and lungs, a histopathological assessment of target and non-target tissues that have significant vector genome levels, and clinical pathology including serum chemistry, hematology, and coagulation. Safety pharmacology (central nervous, cardiovascular, and respiratory systems) and local tolerance will also be evaluated.

[0990] While the present invention has been described at some length and with some particularity with respect to the several described embodiments, it is not intended that it should be limited to any such particulars or embodiments or any particular embodiment, but it is to be construed with references to the appended claims so as to provide the broadest possible interpretation of such claims in view of the prior art and, therefore, to effectively encompass the intended scope of the invention.

[0991] All publications, patent applications, patents, and other references mentioned herein are incorporated by reference in their entirety. In case of conflict, the present specification, including definitions, will control. In addition, section headings, the materials, methods, and examples are illustrative only and not intended to be limiting.

1-26. (canceled)

27. A modulatory polynucleotide targeting a SOD1 gene comprising:
(i) a 5′ flanking region, wherein the nucleotide sequence encoding the 5′ flanking region comprises a nucleotide sequence selected from SEQ ID NOs: 1255-1263;
(ii) an antisense strand comprising a nucleotide sequence at least 80% identical to a nucleotide sequence selected from SEQ ID NOs: 916-1084;
(iii) a loop region, wherein the nucleotide sequence encoding the loop region comprises a nucleotide sequence selected from SEQ ID NOs: 1264-1273;
(iv) a sense strand comprising a nucleotide sequence at least 80% identical to a nucleotide sequence selected from SEQ ID NOs: 1085-1253, wherein the sense strand sequence is complementary to the antisense strand sequence; and
(v) a 3′ flanking region, wherein the nucleotide sequence encoding the 3′ flanking region comprises a nucleotide sequence selected from SEQ ID NOs: 1274-1280.

28. The modulatory polynucleotide of claim 27, which comprises:
(i) a 5′ flanking region, wherein the nucleotide sequence encoding the 5′ flanking region comprises the nucleotide sequence of SEQ ID NO: 1256;
(ii) an antisense strand sequence comprising a nucleotide sequence at least 80% identical to the nucleotide sequence of SEQ ID NO: 1035;
(iii) a loop region, wherein the nucleotide sequence encoding the loop region comprises the nucleotide sequence of SEQ ID NO: 1266;
(iv) a sense strand sequence comprises a nucleotide sequence at least 80% identical to the nucleotide sequence of SEQ ID NO: 1204, wherein the sense strand sequence is complementary to the antisense strand sequence; and
(v) a 3′ flanking region, wherein the nucleotide sequence encoding the 3′ flanking region comprises the nucleotide sequence of SEQ ID NO: 1276.

29. The modulatory polynucleotide of claim 28, wherein the nucleotide sequence encoding the antisense strand comprises the nucleotide sequence of SEQ ID NO: 1347 and the nucleotide sequence encoding the sense strand sequence comprises the nucleotide sequence of SEQ ID NO: 1365.

30. The modulatory polynucleotide of claim 27, wherein the nucleotide sequence encoding the modulatory polynucleotide comprises the nucleotide sequence of SEQ ID NO: 1326.

31. An adeno-associated virus (AAV) viral genome comprising a nucleic acid sequence positioned between a first inverted terminal repeat (ITR) and a second ITR, wherein said nucleotide sequence encodes a modulatory polynucleotide, wherein the modulatory polynucleotide comprises:
(a) a 5′ flanking region, wherein the nucleotide sequence encoding the 5′ flanking region comprises a nucleotide sequence selected from SEQ ID NOs: 1255-1263;
(b) an antisense sequence comprising a nucleotide sequence at least 80% identical to a nucleotide sequence selected from SEQ ID NOs: 916-1084;
(c) a loop region, wherein the nucleotide sequence encoding the loop region comprises a nucleotide sequence selected from SEQ ID NOs: 1264-1273;
(d) a sense strand sequence comprising a nucleotide sequence at least 80% identical to a nucleotide sequence selected from SEQ ID NOs: 1085-1253, wherein the sense strand sequence is complementary to the antisense strand sequence; and
(e) a 3′ flanking region, wherein the nucleotide sequence encoding the 3′ flanking region comprises a nucleotide sequence selected from SEQ ID NOs: 1274-1280.

32. The AAV viral genome of claim 31, wherein:
(a) the nucleotide sequence encoding the 5′ flanking region comprises SEQ ID NO: 1256;
(b) the nucleotide sequence encoding the loop region comprises SEQ ID NO: 1266;
(c) the nucleotide sequence encoding the 3′ flanking region comprises SEQ ID NO: 1276; and
(d) the antisense strand sequence is at least 80% identical to the nucleotide sequence of SEQ ID NO: 1035, and the sense strand sequence is at least 80% identical to the nucleotide sequence of SEQ ID NO: 1204.

33. The AAV viral genome of claim 31, the nucleotide sequence encoding the antisense strand comprises the nucleotide sequence of SEQ ID NO: 1347; and the nucleotide sequence encoding the sense strand sequence comprises the nucleotide sequence of SEQ ID NO: 1365.

34. The AAV viral genome of claim 31, wherein the nucleotide sequence encoding the modulatory polynucleotide comprises the nucleotide sequence of SEQ ID NO: 1326.

35. The AAV viral genome of claim 31, wherein:
(a) the sense strand sequence and/or antisense strand sequence are, independently, between 20-22 nucleotides in length and/or
(b) the sense strand sequence and the antisense strand sequence comprise a 3′ overhang of 1-2 nucleotides.

36. The AAV viral genome of claim 31, wherein:
(i) the first ITR comprises a nucleotide sequence selected from SEQ ID NOs: 1370-1373, and is positioned 5′ relative to the nucleotide sequence encoding the modulatory polynucleotide; and/or
(ii) the second ITR comprises a nucleotide sequence selected from SEQ ID NOs: 1370-1372, and is positioned 3′ relative to the nucleotide sequence encoding the modulatory polynucleotide.

37. The AAV viral genome of claim 31, wherein the first ITR comprises the nucleotide sequence of SEQ ID NO: 1371 and is positioned 5′ relative to the nucleotide sequence encoding the modulatory polynucleotide, and the second ITR comprises the nucleotide sequence of SEQ ID NO: 1373, and is positioned 3′ relative to the nucleotide sequence encoding the modulatory polynucleotide.

38. An adeno-associated virus (AAV) viral genome comprising a nucleic acid sequence positioned between a first inverted terminal repeat (ITR) and a second ITR, wherein said nucleotide sequence encodes the modulatory polynucleotide of claim 28.

39. The AAV viral genome of claim 38, further comprising:
(i) a promoter;
(ii) an enhancer;
(iii) an intron; and/or
(iv) a poly A sequence region.

40. The AAV viral genome of claim 39, wherein:
(i) the first ITR comprises the nucleotide sequence of SEQ ID NO: 1371 and is positioned 5′ relative to the nucleotide sequence encoding the modulatory polynucleotide, and the second ITR comprises the nucleotide sequence of SEQ ID NO: 1373, and is positioned 3′ relative to the nucleotide sequence encoding the modulatory polynucleotide;
(ii) the promoter is a CMV promoter, a CBA promoter, a EF-1α promoter, a PGK promoter, a synapsin promoter, an H1 promoter, or a truncation thereof; and/or
(ii) the poly A sequence region comprises the nucleotide sequence of SEQ ID NO: 1410.

41. A recombinant adeno-associated virus (AAV) particle comprising the AAV viral genome of claim 31, and an AAV capsid, wherein the AAV capsid comprises an AAV9 capsid or variant thereof, an AAV5 capsid or variant thereof, or an AAVrh10 capsid or variant thereof.

42. A pharmaceutical composition comprising the recombinant AAV particle of claim 41, and a pharmaceutically acceptable excipient.

43. A method for inhibiting or suppressing the expression of SOD1 gene in a cell, the method comprising administering to the cell a pharmaceutical composition of claim 42.

44. The method of claim 43, wherein the cell is:
(i) a mammalian cell, a motor neuron, or an astrocyte; and/or
(ii) in a subject, wherein the subject has amyotrophic lateral sclerosis (ALS).

45. The method of claim 43, wherein the SOD1 gene comprises a wild type SOD1 gene, a mutated SOD1 gene, or a combination thereof.

46. A method for treating amyotrophic lateral sclerosis (ALS) in a subject, the method comprising administering to the subject a therapeutically effective amount of a pharmaceutical composition of claim 42.

47. The method of claim 46, wherein the pharmaceutical composition is administered to the subject via intravenous administration, intracisternal magna administration, or combination thereof.

48. The method of claim 46, wherein the ALS is (i) familial ALS; (ii) sporadic ALS; (iii) early stage ALS; (iv) middle stage ALS; and/or (v) late stage ALS.

The application's sequence listing, which the Patent Office published only in electronic form, follows.

SEQUENCE LISTING (2241 sequences)

SEQ ID NO: 1 - DNA, 2211 bp, Adeno-associated virus 1
  source 1..2211: mol_type = genomic DNA
atggctgccgatggttatcttccagattggctcgaggacaacctctctgagggcattcgcgagtggtgggacttgaaacctggagccccgaagcccaaagccaaccagcaaaagcaggacgacggccggggtctggtgcttcctggctacaagtacctcggacccttcaacggactcgacaagggggagcccgtcaacgcggcggacgcagcggccctcgagcacgacaaggcctacgaccagcagctcaaagcgggtgacaatccgtacctgcggtataaccacgccgacgccgagtttcaggagcgtctgcaagaagatacgtcttttgggggcaacctcgggcgagcagtcttccaggccaagaagcgggttctcgaacctctcggtctggttgaggaaggcgctaagacggctcctggaaagaaacgtccggtagagcagtcgccacaagagccagactcctcctcgggcatcggcaagacaggccagcagcccgctaaaaagagactcaattttggtcagactggcgactcagagtcagtccccgatccacaacctctcggagaacctccagcaacccccgctgctgtgggacctactacaatggcttcaggcggtggcgcaccaatggcagacaataacgaaggcgccgacggagtgggtaatgcctcaggaaattggcattgcgattccacatggctgggcgacagagtcatcaccaccagcacccgcacctgggccttgcccacctacaataaccacctctacaagcaaatctccagtgcttcaacgggggccagcaacgacaaccactacttcggctacagcaccccctgggggtattttgatttcaacagattccactgccacttttcaccacgtgactggcagcgactcatcaacaacaattggggattccggcccaagagactcaacttcaaactcttcaacatccaagtcaaggaggtcacgacgaatgatggcgtcacaaccatcgctaataaccttaccagcacggttcaagtcttctcggactcggagtaccagcttccgtacgtcctcggctctgcgcaccagggctgcctccctccgttcccggcggacgtgttcatgattccgcaatacggctacctgacgctcaacaatggcagccaagccgtgggacgttcatccttttactgcctggaatatttcccttctcagatgctgagaacgggcaacaactttaccttcagctacacctttgaggaagtgcctttccacagcagctacgcgcacagccagagcctggaccggctgatgaatcctctcatcgaccaatacctgtattacctgaacagaactcaaaatcagtccggaagtgcccaaaacaaggacttgctgtttagccgtgggtctccagctggcatgtctgttcagcccaaaaactggctacctggaccctgttatcggcagcagcgcgtttctaaaacaaaaacagacaacaacaacagcaattttacctggactggtgcttcaaaatataacctcaatgggcgtgaatccatcatcaaccctggcactgctatggcctcacacaaagacgacgaagacaagttctttcccatgagcggtgtcatgatttttggaaaagagagcgccggagcttcaaacactgcattggacaatgtcatgattacagacgaagaggaaattaaagccactaaccctgtggccaccgaaagatttgggaccgtggcagtcaatttccagagcagcagcacagaccctgcgaccggagatgtgcatgctatgggagcattacctggcatggtgtggcaagatagagacgtgtacctgcagggtcccatttgggccaaaattcctcacacagatggacactttcacccgtctcctcttatgggcggctttggactcaagaacccgcctcctcagatcctcatcaaaaacacgcctgttcctgcgaatcctccggcggagttttcagctacaaagtttgcttcattcatcacccaatactccacaggacaagtgagtgtggaaattgaatgggagctgcagaaagaaaacagcaagcgctggaatcccgaagtgcagtacacatccaattatgcaaaatctgccaacgttgattttactgtggacaacaatggactttatactgagcctcgccccattggcacccgttaccttacccgtcccctgtaa

SEQ ID NO: 2 - protein, 736 aa, Adeno-associated virus 1
MAADGYLPDWLEDNLSEGIREWWDLKPGAPKPKANQQKQDDGRGLVLPGYKYLGPFNGLDKGEPVNAADAAALEHDKAYDQQLKAGDNPYLRYNHADAEFQERLQEDTSFGGNLGRAVFQAKKRVLEPLGLVEEGAKTAPGKKRPVEQSPQEPDSSSGIGKTGQQPAKKRLNFGQTGDSESVPDPQPLGEPPATPAAVGPTTMASGGGAPMADNNEGADGVGNASGNWHCDSTWLGDRVITTSTRTWALPTYNNHLYKQISSASTGASNDNHYFGYSTPWGYFDFNRFHCHFSPRDWQRLINNNWGFRPKRLNFKLFNIQVKEVTTNDGVTTIANNLTSTVQVFSDSEYQLPYVLGSAHQGCLPPFPADVFMIPQYGYLTLNNGSQAVGRSSFYCLEYFPSQMLRTGNNFTFSYTFEEVPFHSSYAHSQSLDRLMNPLIDQYLYYLNRTQNQSGSAQNKDLLFSRGSPAGMSVQPKNWLPGPCYRQQRVSKTKTDNNNSNFTWTGASKYNLNGRESIINPGTAMASHKDDEDKFFPMSGVMIFGKESAGASNTALDNVMITDEEEIKATNPVATERFGTVAVNFQSSSTDPATGDVHAMGALPGMVWQDRDVYLQGPIWAKIPHTDGHFHPSPLMGGFGLKNPPPQILIKNTPVPANPPAEFSATKFASFITQYSTGQVSVEIEWELQKENSKRWNPEVQYTSNYAKSANVDFTVDNNGLYTEPRPIGTRYLTRPL

SEQ ID NO: 3 - DNA, 4718 bp, Adeno-associated virus 1
  source 1..4718: mol_type = genomic DNA
ttgcccactccctctctgcgcgctcgctcgctcggtggggcctgcggaccaaaggtccgcagacggcagagctctgctctgccggccccaccgagcgagcgagcgcgcagagagggagtgggcaactccatcactaggggtaatcgcgaagcgcctcccacgctgccgcgtcagcgctgacgtaaattacgtcataggggagtggtcctgtattagctgtcacgtgagtgcttttgcgacattttgcgacaccacgtggccatttagggtatatatggccgagtgagcgagcaggatctccattttgaccgcgaaatttgaacgagcagcagccatgccgggcttctacgagatcgtgatcaaggtgccgagcgacctggacgagcacctgccgggcatttctgactcgtttgtgagctgggtggccgagaaggaatgggagctgcccccggattctgacatggatctgaatctgattgagcaggcacccctgaccgtggccgagaagctgcagcgcgacttcctggtccaatggcgccgcgtgagtaaggccccggaggccctcttctttgttcagttcgagaagggcgagtcctacttccacctccatattctggtggagaccacgggggtcaaatccatggtgctgggccgcttcctgagtcagattagggacaagctggtgcagaccatctaccgcgggatcgagccgaccctgcccaactggttcgcggtgaccaagacgcgtaatggcgccggaggggggaacaaggtggtggacgagtgctacatccccaactacctcctgcccaagactcagcccgagctgcagtgggcgtggactaacatggaggagtatataagcgcctgtttgaacctggccgagcgcaaacggctcgtggcgcagcacctgacccacgtcagccagacccaggagcagaacaaggagaatctgaaccccaattctgacgcgcctgtcatccggtcaaaaacctccgcgcgctacatggagctggtcgggtggctggtggaccggggcatcacctccgagaagcagtggatccaggaggaccaggcctcgtacatctccttcaacgccgcttccaactcgcggtcccagatcaaggccgctctggacaatgccggcaagatcatggcgctgaccaaatccgcgcccgactacctggtaggccccgctccgcccgcggacattaaaaccaaccgcatctaccgcatcctggagctgaacggctacgaacctgcctacgccggctccgtctttctcggctgggcccagaaaaggttcgggaagcgcaacaccatctggctgtttgggccggccaccacgggcaagaccaacatcgcggaagccatcgcccacgccgtgcccttctacggctgcgtcaactggaccaatgagaactttcccttcaatgattgcgtcgacaagatggtgatctggtgggaggagggcaagatgacggccaaggtcgtggagtccgccaaggccattctcggcggcagcaaggtgcgcgtggaccaaaagtgcaagtcgtccgcccagatcgaccccacccccgtgatcgtcacctccaacaccaacatgtgcgccgtgattgacgggaacagcaccaccttcgagcaccagcagccgttgcaggaccggatgttcaaatttgaactcacccgccgtctggagcatgactttggcaaggtgacaaagcaggaagtcaaagagttcttccgctgggcgcaggatcacgtgaccgaggtggcgcatgagttctacgtcagaaagggtggagccaacaaaagacccgcccccgatgacgcggataaaagcgagcccaagcgggcctgcccctcagtcgcggatccatcgacgtcagacgcggaaggagctccggtggactttgccgacaggtaccaaaacaaatgttctcgtcacgcgggcatgcttcagatgctgtttccctgcaagacatgcgagagaatgaatcagaatttcaacatttgcttcacgcacgggacgagagactgttcagagtgcttccccggcgtgtcagaatctcaaccggtcgtcagaaagaggacgtatcggaaactctgtgccattcatcatctgctggggcgggctcccgagattgcttgctcggcctgcgatctggtcaacgtggacctggatgactgtgtttctgagcaataaatgacttaaaccaggtatggctgccgatggttatcttccagattggctcgaggacaacctctctgagggcattcgcgagtggtgggacttgaaacctggagccccgaagcccaaagccaaccagcaaaagcaggacgacggccggggtctggtgcttcctggctacaagtacctcggacccttcaacggactcgacaagggggagcccgtcaacgcggcggacgcagcggccctcgagcacgacaaggcctacgaccagcagctcaaagcgggtgacaatccgtacctgcggtataaccacgccgacgccgagtttcaggagcgtctgcaagaagatacgtcttttgggggcaacctcgggcgagcagtcttccaggccaagaagcgggttctcgaacctctcggtctggttgaggaaggcgctaagacggctcctggaaagaaacgtccggtagagcagtcgccacaagagccagactcctcctcgggcatcggcaagacaggccagcagcccgctaaaaagagactcaattttggtcagactggcgactcagagtcagtccccgatccacaacctctcggagaacctccagcaacccccgctgctgtgggacctactacaatggcttcaggcggtggcgcaccaatggcagacaataacgaaggcgccgacggagtgggtaatgcctcaggaaattggcattgcgattccacatggctgggcgacagagtcatcaccaccagcacccgcacctgggccttgcccacctacaataaccacctctacaagcaaatctccagtgcttcaacgggggccagcaacgacaaccactacttcggctacagcaccccctgggggtattttgatttcaacagattccactgccacttttcaccacgtgactggcagcgactcatcaacaacaattggggattccggcccaagagactcaacttcaaactcttcaacatccaagtcaaggaggtcacgacgaatgatggcgtcacaaccatcgctaataaccttaccagcacggttcaagtcttctcggactcggagtaccagcttccgtacgtcctcggctctgcgcaccagggctgcctccctccgttcccggcggacgtgttcatgattccgcaatacggctacctgacgctcaacaatggcagccaagccgtgggacgttcatccttttactgcctggaatatttcccttctcagatgctgagaacgggcaacaactttaccttcagctacacctttgaggaagtgcctttccacagcagctacgcgcacagccagagcctggaccggctgatgaatcctctcatcgaccaatacctgtattacctgaacagaactcaaaatcagtccggaagtgcccaaaacaaggacttgctgtttagccgtgggtctccagctggcatgtctgttcagcccaaaaactggctacctggaccctgttatcggcagcagcgcgtttctaaaacaaaaacagacaacaacaacagcaattttacctggactggtgcttcaaaatataacctcaatgggcgtgaatccatcatcaaccctggcactgctatggcctcacacaaagacgacgaagacaagttctttcccatgagcggtgtcatgatttttggaaaagagagcgccggagcttcaaacactgcattggacaatgtcatgattacagacgaagaggaaattaaagccactaaccctgtggccaccgaaagatttgggaccgtggcagtcaatttccagagcagcagcacagaccctgcgaccggagatgtgcatgctatgggagcattacctggcatggtgtggcaagatagagacgtgtacctgcagggtcccatttgggccaaaattcctcacacagatggacactttcacccgtctcctcttatgggcggctttggactcaagaacccgcctcctcagatcctcatcaaaaacacgcctgttcctgcgaatcctccggcggagttttcagctacaaagtttgcttcattcatcacccaatactccacaggacaagtgagtgtggaaattgaatgggagctgcagaaagaaaacagcaagcgctggaatcccgaagtgcagtacacatccaattatgcaaaatctgccaacgttgattttactgtggacaacaatggactttatactgagcctcgccccattggcacccgttaccttacccgtcccctgtaattacgtgttaatcaataaaccggttgattcgtttcagttgaactttggtctcctgtccttcttatcttatcggttaccatggttatagcttacacattaactgcttggttgcgcttcgcgataaaagacttacgtcatcgggttacccctagtgatggagttgcccactccctctctgcgcgctcgctcgctcggtggggcctgcggaccaaaggtccgcagacggcagagctctgctctgccggccccaccgagcgagcgagcgcgcagagagggagtgggcaa

SEQ ID NO: 4 - DNA, 3131 bp, Adeno-associated virus
  source 1..3131: mol_type = genomic DNA
gcggccgcgaattcgcccttggctgcgtcaactggaccaatgagaactttcccttcaatgattgcgtcgacaagatggtgatctggtgggaggagggcaagatgacggccaaggtcgtggagtccgccaaggccattctcggcggcagcaaggtgcgcgtggaccaaaagtgcaagtcgtccgcccagatcgaccccacccccgtgatcgtcacctccaacaccaacatgtgcgccgtgattgacgggaacagcaccaccttcgagcaccagcagcctctccaggaccggatgtttaagttcgaactcacccgccgtctggagcacgactttggcaaggtgacaaagcaggaagtcaaagagttcttccgctgggccagtgatcacgtgaccgaggtggcgcatgagttttacgtcagaaagggcggagccagcaaaagacccgcccccgatgacgcggataaaagcgagcccaagcgggcctgcccctcagtcgcggatccatcgacgtcagacgcggaaggagctccggtggactttgccgacaggtaccaaaacaaatgttctcgtcacgcgggcatgcttcagatgctgtttccctgcaaaacgtgcgagagaatgaatcggaatttcaacatttgcttcacacacggggtcagagactgctcagagtgtttccccggcgtgtcagaatctcaaccggtcgtcagaaagaggacgtatcggaaactccgtgcgattcatcatctgctggggcgggctcccgagattgcttgctcggcctgcgatctggtcaacgtggacctggatgactgtgtttctgagcaataaatgacttaaaccaggtatggctgccgatggttatcttccagattggctcgaggacaacctctctgagggcattcgcgagtggtgggcgctgaaacctggagccccgaagcccaaagccaaccagcaaaagcaggacgacggccggggtctggtgcttcctggctacaagtacctcggacccttcaacggactcgacaagggggagcccgtcaacgcggcggacgcagcggccctcgagcacgacaaggcttacgaccagcagctgcaggcgggtgacaatccgtacctgcggtataaccacgccgacgccgagtttcaggagcgtctgcaagaagatacgtcttttgggggcaacctcgggcgagcagtcttccaggccaagaagcgggttctcgaacctctcggtctggttgaggaaggcgctaagacggctcctggaaagaagagaccggtagagccatcaccccagcgttctccagactcctctacgggcatcggcaagaaaggccaacagcccgccagaaaaagactcaattttggtcagactggcgactcagagtcagttccagaccctcaacctctcggagaacctccagcagcgccctctggtgtgggacctaatacaatggctgcaggcggtggcgcaccaatggcagacaataacgaaggcgccgacggagtgggtagttcctcgggaaattggcattgcgattccacatggctgggcgacagagtcatcaccaccagcacccgaacctgggccctgcccacctacaacaaccacctctacaagcaaatctccaacgggacatcgggaggagccaccaacgacaacacctacttcggctacagcaccccctgggggtattttgactttaacagattccactgccacctttcaccacgtgactggcagcgactcatcaacaacaactggggattccgacccaagagactcagcttcaagctcttcaacatccaggtcaaggaggtcacgcagaatgaaggcaccaagaccatcgccaataacctcaccagcaccatccaggtgtttacggactcggagtaccagctgccgtacgttctcggctctgtccaccagggctgcctgcctccgttcccggcggacgtgttcatgattccccagtacggctacctaacactcaacaacggtagtcaggccgtgggacgctcctccttctactgcctggaatactttccttcgcagatgctgagaaccggcaacaacttccagtttacttacaccttcgaggacgtgcctttccacagcagctacgcccacagctagagcttggaccggctgatgaatcctctgattgaccagtacctgtactacttgtctcggactcaaacaacaggaggcacggcaaatacgcagactctgggcttcagccaaggtgggcctaatacaatggccaatcaggcaaagaactggctgccaggaccctgttaccgccaacaacgcgtctcaacgacaaccgggcaaaacaacaatagcaactttgcctggactgctgggaccaaataccatctgaatggaagaaattcattggctaatcctggcatcgctatggcaacacacaaagacgacgaggagcgtttttttcccagtaacgggatcctgatttttggcaaacaaaatgctgccagagacaatgcggattacagcgatgtcatgctcaccagcgaggaagaaatcaaaaccactaaccctgtggctacagaggaatacggtatcgtggcagataacttgcagcagcaaaacacggctcctcaaattggaactgtcaacagccagggggccttacccggtatggtctggcagaaccgggacgtgtacctgcagggtcccatctgggccaagattcctcacacggacggcaacttccacccgtctccgctgatgggcggctttggcctgaaacatcctccgcctcagatcctgatcaagaacacgcctgtacctgcggatcctccgaccaccttcaaccagtcaaagctgaactctttcatcacgcaatacagcaccggacaggtcagcgtggaaattgaatgggagctgcagaaggaaaacagcaagcgctggaaccccgagatccagtacacctccaactactacaaatctataagtgtggactttgctgttaatacagaaggcgtgtactctgaaccccgccccattggcacccgttacctcacccgtaatctgtaattgcctgttaatcaataaaccggttgattcgtttcagttgaactttggtctctgcgaagggcgaattc

SEQ ID NO: 5 - DNA, 255 bp, Adeno-associated virus 10
  source 1..255: mol_type = genomic DNA
ggtaattcctccggaaattggcattgcgattccacatggctgggcgacagagtcatcaccaccagcacccgaacctgggtcctgcccacctacaacaaccacatctacaagcaaatctccagcgagacaggagccaccaacgacaaccactacttcggctacagcaccccctgggggtattttgactttaacagattccactgccacttttcaccacgtgactggcagcgactcatcaacaacaactggggattc

SEQ ID NO: 6 - protein, 738 aa, Adeno-associated virus 10
MAADGYLPDWLEDNLSEGIREWWDLKPGAPKPKANQQKQDDGRGLVLPGYKYLGPFNGLDKGEPVNAADAAALEHDKAYDQQLKAGDNPYLRYNHADAEFQERLQEDTSFGGNLGRAVFQAKKRVLEPLGLVEEAAKTAPGKKRPVEPSPQRSPDSSTGIGKKGQQPAKKRLNFGQTGESESVPDPQPIGEPPAGPSGLGSGTMAAGGGAPMADNNEGADGVGSSSGNWHCDSTWLGDRVITTSTRTWALPTYNNHLYKQISNGTSGGSTNDNTYFGYSTPWGYFDFNRFHCHFSPRDWQRLINNNWGFRPKRLSFKLFNIQVKEVTQNEGTKTIANNLTSTIQVFTDSEYQLPYVLGSAHQGCLPPFPADVFMIPQYGYLTLNNGSQAVGRSSFYCLEYFPSQMLRTGNNFEFSYTFEDVPFHSSYAHSQSLDRLMNPLIDQYLYYLSRTQSTGGTQGTQQLLFSQAGPANMSAQAKNWLPGPCYRQQRVSTTLSQNNNSNFAWTGATKYHLNGRDSLVNPGVAMATHKDDEERFFPSSGVLMFGKQGAGRDNVDYSSVMLTSEEEIKTTNPVATEQYGVVADNLQQANTGPIVGNVNSQGALPGMVWQNRDVYLQGPIWAKIPHTDGNFHPSPLMGGFGLKHPPPQILIKNTPVPADPPTTFSQAKLASFITQYSTGQVSVEIEWELQKENSKRWNPEIQYTSNYYKSTNVDFAVNTEGTYSEPRPIGTRYLTRNL

SEQ ID NO: 7 - protein, 738 aa, Adeno-associated virus 10
MAADGYLPDWLEDNLSEGIREWWDLKPGAPKPKANQQKQDDGRGLVLPGYKYLGPFNGLDKGEPVNAADAAALEHDKAYDQQLKAGDNPYLRYNHADAEFQERLQEDTSFGGNLGRAVFQAKKRVLEPLGLVEEGAKTAPGKKRPVEPSPQRSPDSSTGIGKKGQQPAKKRLNFGQTGDSESVPDPQPIGEPPAGPSGLGSGTMAAGGGAPMADNNEGADGVGSSSGNWHCDSTWLGDRVITTSTRTWALPTYNNHLYKQISNGTSGGSTNDNTYFGYSTPWGYFDFNRFHCHFSPRDWQRLINNNWGFRPKRLNFKLFNIQVKEVTQNEGTKTIANNLTSTIQVFTDSEYQLPYVLGSAHQGCLPPFPADVFMIPQYGYLTLNNGSQAVGRSSFYCLEYFPSQMLRTGNNFEFSYQFEDVPFHSSYAHSQSLDRLMNPLIDQYLYYLSRTQSTGGTAGTQQLLFSQAGPNNMSAQAKNWLPGPCYRQQRVSTTLSQNNNSNFAWTGATKYHLNGRDSLVNPGVAMATHKDDEERFFPSSGVLMFGKQGAGKDNVDYSSVMLTSEEEIKTTNPVATEQYGVVADNLQQQNAAPIVGAVNSQGALPGMVWQNRDVYLQGPIWAKIPHTDGNFHPSPLMGGFGLKHPPPQILIKNTPVPADPPTTFSQAKLASFITQYSTGQVSVEIEWELQKENSKRWNPEIQYTSNYYKSTNVDFAVNTDGTYSEPRPIGTRYLTRNL

SEQ ID NO: 8 - DNA, 258 bp, Adeno-associated virus 11
  source 1..258: mol_type = genomic DNA
ggtaattcctccggaaattggcattgcgattccacatggctgggcgacagagtcatcaccaccagcacccgaacctgggccctgccaacctacaacaaccacctctacaaacaaatctccagcgcttcaacgggggccagcaacgacaaccactactttggctacagcaccccctgggggtattttgactttaacagattccactgccacttctcaccacgtgactggcagcgactcatcaacaacaactggggattc

SEQ ID NO: 9 - DNA, 255 bp, Adeno-associated virus 12
  source 1..255: mol_type = genomic DNA
ggtaattcctccggaaattggcattgcgattccacatggctgggcgaccgagtcattaccaccagcacccggacttgggccctgcccacctacaacaaccacctctacaagcaaatctccagccaatcgggtgccaccaacgacaaccactacttcggctacagcaccccttgggggtattttgatttcaacagattccactgccatttctcaccacgtgactggcagcgactcatcaacaacaactggggattc

SEQ ID NO: 10 - DNA, 2208 bp, Adeno-associated virus 2
  source 1..2208: mol_type = genomic DNA
atggctgccgatggttatcttccagattggctcgaggacactctctctgaaggaataagacagtggtggaagctcaaacctggcccaccaccaccaaagcccgcagagcggcataaggacgacagcaggggtcttgtgcttcctgggtacaagtacctcggacccttcaacggactcgacaagggagagccggtcaacgaggcagacgccgcggccctcgagcacgacaaagcctacgaccggcagctcgacagcggagacaacccgtacctcaagtacaaccacgccgacgcggagtttcaggagcgccttaaagaagatacgtcttttgggggcaacctcggacgagcagtcttccaggcgaaaaagagggttcttgaacctctgggcctggttgaggaacctgttaagacggctccgggaaaaaagaggccggtagagcactctcctgtggagccagactcctcctcgggaaccggaaaggcgggccagcagcctgcaagaaaaagattgaattttggtcagactggagacgcagactcagtacctgacccccagcctctcggacagccaccagcagccccctctggtctgggaactaatacgatggctacaggcagtggcgcaccaatggcagacaataacgagggcgccgacggagtgggtaattcctcgggaaattggcattgcgattccacatggatgggcgacagagtcatcaccaccagcacccgaacctgggccctgcccacctacaacaaccacctctacaaacaaatttccagccaatcaggagcctcgaacgacaatcactactttggctacagcaccccttgggggtattttgacttcaacagattccactgccacttttcaccacgtgactggcaaagactcatcaacaacaactggggattccgacccaagagactcaacttcaagctctttaacattcaagtcaaagaggtcacgcagaatgacggtacgacgacgattgccaataaccttaccagcacggttcaggtgtttactgactcggagtaccagctcccgtacgtcctcggctcggcgcatcaaggatgcctcccgccgttcccagcagacgtcttcatggtgccacagtatggatacctcaccctgaacaacgggagtcaggcagtaggacgctcttcattttactgcctggagtactttccttctcagatgctgcgtaccggaaacaactttaccttcagctacacttttgaggacgttcctttccacagcagctacgctcacagccagagtctggaccgtctcatgaatcctctcatcgaccagtacctgtattacttgagcagaacaaacactccaagtggaaccaccacgcagtcaaggcttcagttttctcaggccggagcgagtgacattcgggaccagtctaggaactggcttcctggaccctgttaccgccagcagcgagtatcaaagacatctgcggataacaacaacagtgaatactcgtggactggagctaccaagtaccacctcaatggcagagactctctggtgaatccgggcccggccatggcaagccacaaggacgatgaagaaaagttttttcctcagagcggggttctcatctttgggaagcaaggctcagagaaaacaaatgtggacattgaaaaggtcatgattacagacgaagaggaaatcaggacaaccaatcccgtggctacggagcagtatggttctgtatctaccaacctccagagaggcaacagacaagcagctaccgcagatgtcaacacacaaggcgttcttccaggcatggtctggcaggacagagatgtgtaccttcaggggcccatctgggcaaagattccacacacggacggacattttcacccctctcccctcatgggtggattcggacttaaacaccctcctccacagattctcatcaagaacaccccggtacctgcgaatccttcgaccaccttcagtgcggcaaagtttgcttccttcatcacacagtactccacgggacaggtcagcgtggagatcgagtgggagctgcagaaggaaaacagcaaacgctggaatcccgaaattcagtacacttccaactacaacaagtctgttaatgtggactttactgtggacactaatggcgtgtattcagagcctcgccccattggcaccagatacctgactcgtaatctgtaa

SEQ ID NO: 11 - protein, 735 aa, Adeno-associated virus 2 [sequence omitted]

SEQ ID NO: 12 - protein, 621 aa, Adeno-associated virus 2
MPGFYEIVIKVPSDLDGHLPGISDSFVNWVAEKEWELPPDSDMDLNLIEQAPLTVAEKLQRDFLTEWRRVSKAPEALFFVQFEKGESYFHMHVLVETTGVKSMVLGRFLSQIREKLIQRIYRGIEPTLPNWFAVTKTRNGAGGGNKVVDECYIPNYLLPKTQPELQWAWTNMEQYLSACLNLTERKRLVAQHLTHVSQTQEQNKENQNPNSDAPVIRSKTSARYMELVGWLVDKGITSEKQWIQEDQASYISFNAASNSRSQIKAALDNAGKIMSLTKTAPDYLVGQQPVEDISSNRIYKILELNGYDPQYAASVFLGWATKKFGKRNTIWLFGPATTGKTNIAEAIAHTVPFYGCVNWTNENFPFNDCVDKMVIWWEEGKMTAKVVESAKAILGGSKVRVDQKCKSSAQIDPTPVIVTSNTNMCAVIDGNSTTFEHQQPLQDRMFKFELTRRLDHDFGKVTKQEVKDFFRWAKDHVVEVEHEFYVKKGGAKKRPAPSDADISEPKRVRESVAQPSTSDAEASINYADRYQNKCSRHVGMNLMLFPCRQCERMNQNSNICFTHGQKDCLECFPVSESQPVSVVKKAYQKLCYIHHIMGKVPDACTACDLVNVDLDDCIFEQ

SEQ ID NO: 13 - DNA, 4675 bp, Adeno-associated virus 2
  source 1..4675: mol_type = genomic DNA
ttggccactccctctctgcgcgctcgctcgctcactgaggccgggcgaccaaaggtcgcccgacgcccgggctttgcccgggcggcctcagtgagcgagcgagcgcgcagagagggagtggccaactccatcactaggggttcctggaggggtggagtcgtgacgtgaattacgtcatagggttagggaggtcctgtattagaggtcacgtgagtgttttgcgacattttgcgacaccatgtggtcacgctgggtatttaagcccgagtgagcacgcagggtctccattttgaagcgggaggtttgaacgcgcagccgccatgccggggttttacgagattgtgattaaggtccccagcgaccttgacgggcatctgcccggcatttctgacagctttgtgaactgggtggccgagaaggaatgggagttgccgccagattctgacatggatctgaatctgattgagcaggcacccctgaccgtggccgagaagctgcagcgcgactttctgacggaatggcgccgtgtgagtaaggccccggaggcccttttctttgtgcaatttgagaagggagagagctacttccacatgcacgtgctcgtggaaaccaccggggtgaaatccatggttttgggacgtttcctgagtcagattcgcgaaaaactgattcagagaatttaccgcgggatcgagccgactttgccaaactggttcgcggtcacaaagaccagaaatggcgccggaggcgggaacaaggtggtggatgagtgctacatccccaattacttgctccccaaaacccagcctgagctccagtgggcgtggactaatatggaacagtatttaagcgcctgtttgaatctcacggagcgtaaacggttggtggcgcagcatctgacgcacgtgtcgcagacgcaggagcagaacaaagagaatcagaatcccaattctgatgcgccggtgatcagatcaaaaacttcagccaggtacatggagctggtcgggtggctcgtggacaaggggattacctcggagaagcagtggatccaggaggaccaggcctcatacatctccttcaatgcggcctccaactcgcggtcccaaatcaaggctgccttggacaatgcgggaaagattatgagcctgactaaaaccgcccccgactacctggtgggccagcagcccgtggaggacatttccagcaatcggatttataaaattttggaactaaacgggtacgatccccaatatgcggcttccgtctttctgggatgggccacgaaaaagttcggcaagaggaacaccatctggctgtttgggcctgcaactaccgggaagaccaacatcgcggaggccatagcccacactgtgcccttctacgggtgcgtaaactggaccaatgagaactttcccttcaacgactgtgtcgacaagatggtgatctggtgggaggaggggaagatgaccgccaaggtcgtggagtcggccaaagccattctcggaggaagcaaggtgcgcgtggaccagaaatgcaagtcctcggcccagatagacccgactcccgtgatcgtcacctccaacaccaacatgtgcgccgtgattgacgggaactcaacgaccttcgaacaccagcagccgttgcaagaccggatgttcaaatttgaactcacccgccgtctggatcatgactttgggaaggtcaccaagcaggaagtcaaagactttttccggtgggcaaaggatcacgtggttgaggtggagcatgaattctacgtcaaaaagggtggagccaagaaaagacccgcccccagtgacgcagatataagtgagcccaaacgggtgcgcgagtcagttgcgcagccatcgacgtcagacgcggaagcttcgatcaactacgcagacaggtaccaaaacaaatgttctcgtcacgtgggcatgaatctgatgctgtttccctgcagacaatgcgagagaatgaatcagaattcaaatatctgcttcactcacggacagaaagactgtttagagtgctttcccgtgtcagaatctcaacccgtttctgtcgtcaaaaaggcgtatcagaaactgtgctacattcatcatatcatgggaaaggtgccagacgcttgcactgcctgcgatctggtcaatgtggatttggatgactgcatctttgaacaataaatgatttaaatcaggtatggctgccgatggttatcttccagattggctcgaggacactctctctgaaggaataagacagtggtggaagctcaaacctggcccaccaccaccaaagcccgcagagcggcataaggacgacagcaggggtcttgtgcttcctgggtacaagtacctcggacccttcaacggactcgacaagggagagccggtcaacgaggcagacgccgcggccctcgagcacgtacaaagcctacgaccggcagctcgacagcggagacaacccgtacctcaagtacaaccacgccgacgcggagtttcaggagcgccttaaagaagatacgtcttttgggggcaacctcggacgagcagtcttccaggcgaaaaagagggttcttgaacctctgggcctggttgaggaacctgttaagacggctccgggaaaaaagaggccggtagagcactctcctgtggagccagactcctcctcgggaaccggaaaggcgggccagcagcctgcaagaaaaagattgaattttggtcagactggagacgcagactcagtacctgacccccagcctctcggacagccaccagcagccccctctggtctgggaactaatacgatggctacaggcagtggcgcaccaatggcagacaataacgagggcgccgacggagtgggtaattcctccggaaattggcattgcgattccacatggatgggcgacagagtcatcaccaccagcacccgaacctgggccctgcccacctacaacaaccacctctacaaacaaatttccagccaatcaggagcctcgaacgacaatcactactttggctacagcaccccttgggggtattttgacttcaacagattccactgccacttttcaccacgtgactggcaaagactcatcaacaacaactggggattccgacccaagagactcaacttcaagctctttaacattcaagtcaaagaggtcacgcagaatgacggtacgacgacgattgccaataaccttaccagcacggttcaggtgtttactgactcggagtaccagctcccgtacgtcctcggctcggcgcatcaaggatgcctcccgccgttcccagcagacgtcttcatggtgccacagtatggatacctcaccctgaacaacgggagtcaggcagtaggacgctcttcattttactgcctggagtactttccttctcagatgctgcgtaccggaaacaactttaccttcagctacacttttgaggacgttcctttccacagcagctacgctcacagccagagtctggaccgtctcatgaatcctctcatcgaccagtacctgtattacttgagcagaacaaacactccaagtggaaccaccacgcagtcaaggcttcagttttctcaggccggagcgagtgacattcgggaccagtctaggaactggcttcctggaccctgttaccgccagcagcgagtatcaaagacatctgcggataacaacaacagtgaatactcgtggactggagctaccaagtaccacctcaatggcagagactctctggtgaatccggccatggcaagccacaaggacgatgaagaaaagttttttcctcagagcggggttctcatctttgggaagcaaggctcagagaaaacaaatgtgaacattgaaaaggtcatgattacagacgaagaggaaatcggaacaaccaatcccgtggctacggagcagtatggttctgtatctaccaacctccagagaggcaacagacaagcagctaccgcagatgtcaacacacaaggcgttcttccaggcatggtctggcaggacagagatgtgtaccttcaggggcccatctgggcaaagattccacacacggacggacattttcacccctctcccctcatgggtggattcggacttaaacaccctcctccacagattctcatcaagaacaccccggtacctgcgaatccttcgaccaccttcagtgcggcaaagtttgcttccttcatcacacagtactccacgggacacggtcagcgtggagatcgagtgggagctgcagaaggaaaacagcaaacgctggaatcccgaaattcagtacacttccaactacaacaagtctgttaatcgtggacttaccgtggatactaatggcgtgtattcagagcctcgccccattggcaccagatacctgactcgtaatctgtaattgcttgttaatcaataaaccgtttaattcgtttcagttgaactttggtctctgcgtatttctttcttatctagtttccatggctacgtagataagtagcatggcgggttaatcattaactacaaggaacccctagtgatggagttggccactccctctctgcgcgctcgctcgctcactgaggccgggcgaccaaaggtcgcccgacgcccgggctttgcccgggcggcctcagtgagcgagcgagcgcgcagagagggagtggccaa

SEQ ID NO: 14 - DNA, 4679 bp, Adeno-associated virus 2
  source 1..4679: mol_type = genomic DNA
ttggccactccctctctgcgcgctcgctcgctcactgaggccgggcgaccaaaggtcgcccgacgcccgggctttgcccgggcggcctcagtgagcgagcgagcgcgcagagagggagtggccaactccatcactaggggttcctggaggggtggagtcgtgacgtgaattacgtcatagggttagggaggtcctgtattagaggtcacgtgagtgttttgcgacattttgcgacaccatgtggtcacgctgggtatttaagcccgagtgagcacgcagggtctccattttgaagcgggaggtttgaacgcgcagccgccatgccggggttttacgagattgtgattaaggtccccagcgaccttgacgggcatctgcccggcatttctgacagctttgtgaactgggtggccgagaaggaatgggagttgccgccagattctgacatggatctgaatctgattgagcaggcacccctgaccgtggccgagaagctgcagcgcgactttctgacggaatggcgccgtgtgagtaaggccccggaggcccttttctttgtgcaatttgagaagggagagagctacttccacatgcacgtgctcgtggaaaccaccggggtgaaatccatggttttgggacgtttcctgagtcagattcgcgaaaaactgattcagagaatttaccgcgggatcgagccgactttgccaaactggttcgcggtcacaaagaccagaaatggcgccggaggcgggaacaaggtggtggatgagtgctacatccccaattacttgctccccaaaacccagcctgagctccagtgggcgtggactaatatggaacagtatttaagcgcctgtttgaatctcacggagcgtaaacggttggtggcgcagcatctgacgcacgtgtcgcagacgcaggagcagaacaaagagaatcagaatcccaattctgatgcgccggtgatcagatcaaaaacttcagccaggtacatggagctggtcgggtggctcgtggacaaggggattacctcggagaagcagtggatccaggaggaccaggcctcatacatctccttcaatgcggcctccaactcgcggtcccaaatcaaggctgccttggacaatgcgggaaagattatgagcctgactaaaaccgcccccgactacctggtgggccagcagcccgtggaggacatttccagcaatcggatttataaaattttggaactaaacgggtacgatccccaatatgcggcttccgtctttctgggatgggccacgaaaaagttcggcaagaggaacaccatctggctgtttgggcctgcaactaccgggaagaccaacatcgcggaggccatagcccacactgtgcccttctacgggtgcgtaaactggaccaatgagaactttcccttcaacgactgtgtcgacaagatggtgatctggtgggaggaggggaagatgaccgccaaggtcgtggagtcggccaaagccattctcggaggaagcaaggtgcgcgtggaccagaaatgcaagtcctcggcccagatagacccgactcccgtgatcgtcacctccaacaccaacatgtgcgccgtgattgacgggaactcaacgaccttcgaacaccagcagccgttgcaagaccggatgttcaaatttgaactcacccgccgtctggatcatgactttgggaaggtcaccaagcaggaagtcaaagactttttccggtgggcaaaggatcacgtggttgaggtggagcatgaattctacgtcaaaaagggtggagccaagaaaagacccgcccccagtgacgcagatataagtgagcccaaacgggtgcgcgagtcagttgcgcagccatcgacgtcagacgcggaagcttcgatcaactacgcagacaggtaccaaaacaaatgttctcgtcacgtgggcatgaatctgatgctgtttccctgcagacaatgcgagagaatgaatcagaattcaaatatctgcttcactcacggacagaaagactgtttagagtgctttcccgtgtcagaatctcaacccgtttctgtcgtcaaaaaggcgtatcagaaactgtgctacattcatcatatcatgggaaaggtgccagacgcttgcactgcctgcgatctggtcaatgtggatttggatgactgcatctttgaacaataaatgatttaaatcaggtatggctgccgatggttatcttccagattggctcgaggacactctctctgaaggaataagacagtggtggaagctcaaacctggcccaccaccaccaaagcccgcagagcggcataaggacgacagcaggggtcttgtgcttcctgggtacaagtacctcggacccttcaacggactcgacaagggagagccggtcaacgaggcagacgccgcggccctcgagcacgacaaagcctacgaccggcagctcgacagcggagacaacccgtacctcaagtacaaccacgccgacgcggagtttcaggagcgccttaaagaagatacgtcttttgggggcaacctcggacgagcagtcttccaggcgaaaaagagggttcttgaacctctgggcctggttgaggaacctgttaagacggctccgggaaaaaagaggccggtagagcactctcctgtggagccagactcctcctcgggaaccggaaaggcgggccagcagcctgcaagaaaaagattgaattttggtcagactggagacgcagactcagtacctgacccccagcctctcggacagccaccagcagccccctctggtctgggaactaatacgatggctacaggcagtggcgcaccaatggcagacaataacgagggcgccgacggagtgggtaattcctccggaaattggcattgcgattccacatggatgggcgacagagtcatcaccaccagcacccgaacctgggccctgcccacctacaacaaccacctctacaaacaaatttccagccaatcaggagcctcgaacgacaatcactactttggctacagcaccccttgggggtattttgacttcaacagattccactgccacttttcaccacgtgactggcaaagactcatcaacaacaactggggattccgacccaagagactcaacttcaagctctttaacattcaagtcaaagaggtcacgcagaatgacggtacgacgacgattgccaataaccttaccagcacggttcaggtgtttactgactcggagtaccagctcccgtacgtcctcggctcggcgcatcaaggatgcctcccgccgttcccagcagacgtcttcatggtgccacagtatggatacctcaccctgaacaacgggagtcaggcagtaggacgctcttcattttactgcctggagtactttccttctcagatgctgcgtaccggaaacaactttaccttcagctacacttttgaggacgttcctttccacagcagctacgctcacagccagagtctggaccgtctcatgaatcctctcatcgaccagtacctgtattacttgagcagaacaaacactccaagtggaaccaccacgcagtcaaggcttcagttttctcaggccggagcgagtgacattcgggaccagtctaggaactggcttcctggaccctgttaccgccagcagcgagtatcaaagacatctgcggataacaacaacagtgaatactcgtggactggagctaccaagtaccacctcaatggcagagactctctggtgaatccgggcccggccatggcaagccacaaggacgatgaagaaaagttttttcctcagagcggggttctcatctttgggaagcaaggctcagagaaaacaaatgtggacattgaaaaggtcatgattacagacgaagaggaaatcaggacaaccaatcccgtggctacggagcagtatggttctgtatctaccaacctccagagaggcaacagacaagcagctaccgcagatgtcaacacacaaggcgttcttccaggcatggtctggcaggacagagatgtgtaccttcaggggcccatctgggcaaagattccacacacggacggacattttcacccctctcccctcatgggtggattcggacttaaacaccctcctccacagattctcatcaagaacaccccggtacctgcgaatccttcgaccaccttcagtgcggcaaagtttgcttccttcatcacacagtactccacgggacaggtcagcgtggagatcgagtgggagctgcagaaggaaaacagcaaacgctggaatcccgaaattcagtacacttccaactacaacaagtctgttaatgtggactttactgtggacactaatggcgtgtattcagagcctcgccccattggcaccagatacctgactcgtaatctgtaattgcttgttaatcaataaaccgtttaattcgtttcagttgaactttggtctctgcgtatttctttcttatctagtttccatggctacgtagataagtagcatggcgggttaatcattaactacaaggaacccctagtgatggagttggccactccctctctgcgcgctcgctcgctcactgaggccgggcgaccaaaggtcgcccgacgcccgggctttgcccgggcggcctcagtgagcgagcgagcgcgcagagagggagtggccaa

SEQ ID NO: 15 - protein, 725 aa, Adeno-associated virus 5
MAADGYLPDWLEDTLSEGIRQWWKLKPGPPPPKPAERHKDDSRGLVLPGYKYLGPFNGLDKGEPVNEADAAALEHDKAYDRQLDSGDNPYLKYNHADAEFQERLKEDTSFGGNLGRAVFQAKKRVLEPFGLVEEGAKTAPTGKRIDDHFPKRKKARTEEDSKPSTSSDAEAGPSGSQQLQIPAQPASSLGADTMSAGGGGPLGDNNQGADGVGNASGDWHCDSTWMGDRVVTKSTRTWVLPSYNNHQYREIKSGSVDGSNANAYFGYSTPWGYFDFNRFHSHWSPRDWQRLINNYWGFRPRSLRVKIFNIQVKEVTVQDSTTTIANNLTSTVQVFTDDDYQLPYVVGNGTEGCLPAFPPQVFTLPQYGYATLNRDNTENPTERSSFFCLEYFPSKMLRTGNNFEFTYNFEEVPFHSSFAPSQNLFKLANPLVDQYLYRFVSTNNTGGVQFNKNLAGRYANTYKNWFPGPMGRTQGWNLGSGVNRASVSAFATTNRMELEGASYQVPPQPNGMTNNLQGSNTYALENTMIFNSQPANPGTTATYLEGNMLITSESETQPVNRVAYNVGGQMATNNQSSTTAPTTGTYNLQEIVPGSVWMERDVYLQGPIWAKIPETGAHFHPSPAMGGFGLKHPPPMMLIKNTPVPGNITSFSDVPVSSFITQYSTGQVTVEMEWELKKENSKRWNPEIQYTNNYNDPQFVDFAPDSTGEYRTTRPIGTRYLTRPL

SEQ ID NO: 16 - protein, 644 aa, synthetic construct
  REGION 1..644: note = Description of Artificial Sequence: Synthetic polypeptide
  VARIANT 434: note = Xaa = any amino acid
KAYDQQLKAGDNPYLRYNHADAEFQERLQEDTSFGGNLGRAVFQAKKRVLEPLGLVETPAKTAPGKKRPVDSPDSTSGIGKKGQQPAKKRLNFGQTGDSESVPDPQPIGEPPAGPSGLGSGTMAAGGGAPMADNNEGADGVGNASGNWHCDSTWLGDRVITTSTRTWALPTYNNHLYKQISSQSAGSTNDNVYFGYSTPWGYFDFNRFHCHFSPRDWQRLINNNWGFRPKKLNFKLFNIQVKEVTTNDGVTTIANNLTSTVQVFSDSEYQLPYVLGSAHQGCLPPFPADVFMIPQYGYLTLNNGSQSVGRSSFYCLEYFPSQMLRTGNNFTFSYTFEDVPFHSSYAHSQSLDRLMNPLIDQYLYYLARTQSNAGGTAGNRELQFYQGGPTTMAEQAKNWLPGPCFRQQRVSKTLDQNNNSNFAWTGATKYHLNXRNSLVNPGVAMATHKDDEERFFPSSGVLIFGKTGAANKTTLENVLMTNEEEIRPTNPVATEEYGIVSSNLQAASTAAQTQVVNNQGALPGMVWQNRDVYLQGPIWAKIPHTDGNFHPSPLMGGFGLKHPPPQILIKNTPVPANPPEVFTPAKFASFITQYSTGQVSVEIEWELQKENSKRWNPEIQYTSNFDKQTGVDFAVDSQGVYSEP

SEQ ID NO: 17 - DNA, 1933 bp, Adeno-associated virus
  source 1..1933: mol_type = genomic DNA
caaggcctacgaccagcagctcaaagcgggtgacaatccgtacctgcggtataaccacgccgacgccgagtttcaggagtgtcttcaagaagatacgtcttttgggggcaacctcgggcgagcagtcttccaggccaaaaagcgggttctcgaacctcttggtctggttgagacgccagctaagacggcacctggaaagaagcgaccggtagactcgccagactccacctcgggcatcggcaagaaaggccagcagcccgcgaaaaagagactcaactttgggcagactggcgactcagagtcagtccccgaccctcaaccaatcggagaaccaccagcaggcccctctggtctgggatctggtacaatggttgcaggcggtggcgcaccaatggctgacaataacgagggcgccgacggagtgggtaatgcctcaggaaattggcattgcgattccacatggctgggcgacagagtcatcaccaccagcacccgaacctgggccctgcccacctacaacaaccacctctacaagcaaatctccagtcagtcagcagggagcaccaacgataacgtctatttcggctacagcaccccctgggggtattttgacttcaacagattccattgccacttctcaccacgtgactggcagcgacttatcaacaacaactggggattccggcccaagaagctcaacttcaagctcttcaacatccaggtcaaggaggtcacgacgaatgacggtgtcacaaccatcgctaataaccttaccagcacggttcaggtcttttcggactcggaatatcaactgccgtacgtcctcggctccgcgcaccagggctgcctgcctccgttcccggcagacgtgttcatgattccgcagtacggatacctgactctgaacaatggcagccaatcggtaggccgttcctccttctactgcctggagtactttccttctcagatgctgagaacgggcaacaacttcacctttagctacaccttcgaggacgtgcctttccacagcagctacgcgcacagccagagtctggaccggctgatgaatcccctcatcgaccagtacctgtactacttggccagaacacagagcaacgcaggaggtactgctggcaatcgggaactgcagttttatcagggcggacctaccaccatggccgaacaagcaaagaactggctgcccggaccttgcttccggcaacagagagtatccaagacgctggatcaaaataacaacagcaactttgcctggactggtgccacaaaataccatttaaatggaagaaattcattggttaatcccggtgtcgccatggcaacccacaaggacgacgaggaacgcttctccccttcgagcggagttctaatttttggcaaaactggagcagctaataaaactacattagaaaacgtgctcatgacaaatgaagaagaaattcgtcctaccaacccggtagctaccgaggaatacgggattgtaagcagcaacttgcaggcggctagcaccgcagcccagacacaagttgttaacaaccagggagccttacctggcatggtctggcagaaccgggacgtgtacctgcaaggtcccatttgggccaagattcctcacacggacggcaactttcacccgtctcctctaatgggtggctttggactgaaacacccgcctccccagatcctgatcaaaaacacgccggtacctgctaatcctccagaagtgtttactcctgccaagtttgcttccttcatcacgcagtacagcaccgggcaagtcagcgttgagatcgagtgggagctgcagaaagagaacagcaagcgctggaacccagagattcagtacacctccaactttgacaaacagactggagtggactttgctgttgacagccagggtgtttactctgagcct

SEQ ID NO: 18 - protein, 644 aa, synthetic construct
  REGION 1..644: note = Description of Artificial Sequence: Synthetic polypeptide
KAYDQQLKAGDNPYLRYNHADAEFQECLQEDTSFGGNLGRAVFQAKKRVLEPLGLVETPAKTAPGKKRPVDSPDSTSGIGKKGQQPAKKRLNFGQTGDSESVPDPQPIGEPPAGPSGLGSGTMVAGGGAPMADNNEGADGVGNASGNWHCDSTWLGDRVITTSTRTWALPTYNNHLYKQISSQSAGSTNDNVYFGYSTPWGYFDFNRFHCHFSPRDWQRLINNNWGFRPKKLNFKLFNIQVKEVTTNDGVTTIANNLTSTVQVFSDSEYQLPYVLGSAHQGCLPPFPADVFMIPQYGYLTLNNGSQSVGRSSFYCLEYFPSQMLRTGNNFTFSYTFEDVPFHSSYAHSQSLDRLMNPLIDQYLYYLARTQSNAGGTAGNRELQFYQGGPTTMAEQAKNWLPGPCFRQQRVSKTLDQNNNSNFAWTGATKYHLNGRNSLVNPGVAMATHKDDEERFSPSSGVLIFGKTGAANKTTLENVLMTNEEEIRPTNPVATEEYGIVSSNLQAASTAAQTQVVNNQGALPGMVWQNRDVYLQGPIWAKIPHTDGNFHPSPLMGGFGLKHPPPQILIKNTPVPANPPEVFTPAKFASFITQYSTGQVSVEIEWELQKENSKRWNPEIQYTSNFDKQTGVDFAVDSQGVYSEP

SEQ ID NO: 19 - DNA, 1933 bp, Adeno-associated virus
  source 1..1933: mol_type = genomic DNA
caaggcctacgaccagcagctcaaagcgggtgacaatccgtacctgcggtataaccacgccgacgccgagtttcaggagcgtcttcaagaagatacgtcttttgggggcaacctcgggcgagcagtcttccaggccaaaaagcgggttctcgaacctcttggtctggttgagacgccagctaagacggcacctggaaagaagcgaccggtagactcgccagactccacctcgggcatcggcaagaaaggccagcagcccgcgaaaaagagactcaactttgggcagactggcgactcagagccagtccccgaccctcaaccaatcggagaaccaccagcaggcccctctggtctgggatctggtacaatggctgcaggcggtggcgcaccaatggctgacaataacgagggcgccgacggagtgggtaatgcctcaggaaattggcattgcgattccacacggctgggcgacagagtcatcaccaccagcacccgaacctgggccctgcccacctacaacaaccacctctacaagcaaatctccagtcagtcagcagggagcaccaacgataacgtctatttcggctacagcaccccctgggggtattttgacttcaacagattccattgccacttctcaccacgtgactggcagcgacttatcaacaacaactggggattccggcccaagaagctcaacttcaagctcttcaacatccaggtcaaggaggtcacgacgaatgacggcgtcacaaccatcgctaataaccttaccagcacggttcaggtcttttcggactcggaatatcaactgccgtacgtcctcggctccgcgcaccagggctgcctgcctccgttcccggcagacgtgttcatgattccgcagtacggatacctgactctgaacaatggcagccaatcggtaggccgttcctccttctactgcctggagtactttccttctcagatgctgagaacgggcaacaacttcacctttagctacaccttcgaggacgtgcctttccacagcagctacgcgcacagccagagtctgggccggctgatgaatcccctcatcgaccagtacctgtactacttggccagaacacagagcaacgcaggaggtactgctggcaatcgggaactgcagttttatcagggcggacctaccaccatggccgaacaagcaaagaactggctgcccggaccttgcttccggcaacagagagtatccaagacgctggatcaaaataacaacagcaactttgcctggactggtgccacaaaataccatttaaatggaagaaattcattggttaatcccggtgtcgccatggcaacccacaaggacgacgaggaacgcttcttcccttcgagcggagttctaatttttggcaaaactggagcagctaataaaactacattagaaaacgtgctcatgacaaatgaagaagaaattcgtcctaccaacccggtagctaccgaggaatacgggattgtaagcagcaacttgcaggcggctagcaccgcagcccagacacaagttgttaacaaccagggagccttacctggcatggtctggcagaaccgggacgtgtacctgcaaggtcccatttgggccaagattcctcacacggacggcaactttcacccgtctcctctaatgggtggctttggactgaaacacccgcctccccagatcctgatcaaaaacacaccggtacctgctaatcctccagaagtgtttactcctgccaagtttgcttccttcatcacgcagtacagcaccgggcaagtcagcgttgagatcgaatgggagctgcagaaagagaacagcaagcgctggaacccagagattcagtacacctccaactttgacaaacagactggagtggactttgctgttgacagccagggtgtttactctgagcct

SEQ ID NO: 20 - protein, 644 aa, synthetic construct
  REGION 1..644: note = Description of Artificial Sequence: Synthetic polypeptide
KAYDQQLKAGDNPYLRYNHADAEFQERLQEDTSFGGNLGRAVFQAKKRVLEPLGLVETPAKTAPGKKRPVDSPDSTSGIGKKGQQPAKKRLNFGQTGDSEPVPDPQPIGEPPAGPSGLGSGTMAAGGGAPMADNNEGADGVGNASGNWHCDSTRLGDRVITTSTRTWALPTYNNHLYKQISSQSAGSTNDNVYFGYSTPWGYFDFNRFHCHFSPRDWQRLINNNWGFRPKKLNFKLFNIQVKEVTTNDGVTTIANNLTSTVQVFSDSEYQLPYVLGSAHQGCLPPFPADVFMIPQYGYLTLNNGSQSVGRSSFYCLEYFPSQMLRTGNNFTFSYTFEDVPFHSSYAHSQSLGRLMNPLIDQYLYYLARTQSNAGGTAGNRELQFYQGGPTTMAEQAKNWLPGPCFRQQRVSKTLDQNNNSNFAWTGATKYHLNGRNSLVNPGVAMATHKDDEERFFPSSGVLIFGKTGAANKTTLENVLMTNEEEIRPTNPVATEEYGIVSSNLQAASTAAQTQVVNNQGALPGMVWQNRDVYLQGPIWAKIPHTDGNFHPSPLMGGFGLKHPPPQILIKNTPVPANPPEVFTPAKFASFITQYSTGQVSVEIEWELQKENSKRWNPEIQYTSNFDKQTGVDFAVDSQGVYSEP

SEQ ID NO: 21 - DNA, 1933 bp, Adeno-associated virus; identical to SEQ ID NO: 19
  source 1..1933: mol_type = genomic DNA

SEQ ID NO: 22 - protein, 644 aa, synthetic construct; identical to SEQ ID NO: 20
  REGION 1..644: note = Description of Artificial Sequence: Synthetic polypeptide

SEQ ID NO: 23 - DNA, 1933 bp, Adeno-associated virus
  source 1..1933: mol_type = genomic DNA
caaggcctacgaccagcagctcaaagcgggtgacaatccgtacctgcggtataaccacgccgacgccgagtttcaggagcgtcttcaagaagatacgtcttttgggggcaacctcgggcgagcagtcttccaggccaaaaagcgggttctcgaacctcttggtctggttgagacgccagctaagacggcacctggaaagaagcgaccggtagactcgccagactccacctcgggcatcggcaagaaaggccagcagcccgcgaaaaagagactcaactttgggcagactggcgactcagagtcagtccccgaccctcaaccaatcggagaaccaccagcaggcccctctggtctgggatctggtacaatggctgcaggcggtggcgcaccaatggctgacaatagcgagggcgccgacggagtgggtaatgcctcaggaaattggcattgcgattccacatggctgggcgacagagtcatcaccaccagcacccgaacctgggccctgcccacctacaacaaccacctctacaagcaaatctccagtcagtcagcagggagcaccaacgataacgtctatttcggctacagcaccccctgggggtattttgacttcaacagattccattgccacttctcaccacgtgactggcagcgacttatcaacaacaactggggattccggcccaagaagctcaacttcaagctcttcaacatccaggtcaaggaggtcacgacgaatgacggtgtcacaaccatcgctaataaccttaccagcacggttcaggtcttttcggactcggaatatcaactgccgtacgtcctcggctccgcgcaccagggctgcctgcctccgttcccggcagacgtgttcatgattccgcagtacggatacctgactctgaacaatggcagccaatcggtaggccgttcctccttctactgcctggagtactttccttctcagatgctgagaacgggcaacaacttcacctttagctacaccttcgaggacgtgcctttccacagcagctacgcgcacagccagagtctggaccggctgatgaatcccctcatcgaccagtacctgtactacttggccagaacacagagcaacgcaggaggtactgctggcaatcgggaactgcagttttatcagggcggacctaccaccatggccgaacaagcaaagaactggctgcccggaccttgcttccggcaacagagagtatccaagacgctggatcaaaataacaacagcaactttgcctggactggtgccacaaaataccatttaaatggaagaaattcattggttaatcccggtgtcgccatggcaacccacaaggacgacgaggaacgcttcttcccttcgagcggagttctaatttttggcaaaactggagcagctaataaaactacattagaaaacgtgctcatgacaaatgaagaagaaattcgtcctaccaacccggtagctaccgaggaatacgggattgtaagcagcaacttgcaggcggctagcaccgcagcccagacacaagttgttaacaaccagggagccttacctggcatggtctggcagaaccgggacgtgtacctgcaaggtcccatttgggccaagattcctcacacggacggcaactttcacccgtctcctctaatgggtggctttggactgaaacacccgcctccccagatcctgatcaaaaacacaccggtacctgctaatcctccagaagtgtttactcctgccaagcttgcttccttcatcacgcagtacagcaccgggcaagtcagcgttgagatcgagtgggagctgcagaaagagaacagcaagcgctggaacccagagattcagtacacctccaactttgacaaacagactggagtggactttgctgttgacagccagggtgtttactctgagcct

SEQ ID NO: 24 - protein, 644 aa, synthetic construct
  REGION 1..644: note = Description of Artificial Sequence: Synthetic polypeptide
KAYDQQLKAGDNPYLRYNHADAEFQERLQEDTSFGGNLGRAVFQAKKRVLEPLGLVETPAKTAPGKKRPVDSPDSTSGIGKKGQQPAKKRLNFGQTGDSESVPDPQPIGEPPAGPSGLGSGTMAAGGGAPMADNSEGADGVGNASGNWHCDSTWLGDRVITTSTRTWALPTYNNHLYKQISSQSAGSTNDNVYFGYSTPWGYFDFNRFHCHFSPRDWQRLINNNWGFRPKKLNFKLFNIQVKEVTTNDGVTTIANNLTSTVQVFSDSEYQLPYVLGSAHQGCLPPFPADVFMIPQYGYLTLNNGSQSVGRSSFYCLEYFPSQMLRTGNNFTFSYTFEDVPFHSSYAHSQSLDRLMNPLIDQYLYYLARTQSNAGGTAGNRELQFYQGGPTTMAEQAKNWLPGPCFRQQRVSKTLDQNNNSNFAWTGATKYHLNGRNSLVNPGVAMATHKDDEERFFPSSGVLIFGKTGAANKTTLENVLMTNEEEIRPTNPVATEEYGIVSSNLQAASTAAQTQVVNNQGALPGMVWQNRDVYLQGPIWAKIPHTDGNFHPSPLMGGFGLKHPPPQILIKNTPVPANPPEVFTPAKLASFITQYSTGQVSVEIEWELQKENSKRWNPEIQYTSNFDKQTGVDFAVDSQGVYSEP

SEQ ID NO: 25 - DNA, 1933 bp, Adeno-associated virus
  source 1..1933: mol_type = genomic DNA
caaggcctacgaccagcagctcaaagcgggtgacaatccgtacctgcggtataaccacgccgacgccgagtttcaggagcgtcttcaagaagatacgtcttttgggggcaacctcgggcgagcagtcttccaggccaaaaagcgggttctcgaacctcttggtctggttgagacgccagctaagacggcacctggaaagaagcgaccggtagactcgccagactccacctcgggcatcggcaagaaaggccagcagcccgcgaaaaagagactcaactttgggcagactggcgactcagagtcagtccccgaccctcaaccaatcggagaaccaccagcaggcccctctggtctgggatctggtacaatggctgcaggcggtggcgcaccaatggctgacaataacgagggcgccgacggagtgggtaatgcctcaggaaattggcattgcgattccacatggctgggcgacagagtcatcaccaccagcacccgaacctgggccctgcccacctacaacaaccacctctacaagcaaatctccagtcagtcagcagggagcaccaacgataacgtctatttcggctacagcaccccctgggggtattttgacttcaacagattccattgccacttctcaccacgtgactggcagcgacttatcaacaacaactggggattccggcccaagaagctcaacttcaagctcttcaacatccaggtcaaggaggtcacgacgaatgacggcgtcacaaccatcgctaataaccttaccagcacggttcaggtcttttcggacccggaatatcaactgccgtacgtcctcggctccgcgcaccagggctgcctgcctccgttcccggcagacgtgttcatgattccgcagtacggatacctgactctgaacaatggcagccaatcggtaggccgttcctccttctactgcctggagtactttccttctcagatgctgagaacgggcaacaacttcacctttagctacaccttcgaggacgtgcctttccacagcagctacgcgcacagccagagtctggaccggctgatgaatcccctcatcgaccagtacctgtactacttggccagaacacagagcaacgcaggaggtactgctggcaatcgggaactgcagttttatcagggcggacctaccaccatggccgaacaagcaaagaactggctgcccggaccttgcttccggcaacagagagtatccaagacgctggatcaaaataacaacagcaactttgcctggactggtgccacaaaataccatttaaatggaagaaattcattggttaatcccggtgtcgccatggcaacccacaaggacgacgaggaacgcttcttcccttcgagcggagttctaatttttggcaaaactggagcagctaataaaactacattagaaaacgtgctcatgacaaatgaagaagaaattcgtcctaccaacccggtagctaccgaggaatacgggattgtaagcagcaacttgcaggcggctagcaccgcagcccagacacaagttgttaacaaccagggagccttacctggcatggtctggcagaaccgggacgtgtacctgcaaggtcccatttgggccaagattcctcacacggacggcaactttcacccgtctcctctaatgggtggctttggactgaaacacccgcctccccagatcctgatcaaaaacacaccggtacctgctaatcctccagaagtgtttactcctgccaagattgcttccttcatcacgcagtacagcaccgggcaagtcagcgttgagatcgagtgggagctgcagaaagagaacagcaagcgctggaacccagagattcagtacacctccaactttgacaaacagactggagtggactttgctgttgacagccagggtgtttactctgagcct

SEQ ID NO: 26 - protein, 644 aa, synthetic construct
  REGION 1..644: note = Description of Artificial Sequence: Synthetic polypeptide
KAYDQQLKAGDNPYLRYNHADAEFQERLQEDTSFGGNLGRAVFQAKKRVLEPLGLVETPAKTAPGKKRPVDSPDSTSGIGKKGQQPAKKRLNFGQTGDSESVPDPQPIGEPPAGPSGLGSGTMAAGGGAPMADNNEGADGVGNASGNWHCDSTWLGDRVITTSTRTWALPTYNNHLYKQISSQSAGSTNDNVYFGYSTPWGYFDFNRFHCHFSPRDWQRLINNNWGFRPKKLNFKLFNIQVKEVTTNDGVTTIANNLTSTVQVFSDPEYQLPYVLGSAHQGCLPPFPADVFMIPQYGYLTLNNGSQSVGRSSFYCLEYFPSQMLRTGNNFTFSYTFEDVPFHSSYAHSQSLDRLMNPLIDQYLYYLARTQSNAGGTAGNRELQFYQGGPTTMAEQAKNWLPGPCFRQQRVSKTLDQNNNSNFAWTGATKYHLNGRNSLVNPGVAMATHKDDEERFFPSSGVLIFGKTGAANKTTLENVLMTNEEEIRPTNPVATEEYGIVSSNLQAASTAAQTQVVNNQGALPGMVWQNRDVYLQGPIWAKIPHTDGNFHPSPLMGGFGLKHPPPQILIKNTPVPANPPEVFTPAKIASFITQYSTGQVSVEIEWELQKENSKRWNPEIQYTSNFDKQTGVDFAVDSQGVYSEP

SEQ ID NO: 27 - protein, 738 aa, synthetic construct
  REGION 1..738: note = Description of Artificial Sequence: Synthetic polypeptide
MAADGYLPDWLEDNLSEGIREWWALKPGAPKPKANQQKQDDGRGLVLPGYKYLGPFNGLDKGEPVNAADAAALEHDKAYDQQLKAGDNPYLRYNHADAEFQERLQEDTSFGGNLGRAVFQAKKRVLEPLGLVEEGAKTAPGKKRPVEPSPQRSPDSTTGIGKKGQQPAKKRLNFGQTGDSESVPDPQPIGEPPAGPSGLGSGTMAAGGGAPMADNNEGADGVGSSSGNWHCDSTWLGDRVITTSTRTWALPTYNNHLYKQISNGTSGGSTNDNTYFGYSTPWGYFDFNRFHCHFSPRDWQRLINNNWGFRPKRLNFKLFNIQVKEVTQNEGTKTIANNLTSTIQVFTDSEYQLPYVLGSARQGCLPPFPADVFMIPQYGYLTLNNGSQAVGRSSFYCLEYFPSQMLRTGNNFEFSYQFEDVPFHSSYAHSQSLDRLMNPLIDQYLYYLSRTQSTGGTAGTQQLLFSQAGPNNMSAQAKNWLPGPCYRQQRVSTTLSQNNNSNFAWTGATKYHLNGRDSLVNPGVAMATHKDDEERFFPSSGVLMFGKQGAGKGNVDYSSVMLTSEEEIKTTNPVATEQYGVVADNLQQQNAAPIVGAVNSQGALPGMVWQNRDVYLQGPIWAKIPHTDGNFHPSPLMGGFGLKHPPPQILIKNTPVPADPPTTFSQAKLASFITQYSTGQVSVEIEWELQKENSKRWNPEIQYTSNYYKSTNVDFAVNTDGTYSEPRPIGTRYLTRNL

SEQ ID NO: 28 - DNA, 3121 bp, Adeno-associated virus
  source 1..3121: mol_type = genomic DNA
gaattcgcccttctacggctgcgtcaactggaccaatgagaactttcccttcaacgactgtgtcgacaagatggtgatctggtgggaggaggggaagatgaccgccaaggtcgtggagtcggccaaagccattctcggaggaagcaaggtgcgcgtggaccagaaatgcaagtcctcggcccagatagacccgactcccgtgatcgtcacctccaacaccaacatgtgcgccgtgattgacgggaactcaacgaccttcgaacaccagcagccgttgcaagaccggatgttcaaatttgaactcacccgccgtctggatcatgactttgggaaggtcaccaagcaggaagtcaaagactttttccggtgggcaaaggatcacgtggttgaggtggagcacgaattctacgtcaaaaagggtggagccaagaaaagacccgcccccagtgacgcagatataagtgagcccaaacgggtgcgcgagtcagttgcgcagccatcgacgtcagacgcggaagcttcgatcaactacgcagacaggtaccaaaacaaatgttctcgtcacgcgggcatgaatctgatgctgtttccctgcagacaatgcgagagaatgaatcagaattcaaatatctgcttcactcacggacagaaagactgtttagagtgctttcccgtgtcagaatctcaacccgtttctgtcgtcaaaaaggcgtatcagaaactgtgctacattcatcatatcatgggaaaggtgccagacgcttgcactgcctgcgatctggtcgatgtggatttggatgactgcatctttgaacaataaatgatttaaatcaggtatggctgccgatggttatcttccagattggctcgaggacaacctctctgagggcattcgcgagtggtgggcgctgaaacctggagccccgaagcccaaagccaaccagcaaaagcaggacggcggccggggtctggtgcttcctggctacaagtacctcggacccttcaacggactcgacaagggggagcccgtcaacgcggcggacgcagcggccctcgagcacgacaaggcctacgaccagcagctcaaagcgggtgacaatccgtacctgcggtataaccacgccgacgccgagtttcaggagcgtctgcaagaagatacgtcttttgggggcaacctcgggcgagcagtcttccaggccaagaagcgggttctcgaacctctcggtctggttgaggaaggcgctaagacggctcctggaaagaagagaccggtagagccatcaccccagcgttctccagactcctctacgggcatcggcaagaaaggccagcagcccgcgaaaaagagactcaactttgggcagactggcgactcagagtcagtgcccgaccctcaaccaatcggagaaccccccgcaggcccctctggtctgggatctggtacaatggctgcaggcggtggcgctccaatggcagacaataacgaaggcgccgacggagtgggtagttcctcaggaaattggcattgcgattccacatggctgggcgactgagtcatcaccaccagcacccgaacctgggccctccccacctacaacaaccacctctacaagcaaatctccaacgggacttcgggaggaagcaccaacgacaacacctacttcggctacagcaccccctgggggtattttgactttaacagattccactgccacttctcaccacgtgactggcagcgactcatcaacaacaactggggattccggcccaagagactcaacttcaagctcttcaacatccaggtcaaggaggtcacgcagaatgaaggcaccaagaccatcgccaataaccttaccagcacgattcaggtctttacggactcggaataccagctcccgtacgtcctcggctctgcgcaccagggctgcctgcctccgttcccggcggacgtcttcatgattcctcagtacgggtacctgactctgaacaatggcagtcaggccgtgggccgttcctccttctactgcctggagtactttccttctcaaatgctgagaacgggcaacaactttgagttcagctaccagtttgaggacgtgccttttcacagcagctacgcgcacagccaaagcctggaccggctgatgaaccccctcatcgaccagtacctgtactacctgtctcggactcagtccacgggaggtaccgcaggaactcagcagttgctattttctcaggccgggcctaataacatgtcggctcaggccaaaaactggctacccgggccctgctaccggcagtaacgcgtctccacgacactgtcgcaaaataacaacagcaactttgtctggaccggtgccaccaagtatcatctgaatggcagagactctctggtagatcccggtgtcgctatggcaacccacaaggacgacgaagagcgattttttccgtccagcggagtcataatgtttgggaaacagggagctggaaaagacaacgtggactatagcagcgtcatgctaaccagtgaggaagaaattaaaaccaccaacccagtggccacagaacagtacggcgtggtggccgataacctgcaacagcaaaacgccgctcctattgtaggggccgtcaacagtcaaggagccttacctggcatggtctggcagaaccgggacgtgtacctgcagggtcctacctgggccaagattcctcacacggacggaaactttcatccctcgccgctgatgggaggctttggactgaaacacccgcctcctcagatcctgattaagaatacacctgttcccgcggatcctccaactaccttcagtcaagctaagctggcgtcgttcatcacgcagtacagcaccggacaggtcagcgtggaaattgaatgggagctgcaggaagaaaacagcaaacgctggaacccagagattcaatacacttccaactactacaaatctacaaatgtggactttgctgttaacacagatggcacttattctgagcctcgccccatcggcacccgttacctcacccgtaatctgtaattgcttgttaatcaataaaccggttgattcgtttcagttgaactttggtctctgcgaagggcgaattc

SEQ ID NO: 29 - protein, 738 aa, synthetic construct
  REGION 1..738: note = Description of Artificial Sequence: Synthetic polypeptide
MAADGYLPDWLEDNLSEGIREWWALKPGAPKPKANQQKQDDGRGLVLPGYKYLGPFNGLDKGEPVNAADAAALEHDKAYDQQLKAGDNPYLRYNHADAEFQERLQEDTSFGGNLGRAVFQAKKRVLEPLGLVEEGAKTAPGKKRPVEPSPQRSPDSSTGIGKKGQQPAKKRLNFGQTGDSESVPDPQPIGEPPAGPSGLGSGTMAAGGGAPMADNNEGADGVGSSSGNWHCDSTWLGDGVITTSTRTWALPTYNNHLYKQISNGTSGGSTNDNTYFGYSTPWGYFDFNRFHCHFSPRDWQRLINNNWGFRPKSLNFKLFNIQVKEVTQNEGTKTIANNLTSTIQVFTDSEYQLPYVLGSAHQGCLPPFPADVFMIPQYGYLTLNNGSQAVGRSSFYCLEYFPSQMLRTGNNFEFSYQFEDVPFHSSYAHSQSLDRLMNPLIDQYLYYLSRTQSTGGTAGTQQLLFSQAGPNNMSAQAKNWLPGPCYRQQRVSTTLSQNDNSNFAWTGATKYHLNGRDSLVNPGVAMATHKDDEERFFPSSGVLMFGKQGAGKDNVDYSSVMLTSEEEIKTTNPVATEQYGVVADNLQQQNAAPIVGAVNSQGALPGMVWQNRDVYLQGPIWAKIPHTDGNFHPSPLMGGFGLKHPPPQILIKNTPVPADPPTTFSQAKLASFITQYSTGQVSVEIEWELQKENSKRWNPEIQYTSNYYKSTNVDFAVNTDGTYSEPRPIGTRYLTRNL

SEQ ID NO: 30 - DNA, 3121 bp, Adeno-associated virus
  source 1..3121: mol_type = genomic DNA
gaattcgcccttcgcgagaccaaagttcaactgaaacgaatcaaccggtttattgattaacaagcaattacagattacgggtgaggtaacgggtgccgatggggcgaggctcagaataagtgccatctgtgttaacagcaaagtccacatttgtagatttgtagtagttggaagtgtattgaatctctgggttccagcgtttgctgttttctttctgcagctcccattcaatttccacgctgacctgtccggtgctgtactgcgtgatgaacgacgccagcttagcttgactgaaggtagttggaggatccgcgggaacaggtgtattcttaatcaggatctgaggaggcgggtgtttcagtccaaagcctcccatcagcggcgagggatgaaagtttccgtccgtgtgaggaatcttggcccagataggaccctgcaggtacacgtcccggttctgccagaccatgccaggtaaggctccttgactgttgacggcccctacaataggagcggcgttttgctgttgcaggttatcggccaccacgccgtactgttctgtggccactgggttggtggttttaatttcttcctcactggttagcataacgctgctatagtccacgttgtcttttccagctccctgtttcccaaacattaagactccgctggacggaaaaaatcgctcttcgtcgtccttgtgggttgccatagcgacaccgggatttaccagagagtctctgccattcagatgatacttggtggcaccggtccaggcaaagttgctgttgtcattttgcgacagtgtcgtggagacgcgttgctgccggtagcagggcccgggtagccagtttttggcctgagccgacatgttattaggcccggcctgagaaaatagcaactgctgagttcctgcggtacctcccgtggactgagtccgagacaggtagtacaggtactggtcgatgagggggttcatcagccggtccaggctttggctgtgcgcgtagctgctgtgaaaaggcacgtcctcaaactggtagctgaactcaaagttgttgcccgttctcagcatttgagaaggaaagtactccaggcagtagaaggaggaacggcccacggcctgactgccattgttcagagtcaggtacccgtactgaggaatcatgaagacgtccgccgggaacggaggcaggcagccctggtgcgcagagccgaggacgtacgggagctggtattccgagtccgtaaagacctgaatcgtgctggtaaggttattggcgatggtcttggtgccttcattctgcgtgacctccttgacctggatgttgaagagcttgaagttgaggctcttgggccggaatccccagttgttgttgatgagtcgctgccagtcacgtggtgagaagtggcagtggaatctgttaaagtcaaaatacccccagggggtgctgtagccgaagtaggtgttgtcgttggtgcttcctcccgaagtcccgttggagatttgcttgtagaggtggttgttgtaggtggggagggcccaggttcgggtgctggtggtgatgactccgtcgcccagccatgtggaatcgcaatgccaatttcctgaggaactacccactccgtcggcgccttcgttattgtctgccattggagcgccaccgcctgcagccattgtaccagatcccagaccagaggggcctgcggggggttctccgattggttgagggtcgggcactgactctgagtcgccagtctgcccaaagttgagtctctttttcgcgggctgctggcctttcttgccgatgcccgtagaggagtctggagaacgctggggtgatggctctaccggtctcttctttccaggagccgtcttagcgccttcctcaaccagaccgagaggttcgagaacccgcttcttggcctggaagactgctcgcccgaggttgcccccaaaagacgtatcttcttgcagacgctcctgaaactcggcgtcggcgtggttataccgcaggtacggattgtcacccgctttgagctgctggtcgtaggccttgtcgtgctcgagggccgctgcgtccgccgcgttgacgggctcccccttgtcgagtccgttgaagggtccgaggtacttgtagccaggaagcaccagaccccggccgtcgtcctgcttttgctggttggctttgggcttcggggctccaggtttcagcgcccaccactcgcgaatgccctcagagaggttgtcctcgagccaatctggaagataaccatcggcagccatacctgatttaaatcatttattgttcaaagatgcagtcatccaaatccacattgaccagatcgcaggcagtgcaagcgtctggcacctttcccatgatatgatgaatgtagcacagtttctgatacgcctttttgacgacagaaacgggttgagattctgacacgggaaagcactctaaacagtctttctgtccgtgagtgaagcagatatttgaattctgattcattctctcgcattgtctgcagggaaacagcatcagattcatgcccacgtgacgagaacatttgttttggtacctgtctgcgtagttgatcgaagcttccgcgtctgacgtcgatggctgcgcaactgactcgcgcacccgtttgggctcacttatatctgcgtcactgggggcgggtcttttcttggctccaccctttttgacgtagaattcatgctccacctcaaccacgtgatcctttgcccaccggaaaaagtctttgacttcctgcttggtgaccttcccaaagtcatgatccagacggcgggtgagttcaaatttgaacatccggtcttgcaacggctgctggtgttcgaaggtcgttgagttcccgtcaatcacggcgcacatgttggtgttggaggtgacgatcacgggagtcgggtctatctgggccgaggacttgcatttctggtccacgcgcaccttgcttcctccgagaatggctttggccgactccacgaccttggcggtcatcttcccctcctcccaccagatcaccatcttgtcgacacagtcgttgaagggaaagttctcattggtccagttgacgcagccgtagaaagggcgaattc

SEQ ID NO: 31 - DNA, 2211 bp, Adeno-associated virus
  source 1..2211: mol_type = genomic DNA
atggctgctgacggttatcttccagattggctcgaggacaacctttctgaaggcattcgtgagtggtgggctctgaaacctggagtccctcaacccaaagcgaaccaacaacaccaggacaaccgtcggggtcttgtgcttccgggttacaaatacctcggacccggtaacggactcgacaaaggagagccggtcaacgaggcggacgcggcagccctcgaacacgacaaagcttacgaccagcagctcaaggccggtgacaacccgtacctcaagtacaaccacgccgacgccgagtttcaggagcgtcttcaagaagatacgtcttttgggggcaaccttggcagagcagtcttccaggccaaaaagaggatccttgagcctcttggtctggttgaggaagcagctaaaacggctcctggaaagaagggggctgtagatcagtctcctcaggaaccggactcatcatctggtgttggcaaatcgggcaaacagcctgccagaaaaagactaaatttcggtcagactggagactcagagtcagtcccagaccctcaacctctcggagaaccaccagcagcccccacaagtttgggatctaatacaatggcttcaggcggtggcgcaccaatggcagacaataacgagggtgccgatggagtgggtaattcctcaggaaattggcattgcgattcccaatggctgggcgacagagtcatcaccaccagcaccagaacctgggccctgcccacttacaacaaccatctctacaagcaaatctccagccaatcaggagcttcaaacgacaaccactactttggctacagcaccccttgggggtattttgactttaacagattccactgccacttctcaccacgtgactggcagcgactcattaacaacaactggggattccggcccaagaaactcagcttcaagctcttcaacatccaagttagaggggtcacgcagaacgatggcacgacgactattgccaataaccttaccagcacggttcaagtgtttacggactcggagtatcagctcccgtacgtgctcgggtcggcgcaccaaggctgtctcccgccgtttccagcggacgtcttcatggtccctcagtatggatacctcaccctgaacaacggaagtcaagcggtgggacgctcatccttttactgcctggagtacttcccttcgcagatgctaaggactggaaataacttccaattcagctataccttcgaggatgtaccttttcacagcagctacgctcacagccagagtttggatcgcttgatgaatcctcttattgatcagtatctgtactacctgaacagaacgcaaggaacaacctctggaacaaccaaccaatcacggctgctttttagccaggctgggcctcagtctatgtctttgcaggccagaaattggctacctgggccctgctaccggcaacagagactttcaaagactgctaacgacaacaacaacagtaactttccttggacagcggccagcaaatatcatctcaatggccgcgactcgctggtgaatccaggaccagctatggccagtcacaaggacgatgaagaaaaatttttccctatgcacggcaatctaatatttggcaaagaagggacaacggcaagtaacgcagaattagataatgtaatgattacggatgaagaagagattcgtaccaccaatcctgtggcaacagagcagtatggaactgtggcaaataacttgcagagctcaaatacagctcccacgactggaactgtcaatcatcagggggccttacctggcatggtgtggcaagatcgtgacgtgtaccttcaaggacctatctgggcaaagattcctcacacggatggacactttcatccttctcctctgatgggaggctttggactgaaacatccgcctcctcaaatcatgatcaaaaatactccggtaccggcaaatcctccgacgactttcagcccggccaagtttgcttcatttatcactcagtactccactggacaggtcagcgtggaaattgagtgggagctacagaaagaaaacagcaaacgttggaatccagagattcagtacacttccaactacaacaagtctgttaatgtggactttactgtagacactaatggtgtttatagtgaacctcgccctattggaacccggtatctcacacgaaacttgtga

SEQ ID NO: 32 - protein, 736 aa, Adeno-associated virus 3
MAADGYLPDWLEDNLSEGIREWWALKPGVPQPKANQQHQDNRRGLVLPGYKYLGPGNGLDKGEPVNEADAAALEHDKAYDQQLKAGDNPYLKYNHADAEFQERLQEDTSFGGNLGRAVFQAKKRILEPLGLVEEAAKTAPGKKGAVDQSPQEPDSSSGVGKSGKQPARKRLNFGQTGDSESVPDPQPLGEPPAAPTSLGSNTMASGGGAPMADNNEGADGVGNSSGNWHCDSQWLGDRVITTSTRTWALPTYNNHLYKQISSQSGASNDNHYFGYSTPWGYFDFNRFHCHFSPRDWQRLINNNWGFRPKKLSFKLFNIQVRGVTQNDGTTTIANNLTSTVQVFTDSEYQLPYVLGSAHQGCLPPFPADVFMVPQYGYLTLNNGSQAVGRSSFYCLEYFPSQMLRTGNNFQFSYTFEDVPFHSSYAHSQSLDRLMNPLIDQYLYYLNRTQGTTSGTTNQSRLLFSQAGPQSMSLQARNWLPGPCYRQQRLSKTANDNNNSNFPWTAASKYHLNGRDSLVNPGPAMASHKDDEEKFFPMHGNLIFGKEGTTASNAELDNVMITDEEEIRTTNPVATEQYGTVANNLQSSNTAPTTGTVNHQGALPGMVWQDRDVYLQGPIWAKIPHTDGHFHPSPLMGGFGLKHPPPQIMIKNTPVPANPPTTFSPAKFASFITQYSTGQVSVEIEWELQKENSKRWNPEIQYTSNYNKSVNVDFTVDTNGVYSEPRPIGTRYLTRNL

SEQ ID NO: 33 - DNA, 4726 bp, Adeno-associated virus 3
  source 1..4726: mol_type = genomic DNA
ttggccactccctctatgcgcactcgctcgctcggtggggcctggcgaccaaaggtcgccagacggacgtgctttgcacgtccggccccaccgagcgagcgagtgcgcatagagggagtggccaactccatcactagaggtatggcagtgacgtaacgcgaagcgcgcgaagcgagaccacgcctaccagctgcgtcagcagtcaggtgacccttttgcgacagtttgcgacaccacgtggccgctgagggtatatattctcgagtgagcgaaccaggagctccattttgaccgcgaaatttgaacgagcagcagccatgccggggttctacgagattgtcctgaaggtcccgagtgacctggacgagcgcctgccgggcatttctaactcgtttgttaactgggtggccgagaaggaatgggacgtgccgccggattctgacatggatccgaatctgattgagcaggcacccctgaccgtggccgaaaagcttcagcgcgagttcctggtggagtggcgccgcgtgagtaaggccccggaggccctcttttttgtccagttcgaaaagggggagacctacttccacctgcacgtgctgattgagaccatcggggtcaaatccatggtggtcggccgctacgtgagccagattaaagagaagctggtgacccgcatctaccgcggggtcgagccgcagcttccgaactggttcgcggtgaccaaaacgcgaaatggcgccgggggcgggaacaaggtggtggacgactgctacatccccaactacctgctccccaagacccagcccgagctccagtgggcgtggactaacatggaccagtatttaagcgcctgtttgaatctcgcggagcgtaaacggctggtggcgcagcatctgacgcacgtgtcgcagacgcaggagcagaacaaagagaatcagaaccccaattctgacgcgccggtcatcaggtcaaaaacctcagccaggtacatggagctggtcgggtggctggtggaccgcgggatcacgtcagaaaagcaatggattcaggaggaccaggcctcgtacatctccttcaacgccgcctccaactcgcggtcccagatcaaggccgcgctggacaatgcctccaagatcatgagcctgacaaagacggctccggactacctggtgggcagcaacccgccggaggacattaccaaaaatcggatctaccaaatcctggagctgaacgggtacgatccgcagtacgcggcctccgtcttcctgggctgggcgcaaaagaagttcgggaagaggaacaccatctggctctttgggccggccacgacgggtaaaaccaacatcgcggaagccatcgcccacgccgtgcccttctacggctgcgtaaactggaccaatgagaactttcccttcaacgattgcgtcgacaagatggtgatctggtgggaggagggcaagatgacggccaaggtcgtggagagcgccaaggccattctgggcggaagcaaggtgcgcgtggaccaaaagtgcaagtcatcggcccagatcgaacccactcccgtgatcgtcacctccaacaccaacatgtgcgccgtgattgacgggaacagcaccaccttcgagcatcagcagccgctgcaggaccggatgtttgaatttgaacttacccgccgtttggaccatgactttgggaaggtcaccaaacaggaagtaaaggactttttccggtgggcttccgatcacgtgactgacgtggctcatgagttctacgtcagaaagggtggagctaagaaacgccccgcctccaatgacgcggatgtaagcgagccaaaacgggagtgcacgtcacttgcgcagccgacaacgtcagacgcggaagcaccggcggactacgcggacaggtaccaaaacaaatgttctcgtcacgtgggcatgaatctgatgctttttccctgtaaaacatgcgagagaatgaatcaaatttccaatgtctgttttacgcatggtcaaagagactgtggggaatgcttccctggaatgtcagaatctcaacccgtttctgtcgtcaaaaagaagacttatcagaaactgtgtccaattcatcatatcctgggaagggcacccgagattgcctgttcggcctgcgatttggccaatgtggacttggatgactgtgtttctgagcaataaatgacttaaaccaggtatggctgctgacggttatcttccagattggctcgaggacaacctttctgaaggcattcgtgagtggtgggctctgaaacctggagtccctcaacccaaagcgaaccaacaacaccaggacaaccgtcggggtcttgtgcttccgggttacaaatacctcggacccggtaacggactcgacaaaggagagccggtcaacgaggcggacgcggcagccctcgaacacgacaaagcttacgaccagcagctcaaggccggtgacaacccgtacctcaagtacaaccacgccgacgccgagtttcaggagcgtcttcaagaagatacgtcttttgggggcaaccttggcagagcagtcttccaggccaaaaagaggatccttgagcctcttggtctggttgaggaagcagctaaaacggctcctggaaagaagggggctgtagatcagtctcctcaggaaccggactcatcatctggtgttggcaaatcgggcaaacagcctgccagaaaaagactaaatttcggtcagactggagactcagagtcagtcccagaccctcaacctctcggagaaccaccagcagcccccacaagtttgggatctaatacaatggcttcaggcggtggcgcaccaatggcagacaataacgagggtgccgatggagtgggtaattcctcaggaaattggcattgcgattcccaatggctgggcgacagagtcatcaccaccagcaccagaacctgggccctgcccacttacaacaaccatctctacaagcaaatctccagccaatcaggagcttcaaacgacaaccactactttggctacagcaccccttgggggtattttgactttaacagattccactgccacttctcaccacgtgactggcagcgactcattaacaacaactggggattccggcccaagaaactcagcttcaagctcttcaacatccaagttagaggggtcacgcagaacgatggcacgacgactattgccaataaccttaccagcacggttcaagtgtttacggactcggagtatcagctcccgtacgtgctcgggtcggcgcaccaaggctgtctcccgccgtttccagcggacgtcttcatggtccctcagtatggatacctcaccctgaacaacggaagtcaagcggtgggacgctcatccttttactgcctggagtacttcccttcgcagatgctaaggactggaaataacttccaattcagctataccttcgaggatgtaccttttcacagcagctacgctcacagccagagtttggatcgcttgatgaatcctcttattgatcagtatctgtactacctgaacagaacgcaaggaacaacctctggaacaaccaaccaatcacggctgctttttagccaggctgggcctcagtctatgtctttgcaggccagaaattggctacctgggccctgctaccggcaacagagactttcaaagactgctaacgacaacaacaacagtaactttccttggacagcggccagcaaatatcatctcaatggccgcgactcgctggtgaatccaggaccagctatggccagtcacaaggacgatgaagaaaaatttttccctatgcacggcaatctaatatttggcaaagaagggacaacggcaagtaacgcagaattagataatgtaatgattacggatgaagaagagattcgtaccaccaatcctgtggcaacagagcagtatggaactgtggcaaataacttgcagagctcaaatacagctcccacgactggaactgtcaatcatcagggggccttacctggcatggtgtggcaagatcgtgacgtgtaccttcaaggacctatctgggcaaagattcctcacacggatggacactttcatccttctcctctgatgggaggctttggactgaaacatccgcctcctcaaatcatgatcaaaaatactccggtaccggcaaatcctccgacgactttcagcccggccaagtttgcttcatttatcactcagtactccactggacaggtcagcgtggaaattgagtgggagctacagaaagaaaacagcaaacgttggaatccagagattcagtacacttccaactacaacaagtctgttaatgtggactttactgtagacactaatggtgtttatagtgaacctcgccctattggaacccggtatctcacacgaaacttgtgaatcctggttaatcaataaaccgtttaattcgtttcagttgaactttggctcttgtgcacttctttatctttatcttgtttccatggctactgcgtagataagcagcggcctgcggcgcttgcgcttcgcggtttacaactgctggttaatatttaactctcgccatacctctagtgatggagttggccactccctctatgcgcactcgctcgctcggtggggcctggcgaccaaaggtcgccagacggacgtgctttgcacgtccggccccaccgagcgagcgagtgcgcatagagggagtggccaa

SEQ ID NO: 34 - protein, 737 aa, synthetic construct
  REGION 1..737: note = Description of Artificial Sequence: Synthetic polypeptide
MAADGYLPDWLEDNLSEGIREWWDLKPGAPKPKANQQKQDNGRGLVLPGYKYLGPFNGLDKGEPVNAADAAALEHDKAYDQQLNAGDNPYLRYNHADAEFQERLQEDTSFGGNLGRAVFQAKKRVLEPLGLVEEGAKTAPAKKRPVEPSPQRSPDSSTGIGKKGQQPARKRLNFGQTGDSESVPDPQPLGEPPAAPSSVGSGTVAAGGGAPMADNNEGADGVGNASGNWHCDSTWLGDRVITTSTRTWALPTYNNHLYEQISSETAGSTNDNTYFGYSTPWGYFDFNRFHCHFSPRDWQRLINNNWGFRPKKLRFKLFNIQVKEVTTNDGVTTIANNLTSTIQVFSDSEYQLPYVLGSAHQGCLPPFPADVFMIPQYGYLTLNNGSQSVGRSSFYCLEYFPSQMLRTGNNFEFSYSFEDVPFHSSYAHSQSLDRLMNPLIDQYLYYLARTQSDPGGTAGNRELQFYQGGPSTMAEQAKNWLPGPCFRQQRVSKTLDQNNNSNFAWTGATKYHLNGRNSLVNPGVAMATHKDDEDRFFPSSGVLIFGKTGATNKTTLENVLMTNEEEIRPTNPVATEEYGIVSSNLQAANTAAQTQVVNNQGALPGMVWQNRDVYLQGPIWAKIPHTDGNFHPSPLMGGFGLKHPPPQILIKNTPVPANPPEVFTPAKFASFITQYSTGQVSVEIEWELQKENSKRWDPEIQYTSNFEKQTGVDFAVDSQGVYSEPRPIGTRYLTRNL

SEQ ID NO: 35 - DNA, 2211 bp, Adeno-associated virus
  source 1..2211: mol_type = genomic DNA
atggctgctgacggttatcttccagattggctcgaggacaacctttctgaaggcattcgtgagtggtgggctctgaaacctggagtccctcaacccaaagcgaaccaacaacaccaggacaaccgtcggggtcttgtgcttccgggttacaaatacctcggacccggtaacggactcgacaaaggagagccggtcaacgaggcggacgcggcagccctcgaacacgacaaagcttacgaccagcagctcaaggccggtgacaacccgtacctcaagtacaaccacgccgacgccgagtttcaggagcgtcttcaagaagatacgtcttttgggggcaaccttggcagagcagtcttccaggccaaaaagaggatccttgagcctcttggtctggttgaggaagcagctaaaacggctcctggaaagaagggggctgtagatcagtctcctcaggaaccggactcatcatctggtgttggcaaatcgggcaaacagcctgccagaaaaagactaaatttcggtcagactggagactcagagtcagtcccagaccctcaacctctcggagaaccaccagcagcccccacaagtttgggatctaatacaatggcttcaggcggtggcgcaccaatggcagacaataacgagggtgccgatggagtgggtaattcctcaggaaattggcattgcgattcccaatggctgggcgacagagtcatcaccaccagcaccagaacctgggccctgcccacttacaacaaccatctctacaagcaaatctccagccaatcaggagcttcaaacgacaaccactactttggctacagcaccccttgggggtattttgactttaacagattccactgccacttctcaccacgtgactggcagcgactcattaacaacaactggggattccggcccaagaaactcagcttcaagctcttcaacatccaagttagaggggtcacgcagaacgatggcacgacgactattgccaataaccttaccagcacggttcaagtgtttacggactcggagtatcagctcccgtacgtgctcgggtcggcgcaccaaggctgtctcccgccgtttccagcggacgtcttcatggtccctcagtatggatacctcaccctgaacaacggaagtcaagcggtgggacgctcatccttttactgcctggagtacttcccttcgcagatgctaaggactggaaataacttccaattcagctataccttcgaggatgtaccttttcacagcagctacgctcacagccagagtttggatcgcttgatgaatcctcttattgatcagtatctgtactacctgaacagaacgcaaggaacaacctctggaacaaccaaccaatcacggctgctttttagccaggctgggcctcagtctatgtctttgcaggccagaaattggctacctgggccctgctaccggcaacagagactttcaaagactgctaacgacaacaacaacagtaactttccttggacagcggccagcaaatatcatctcaatggccgcgactcgctggtgaatccaggaccagctatggccagtcacaaggacgatgaagaaaaatttttccctatgcacggcaatctaatatttggcaaagaagggacaacggcaagtaacgcagaattagataatgtaatgattacggatgaagaagagattcgtaccaccaatcctgtggcaacagagcagtatggaactgtggcaaataacttgcagagctcaaatacagctcccacgactggaactgtcaatcatcagggggccttacctggcatggtgtggcaagatcgtgacgtgtaccttcaaggacctatctgggcaaagattcctcacacggatggacactttcatccttctcctctgatgggaggctttggactgaaacatccgcctcctcaaatcatgatcaaaaatactccggtaccggcaaatcctccgacgactttcagcccggccaagtttgcttcatttatcactcagtactccactggacaggtcagcgtggaaattgagtgggagctacagaaagaaaacagcaaacgttggaatccagagattcagtacacttccaactacaacaagtctgttaatgtggactttactgtagacactaatggtgtttatagtgaacctcgccctattggaacccggtatctcacacgaaacttgtaa

SEQ ID NO: 36 - protein, 736 aa, Adeno-associated virus; identical to SEQ ID NO: 32

SEQ ID NO: 37 - protein, 736 aa, Adeno-associated virus 3A; identical to SEQ ID NO: 32

SEQ ID NO: 38 - protein, 624 aa, Adeno-associated virus 3A
MPGFYEIVLKVPSDLDERLPGISNSFVNWVAEKEWDVPPDSDMDPNLIEQAPLTVAEKLQREFLVEWRRVSKAPEALFFVQFEKGETYFHLHVLIETIGVKSMVVGRYVSQIKEKLVTRIYRGVEPQLPNWFAVTKTRNGAGGGNKVVDDCYIPNYLLPKTQPELQWAWTNMDQYLSACLNLAERKRLVAQHLTHVSQTQEQNKENQNPNSDAPVIRSKTSARYMELVGWLVDRGITSEKQWIQEDQASYISFNAASNSRSQIKAALDNASKIMSLTKTAPDYLVGSNPPEDITKNRIYQILELNGYDPQYAASVFLGWAQKKFGKRNTIWLFGPATTGKTNIAEAIAHAVPFYGCVNWTNENFPFNDCVDKMVIWWEEGKMTAKVVESAKAILGGSKVRVDQKCKSSAQIEPTPVIVTSNTNMCAVIDGNSTTFEHQQPLQDRMFEFELTRRLDHDFGKVTKQEVKDFFRWASDHVTDVAHEFYVRKGGAKKRPASNDADVSEPKRECTSLAQPTTSDAEAPADYADRYQNKCSRHVGMNLMLFPCKTCERMNQISNVCFTHGQRDCGECFPGMSESQPVSVVKKKTYQKLCPIHHILGRAPEIACSACDLANVDLDDCVSEQ

SEQ ID NO: 39 - protein, 736 aa, Adeno-associated virus 3B
MAADGYLPDWLEDNLSEGIREWWALKPGVPQPKANQQHQDNRRGLVLPGYKYLGPGNGLDKGEPVNEADAAALEHDKAYDQQLKAGDNPYLKYNHADAEFQERLQEDTSFGGNLGRAVFQAKKRILEPLGLVEEAAKTAPGKKRPVDQSPQEPDSSSGVGKSGKQPARKRLNFGQTGDSESVPDPQPLGEPPAAPTSLGSNTMASGGGAPMADNNEGADGVGNSSGNWHCDSQWLGDRVITTSTRTWALPTYNNHLYKQISSQSGASNDNHYFGYSTPWGYFDFNRFHCHFSPRDWQRLINNNWGFRPKKLSFKLFNIQVKEVTQNDGTTTIANNLTSTVQVFTDSEYQLPYVLGSAHQGCLPPFPADVFMVPQYGYLTLNNGSQAVGRSSFYCLEYFPSQMLRTGNNFQFSYTFEDVPFHSSYAHSQSLDRLMNPLIDQYLYYLNRTQGTTSGTTNQSRLLFSQAGPQSMSLQARNWLPGPCYRQQRLSKTANDNNNSNFPWTAASKYHLNGRDSLVNPGPAMASHKDDEEKFFPMHGNLIFGKEGTTASNAELDNVMITDEEEIRTTNPVATEQYGTVANNLQSSNTAPTTRTVNDQGALPGMVWQDRDVYLQGPIWAKIPHTDGHFHPSPLMGGFGLKHPPPQIMIKNTPVPANPPTTFSPAKFASFITQYSTGQVSVEIEWELQKENSKRWNPEIQYTSNYNKSVNVDFTVDTNGVYSEPRPIGTRYLTRNL

SEQ ID NO: 40 - protein, 624 aa, Adeno-associated virus 3B
MPGFYEIVLKVPSDLDEHLPGISNSFVNWVAEKEWELPPDSDMDPNLIEQAPLTVAEKLQREFLVEWRRVSKAPEALFFVQFEKGETYFHLHVLIETIGVKSMVVGRYVSQIKEKLVTRIYRGVEPQLPNWFAVTKTRNGAGGGNKVVDDCYIPNYLLPKTQPELQWAWTNMDQYLSACLNLAERKRLVAQHLTHVSQTQEQNKENQNPNSDAPVIRSKTSARYMELVGWLVDRGITSEKQWIQEDQASYISFNAASNSRSQIKAALDNASKIMSLTKTAPDYLVGSNPPEDITKNRIYQILELNGYDPQYAASVFLGWAQKKFGKRNTIWLFGPATTGKTNIAEAIAHAVPFYGCVNWTNENFPFNDCVDKMVIWWEEGKMTAKVVESAKAILGGSKVRVDQKCKSSAQIEPTPVIVTSNTNMCAVIDGNSTTFEHQQPLQDRMFKFELTRRLDHDFGKVTKQEVKDFFRWASDHVTDVAHEFYVRKGGAKKRPASNDADVSEPKRQCTSLAQPTTSDAEAPADYADRYQNKCSRHVGMNLMLFPCKTCERMNQISNVCFTHGQRDCGECFPGMSESQPVSVVKKKTYQKLCPIHHILGRAPEIACSACDLANVDLDDCVSEQ

SEQ ID NO: 41 - DNA, 4722 bp, Adeno-associated virus 3B
  source 1..4722: mol_type = genomic DNA
tggccactccctctatgcgcactcgctcgctcggtggggcctggcgaccaaaggtcgccagacggacgtgctttgcacgtccggccccaccgagcgagcgagtgcgcatagagggagtggccaactccatcactagaggtatggcagtgacgtaacgcgaagcgcgcgaagcgagaccacgcctaccagctgcgtcagcagtcaggtgacccttttgcgacagtttgcgacaccacgtggccgctgagggtatatattctcgagtgagcgaaccaggagctccattttgaccgcgaaatttgaacgagcagcagccatgccggggttctacgagattgtcctgaaggtcccgagtgacctggacgagcacctgccgggcatttctaactcgtttgttaactgggtggccgagaaggaatgggagctgccgccggattctgacatggatccgaatctgattgagcaggcacccctgaccgtggccgaaaagcttcagcgcgagttcctggtggagtggcgccgcgtgagtaaggccccggaggccctcttttttgtccagttcgaaaagggggagacctacttccacctgcacgtgctgattgagaccatcggggtcaaatccatggtggtcggccgctacgtgagccagattaaagagaagctggtgacccgcatctaccgcggggtcgagccgcagcttccgaactggttcgcggtgaccaaaacgcgaaatggcgccgggggcgggaacaaggtggtggacgactgctacatccccaactacctgctccccaagacccagcccgagctccagtgggcgtggactaacatggaccagtatttaagcgcctgtttgaatctcgcggagcgtaaacggctggtggcgcagcatctgacgcacgtgtcgcagacgcaggagcagaacaaagagaatcagaaccccaattctgacgcgccggtcatcaggtcaaaaacctcagccaggtacatggagctggtcgggtggctggtggaccgcgggatcacgtcagaaaagcaatggattcaggaggaccaggcctcgtacatctccttcaacgccgcctccaactcgcggtcccagatcaaggccgcgctggacaatgcctccaagatcatgagcctgacaaagacggctccggactacctggtgggcagcaacccgccggaggacattaccaaaaatcggatctaccaaatcctggagctgaacgggtacgatccgcagtacgcggcctccgtcttcctgggctgggcgcaaaagaagttcgggaagaggaacaccatctggctctttgggccggccacgacgggtaaaaccaacatcgcggaagccatcgcccacgccgtgcccttctacggctgcgtaaactggaccaatgagaactttcccttcaacgattgcgtcgacaagatggtgatctggtgggaggagggcaagatgacggccaaggtcgtggagagcgccaaggccattctgggcggaagcaaggtgcgcgtggaccaaaagtgcaagtcatcggcccagatcgaacccactcccgtgatcgtcacctccaacaccaacatgtgcgccgtgattgacgggaacagcaccaccttcgagcatcagcagccgctgcaggaccggatgtttaaatttgaacttacccgccgtttggaccatgactttgggaaggtcaccaaacaggaagtaaaggactttttccggtgggcttccgatcacgtgactgacgtggctcatgagttctacgtcagaaagggtggagctaagaaacgccccgcctccaatgacgcggatgtaagcgagccaaaacggcagtgcacgtcacttgcgcagccgacaacgtcagacgcggaagcaccggcggactacgcggacaggtaccaaaacaaatgttctcgtcacgtgggcatgaatctgatgctttttccctgtaaaacatgcgagagaatgaatcaaatttccaatgtctgttttacgcatggtcaaagagactgtggggaatgcttccctggaatgtcagaatctcaacccgtttctgtcgtcaaaaagaagacttatcagaaactgtgtccaattcatcatatcctgggaagggcacccgagattgcctgttcggcctgcgatttggccaatgtggacttggatgactgtgtttctgagcaataaatgacttaaaccaggtatggctgctgacggttatcttccagattggctcgaggacaacctttctgaaggcattcgtgagtggtgggctctgaaacctggagtccctcaacccaaagcgaaccaacaacaccaggacaaccgtcggggtcttgtgcttccgggttacaaatacctcggacccggtaacggactcgacaaaggagagccggtcaacgaggcggacgcggcagccctcgaacacgacaaagcttacgaccagcagctcaaggccggtgacaacccgtacctcaagtacaaccacgccgacgccgagtttcaggagcgtcttcaagaagatacgtcttttgggggcaaccttggcagagcagtcttccaggccaaaaagaggatccttgagcctcttggtctggttgaggaagcagctaaaacggctcctggaaagaagaggcctgtagatcagtctcctcaggaaccggactcatcatctggtgttggcaaatcgggcaaacagcctgccagaaaaagactaaatttcggtcagactggcgactcagagtcagtcccagaccctcaacctctcggagaaccaccagcagcccccacaagtttgggatctaatacaatggcttcaggcggtggcgcaccaatggcagacaataacgagggtgccgatggagtgggtaattcctcaggaaattggcattgcgattcccaatggctgggcgacagagtcatcaccaccagcaccagaacctgggccctgcccacttacaacaaccatctctacaagcaaatctccagccaatcaggagcttcaaacgacaaccactactttggctacagcaccccttgggggtattttgactttaacagattccactgccacttctcaccacgtgactggcagcgactcattaacaacaactggggattccggcccaagaaactcagcttcaagctcttcaacatccaagttaaagaggtcacgcagaacgatggcacgacgactattgccaataaccttaccagcacggttcaagtgtttacggactcggagtatcagctcccgtacgtgctcgggtcggcgcaccaaggctgtctcccgccgtttccagcggacgtcttcatggtccctcagtatggatacctcaccctgaacaacggaagtcaagcggtgggacgctcatccttttactgcctggagtacttcccttcgcagatgctaaggactggaaataacttccaattcagctataccttcgaggatgtaccttttcacagcagctacgctcacagccagagtttggatcgcttgatgaatcctcttattgatcagtatctgtactacctgaacagaacgcaaggaacaacctctggaacaaccaaccaatcacggctgctttttagccaggctgggcctcagtctatgtctttgcaggccagaaattggctacctgggccctgctaccggcaacagagactttcaaagactgctaacgacaacaacaacagtaactttccttggacagcggccagcaaatatcatctcaatggccgcgactcgctggtgaatccaggaccagctatggccagtcacaaggacgatgaagaaaaatttttccctatgcacggcaatctaatatttggcaaagaagggacaacggcaagtaacgcagaattagataatgtaatgattacggatgaagaagagattcgtaccaccaatcctgtggcaacagagcagtatggaactgtggcaaataacttgcagagctcaaatacagctcccacgactagaactgtcaatgatcagggggccttacctggcatggtgtggcaagatcgtgacgtgtaccttcaaggacctatctgggcaaagattcctcacacggatggacactttcatccttctcctctgatgggaggctttggactgaaacatccgcctcctcaaatcatgatcaaaaatactccggtaccggcaaatcctccgacgactttcagcccggccaagtttgcttcatttatcactcagtactccactggacaggtcagcgtggaaattgagtgggagctacagaaagaaaacagcaaacgttggaatccagagattcagtacacttccaactacaacaagtctgttaatgtggactttactgtagacactaatggtgtttatagtgaacctcgccctattggaacccggtatctcacacgaaacttgtaatcctggttaatcaataaaccgtttaattcgtttcagttgaactttggctcttgtgcacttcttatcttatcttgtttccatggctactgcgtagataagcagcggcctgcggcgcttgcgcttcgcggtttacaactgctggttaatatttaactctcgccatacctctagtgatggagttggccactccctctatgcgcactcgctcgctcggtggggccggacgtgcaaagcacgtccgtctggcgacctttggtcgccaggccccaccgagcgagcgagtgcgcatagagggagtggccaa

SEQ ID NO: 42 - DNA, 1800 bp, Adeno-associated virus 4
  variation 342: note = n is a, c, t, or g
  source 1..1800: mol_type = genomic DNA
acggctcctggaaagaagagaccgttgattgaatccccccagcagcccgactcctccacgggtatcggcaaaaaaggcaagcagccggctaaaaagaagctcgttttcgaagacgaaactggagcaggcgacggaccccctgagggatcaacttccggagccatgtctgatgacagtgagatgcgtgcagcagctggcggagctgcagtcgagggsggacaaggtgccgatggagtgggtaatgcctcgggtgattggcattgcgattccacctggtctgagggccacgtcacgaccaccagcaccagaacctgggtcttgcccacctacaacaaccacctntacaagcgactcggagagagcctgcagtccaacacctacaacggattctccaccccctggggatactttgacttcaaccgcttccactgccacttctcaccacgtgactggcagcgactcatcaacaacaactggggcatgcgacccaaagccatgcgggtcaaaatcttcaacatccaggtcaaggaggtcacgacgtcgaacggcgagacaacggtggctaataaccttaccagcacggttcagatctttgcggactcgtcgtacgaactgccgtacgtgatggatgcgggtcaagagggcagcctgcctccttttcccaacgacgtctttatggtgccccagtacggctactgtggactggtgaccggcaacacttcgcagcaacagactgacagaaatgccttctactgcctggagtactttccttcgcagatgctgcggactggcaacaactttgaaattacgtacagttttgagaaggtgcctttccactcgatgtacgcgcacagccagagcctggaccggctgatgaaccctctcatcgaccagtacctgtggggactgcaatcgaccaccaccggaaccaccctgaatgccgggactgccaccaccaactttaccaagctgcggcctaccaacttttccaactttaaaaagaactggctgcccgggccttcaatcaagcagcagggcttctcaaagactgccaatcaaaactacaagatccctgccaccgggtcagacagtctcatcaaatacgagacgcacagcactctggacggaagatggagtgccctgacccccggacctccaatggccacggctggacctgcggacagcaagttcagcaacagccagctcatctttgcggggcctaaacagaacggcaacacggccaccgtacccgggactctgatcttcacctctgaggaggagctggcagccaccaacgccaccgatacggacatgtggggcaacctacctggcggtgaccagagcaacagcaacctgccgaccgtggacagactgacagccttgggagccgtgcctggaatggtctggcaaaacagagacatttactaccagggtcccatttgggccaagattcctcataccgatggacactttcacccctcaccgctgattggtgggtttgggctgaaacacccgcctcctcaaatttttatcaagaacaccccggtacctgcgaatcctgcaacgaccttcagctctactccggtaaactccttcattactcagtacagcactggccaggtgtcggtgcagattgactgggagatccagaaggagcggtccaaacgctggaaccccgaggtccagtttacctccaactacggacagcaaaactctctgttgtgggctcccgatgcggctgggaaatacactgagcctagggctatcggtacccgctacctcacccaccacctgtaataa

SEQ ID NO: 43 - DNA, 2208 bp, Adeno-associated virus 4
  variation 750: note = n is a, c, t, or g
  source 1..2208: mol_type = genomic DNA
atgactgacggttaccttccagattggctagaggacaacctctctgaaggcgttcgagagtggtgggcgctgcaacctggagcccctaaacccaaggcaaatcaacaacatcaggacaacgctcggggtcttgtgcttccgggttacaaatacctcggacccggcaacggactcgacaagggggaacccgtcaacgcagcggacgcggcagccctcgagcacgacaaggcctacgaccagcagctcaaggccggtgacaacccctacctcaagtacaaccacgccgacgcggagttccagcagcggcttcagggcgacacatcgtttgggggcaacctcggcagagcagtcttccaggccaaaaagagggttcttgaacctcttggtctggttgagcaagcgggtgagacggctcctggaaagaagagaccgttgattgaatccccccagcagcccgactcctccacgggtatcggcaaaaaaggcaagcagccggctaaaaagaagctcgttttcgaagacgaaactggagcaggcgacggaccccctgagggatcaacttccggagccatgtctgatgacagtgagatgcgtgcagcagctggcggagctgcagtcgagggsggacaaggtgccgatggagtgggtaatgcctcgggtgattggcattgcgattccacctggtctgagggccacgtcacgaccaccagcaccagaacctgggtcttgcccacctacaacaaccacctntacaagcgactcggagagagcctgcagtccaacacctacaacggattctccaccccctggggatactttgacttcaaccgcttccactgccacttctcaccacgtgactggcagcgactcatcaacaacaactggggcatgcgacccaaagccatgcgggtcaaaatcttcaacatccaggtcaaggaggtcacgacgtcgaacggcgagacaacggtggctaataaccttaccagcacggttcagatctttgcggactcgtcgtacgaactgccgtacgtgatggatgcgggtcaagagggcagcctgcctccttttcccaacgacgtctttatggtgccccagtacggctactgtggactggtgaccggcaacacttcgcagcaacagactgacagaaatgccttctactgcctggagtactttccttcgcagatgctgcggactggcaacaactttgaaattacgtacagttttgagaaggtgcctttccactcgatgtacgcgcacagccagagcctggaccggctgatgaaccctctcatcgaccagtacctgtggggactgcaatcgaccaccaccggaaccaccctgaatgccgggactgccaccaccaactttaccaagctgcggcctaccaacttttccaactttaaaaagaactggctgcccgggccttcaatcaagcagcagggcttctcaaagactgccaatcaaaactacaagatccctgccaccgggtcagacagtctcatcaaatacgagacgcacagcactctggacggaagatggagtgccctgacccccggacctccaatggccacggctggacctgcggacagcaagttcagcaacagccagctcatctttgcggggcctaaacagaacggcaacacggccaccgtacccgggactctgatcttcacctctgaggaggagctggcagccaccaacgccaccgatacggacatgtggggcaacctacctggcggtgaccagagcaacagcaacctgccgaccgtggacagactgacagccttgggagccgtgcctggaatggtctggcaaaacagagacatttactaccagggtcccatttgggccaagattcctcataccgatggacactttcacccctcaccgctgattggtgggtttgggctgaaacacccgcctcctcaaatttttatcaagaacaccccggtacctgcgaatcctgcaacgaccttcagctctactccggtaaactccttcattactcagtacagcactggccaggtgtcggtgcagattgactgggagatccagaaggagcggtccaaacgctggaaccccgaggtccagtttacctccaactacggacagcaaaactctctgttgtgggctcccgatgcggctgggaaatacactgagcctagggctatcggtacccgctacctcacccaccacctgtaataa

SEQ ID NO: 44 - DNA, 1872 bp, Adeno-associated virus 4
  source 1..1872: mol_type = genomic DNA
atgccggggttctacgagatcgtgctgaaggtgcccagcgacctggacgagcacctgcccggcatttctgactcttttgtgagctgggtggccgagaaggaatgggagctgccgccggattctgacatggacttgaatctgattgagcaggcacccctgaccgtggccgaaaagctgcaacgcgagttcctggtcgagtggcgccgcgtgagtaaggccccggaggccctcttctttgtccagttcgagaagggggacagctacttccacctgcacatcctggtggagaccgtgggcgtcaaatccatggtggtgggccgctacgtgagccagattaaagagaagctggtgacccgcatctaccgcggggtcgagccgcagcttccgaactggttcgcggtgaccaagacgcgtaatggcgccggaggcgggaacaaggtggtggacgactgctacatccccaactacctgctccccaagacccagcccgagctccagtgggcgtggactaacatggaccagtatataagcgcctgtttgaatctcgcggagcgtaaacggctggtggcgcagcatctgacgcacgtgtcgcagacgcaggagcagaacaaggaaaaccagaaccccaattctgacgcgccggtcatcaggtcaaaaacctccgccaggtacatggagctggtcgggtggctggtggaccgcgggatcacgtcagaaaagcaatggatccaggaggaccaggcgtcctacatctccttcaacgccgcctccaactcgcggtcacaaatcaaggccgcgctggacaatgcctccaaaatcatgagcctgacaaagacggctccggactacctggtgggccagaacccgccggaggacatttccagcaaccgcatctaccgaatcctcgagatgaacgggtacgatccgcagtacgcggcctccgtcttcctgggctgggcgcaaaagaagttcgggaagaggaacaccatctggctctttgggccggccacgacgggtaaaaccaacatcgcggaagccatcgcccacgccgtgcccttctacggctgcgtgaactggaccaatgagaactttccgttcaacgattgcgtcgacaagatggtgatctggtgggaggagggcaagatgacggccaaggtcgtagagagcgccaaggccatcctgggcggaagcaaggtgcgcgtggaccaaaagtgcaagtcatcggcccagatcgacccaactcccgtgatcgtcacctccaacaccaacatgtgcgcggtcatcgacggaaactcgaccaccttcgagcaccaacaaccactccaggaccggatgttcaagttcgagctcaccaagcgcctggagcacgactttggcaaggtcaccaagcaggaagtcaaagactttttccggtgggcgtcagatcacgtgaccgaggtgactcacgagttttacgtcagaaagggtggagctagaaagaggcccgcccccaatgacgcagatataagtgagcccaagcgggcctgtccgtcagttgcgcagccatcgacgtcagacgcggaagctccggtggactacgcggacaggtaccaaaacaaatgttctcgtcacgtgggtatgaatctgatgctttttccctgccggcaatgcgagagaatgaatcagaatgtggacatttgcttcacgcacggggtcatggactgtgccgagtgcttccccgtgtcagaatctcaacccgtgtctgtcgtcagaaagcggacgtatcagaaactgtgtccgattcatcacatcatggggagggcgcccgaggtggcctgctcggcctgcgaactggccaatgtggacttggatgactgtgacatggaacaataa

SEQ ID NO: 45 - DNA, 1611 bp, Adeno-associated virus 4
  source 1..1611: mol_type = genomic DNA
atgccggggttctacgagatcgtgctgaaggtgcccagcgacctggacgagcacctgcccggcatttctgactcttttgtgagctgggtggccgagaaggaatgggagctgccgccggattctgacatggacttgaatctgattgagcaggcacccctgaccgtggccgaaaagctgcaacgcgagttcctggtcgagtggcgccgcgtgagtaaggccccggaggccctcttctttgtccagttcgagaagggggacagctacttccacctgcacatcctggtggagaccgtgggcgtcaaatccatggtggtgggccgctacgtgagccagattaaagagaagctggtgacccgcatctaccgcggggtcgagccgcagcttccgaactggttcgcggtgaccaagacgcgtaatggcgccggaggcgggaacaaggtggtggacgactgctacatccccaactacctgctccccaagacccagcccgagctccagtgggcgtggactaacatggaccagtatataagcgcctgtttgaatctcgcggagcgtaaacggctggtggcgcagcatctgacgcacgtgtcgcagacgcaggagcagaacaaggaaaaccagaaccccaattctgacgcgccggtcatcaggtcaaaaacctccgccaggtacatggagctggtcgggtggctggtggaccgcgggatcacgtcagaaaagcaatggatccaggaggaccaggcgtcctacatctccttcaacgccgcctccaactcgcggtcacaaatcaaggccgcgctggacaatgcctccaaaatcatgagcctgacaaagacggctccggactacctggtgggccagaacccgccggaggacatttccagcaaccgcatctaccgaatcctcgagatgaacgggtacgatccgcagtacgcggcctccgtcttcctgggctgggcgcaaaagaagttcgggaagaggaacaccatctggctctttgggccggccacgacgggtaaaaccaacatcgcggaagccatcgcccacgccgtgcccttctacggctgcgtgaactggaccaatgagaactttccgttcaacgattgcgtcgacaagatggtgatctggtgggaggagggcaagatgacggccaaggtcgtagagagcgccaaggccatcctgggcggaagcaaggtgcgcgtggaccaaaagtgcaagtcatcggcccagatcgacccaactcccgtgatcgtcacctccaacaccaacatgtgcgcggtcatcgacggaaactcgaccaccttcgagcaccaacaaccactccaggaccggatgttcaagttcgagctcaccaagcgcctggagcacgactttggcaaggtcaccaagcaggaagtcaaagactttttccggtgggcgtcagatcacgtgaccgaggtgactcacgagttttacgtcagaaagggtggagctagaaagaggcccgcccccaatgacgcagatataagtgagcccaagcgggcctgtccgtcagttgcgcagccatcgacgtcagacgcggaagctccggtggactacgcggacagattggctagaggacaacctctctga

SEQ ID NO: 46 - DNA, 1872 bp, Adeno-associated virus 4; identical to SEQ ID NO: 44
  source 1..1872: mol_type = genomic DNA

SEQ ID NO: 47 - DNA, 1617 bp, Adeno-associated virus 4
  variation 162: note = n is a, c, t, or g
  source 1..1617: mol_type = genomic DNA
atgcgtgcagcagctggcggagctgcagtcgagggsggacaaggtgccgatggagtgggtaatgcctcgggtgattggcattgcgattccacctggtctgagggccacgtcacgaccaccagcaccagaacctgggtcttgcccacctacaacaaccacctntacaagcgactcggagagagcctgcagtccaacacctacaacggattctccaccccctggggatactttgacttcaaccgcttccactgccacttctcaccacgtgactggcagcgactcatcaacaacaactggggcatgcgacccaaagccatgcgggtcaaaatcttcaacatccaggtcaaggaggtcacgacgtcgaacggcgagacaacggtggctaataaccttaccagcacggttcagatctttgcggactcgtcgtacgaactgccgtacgtgatggatgcgggtcaagagggcagcctgcctccttttcccaacgacgtctttatggtgccccagtacggctactgtggactggtgaccggcaacacttcgcagcaacagactgacagaaatgccttctactgcctggagtactttccttcgcagatgctgcggactggcaacaactttgaaattacgtacagttttgagaaggtgcctttccactcgatgtacgcgcacagccagagcctggaccggctgatgaaccctctcatcgaccagtacctgtggggactgcaatcgaccaccaccggaaccaccctgaatgccgggactgccaccaccaactttaccaagctgcggcctaccaacttttccaactttaaaaagaactggctgcccgggccttcaatcaagcagcagggcttctcaaagactgccaatcaaaactacaagatccctgccaccgggtcagacagtctcatcaaatacgagacgcacagcactctggacggaagatggagtgccctgacccccggacctccaatggccacggctggacctgcggacagcaagttcagcaacagccagctcatctttgcggggcctaaacagaacggcaacacggccaccgtacccgggactctgatcttcacctctgaggaggagctggcagccaccaacgccaccgatacggacatgtggggcaacctacctggcggtgaccagagcaacagcaacctgccgaccgtggacagactgacagccttgggagccgtgcctggaatggtctggcaaaacagagacatttactaccagggtcccatttgggccaagattcctcataccgatggacactttcacccctcaccgctgattggtgggtttgggctgaaacacccgcctcctcaaatttttatcaagaacaccccggtacctgcgaatcctgcaacgaccttcagctctactccggtaaactccttcattactcagtacagcactggccaggtgtcggtgcagattgactgggagatccagaaggagcggtccaaacgctggaaccccgaggtccagtttacctccaactacggacagcaaaactctctgttgtgggctcccgatgcggctgggaaatacactgagcctagggctatcggtacccgctacctcacccaccacctgtaa

SEQ ID NO: 48 - DNA, 939 bp, Adeno-associated virus 4
  source 1..939: mol_type = genomic DNA
atggagctggtcgggtggctggtggaccgcgggatcacgtcagaaaagcaatggatccaggaggaccaggcgtcctacatctccttcaacgccgcctccaactcgcggtcacaaatcaaggccgcgctggacaatgcctccaaaatcatgagcctgacaaagacggctccggactacctggtgggccagaacccgccggaggacatttccagcaaccgcatctaccgaatcctcgagatgaacgggtacgatccgcagtacgcggcctccgtcttcctgggctgggcgcaaaagaagttcgggaagaggaacaccatctggctctttgggccggccacgacgggtaaaaccaacatcgcggaagccatcgcccacgccgtgcccttctacggctgcgtgaactggaccaatgagaactttccgttcaacgattgcgtcgacaagatggtgatctggtgggaggagggcaagatgacggccaaggtcgtagagagcgccaaggccatcctgggcggaagcaaggtgcgcgtggaccaaaagtgcaagtcatcggcccagatcgacccaactcccgtgatcgtcacctccaacaccaacatgtgcgcggtcatcgacggaaactcgaccaccttcgagcaccaacaaccactccaggaccggatgttcaagttcgagctcaccaagcgcctggagcacgactttggcaaggtcaccaagcaggaagtcaaagactttttccggtgggcgtcagatcacgtgaccgaggtgactcacgagttttacgtcagaaagggtggagctagaaagaggcccgcccccaatgacgcagatataagtgagcccaagcgggcctgtccgtcagttgcgcagccatcgacgtcagacgcggaagctccggtggactacgcggacagattggctagaggacaacctctctga

SEQ ID NO: 49 - DNA, 1197 bp, Adeno-associated virus 4
  source 1..1197: mol_type = genomic DNA
atggagctggtcgggtggctggtggaccgcgggatcacgtcagaaaagcaatggatccaggaggaccaggcgtcctacatctccttcaacgccgcctccaactcgcggtcacaaatcaaggccgcgctggacaatgcctccaaaatcatgagcctgacaaagacggctccggactacctggtgggccagaacccgccggaggacatttccagcaaccgcatctaccgaatcctcgagatgaacgggtacgatccgcagtacgcggcctccgtcttcctgggctgggcgcaaaagaagttcgggaagaggaacaccatctggctctttgggccggccacgacgggtaaaaccaacatcgcggaagccatcgcccacgccgtgcccttctacggctgcgtgaactggaccaatgagaactttccgttcaacgattgcgtcgacaagatggtgatctggtgggaggagggcaagatgacggccaaggtcgtagagagcgccaaggccatcctgggcggaagcaaggtgcgcgtggaccaaaagtgcaagtcatcggcccagatcgacccaactcccgtgatcgtcacctccaacaccaacatgtgcgcggtcatcgacggaaactcgaccaccttcgagcaccaacaaccactccaggaccggatgttcaagttcgagctcaccaagcgcctggagcacgactttggcaaggtcaccaagcaggaagtcaaagactttttccggtgggcgtcagatcacgtgaccgaggtgactcacgagttttacgtcagaaagggtggagctagaaagaggcccgcccccaatgacgcagatataagtgagcccaagcgggcctgtccgtcagttgcgcagccatcgacgtcagacgcggaagctccggtggactacgcggacaggtaccaaaacaaatgttctcgtcacgtgggtatgaatctgatgctttttccctgccggcaatgcgagagaatgaatcagaatgtggacatttgcttcacgcacggggtcatggactgtgccgagtgcttccccgtgtcagaatctcaacccgtgtctgtcgtcagaaagcggacgtatcagaaactgtgtccgattcatcacatcatggggagggcgcccgaggtggcctgctcggcctgcgaactggccaatgtggacttggatgactgtgacatggaacaa

SEQ ID NO: 50 - DNA, 245 bp, Adeno-associated virus 4
  source 1..245: mol_type = genomic DNA
ctccatcatctaggtttgcccactgacgtcaatgtgacgtcctagggttagggaggtccctgtattagcagtcacgtgagtgtcgtatttcgcggagcgtagcggagcgcataccaagctgccacgtcacagccacgtggtccgtttgcgacagtttgcgacaccatgtggtcaggagggtatataaccgcgagtgagccagcgaggagctccattttgcccgcgaattttgaacgagcagcagc

SEQ ID NO: 51 - protein, 313 aa, Adeno-associated virus 4
  VARIANT 313: note = Xaa = any amino acid
MELVGWLVDRGITSEKQWIQEDQASYISFNAASNSRSQIKAALDNASKIMSLTKTAPDYLVGQNPPEDISSNRIYRILEMNGYDPQYAASVFLGWAQKKFGKRNTIWLFGPATTGKTNIAEAIAHAVPFYGCVNWTNENFPFNDCVDKMVIWWEEGKMTAKVVESAKAILGGSKVRVDQKCKSSAQIDPTPVIVTSNTNMCAVIDGNSTTFEHQQPLQDRMFKFELTKRLEHDFGKVTKQEVKDFFRWASDHVTEVTHEFYVRKGGARKRPAPNDADISEPKRACPSVAQPSTSDAEAPVDYADRLARGQPLX

SEQ ID NO: 52 - protein, 399 aa, Adeno-associated virus 4
MELVGWLVDRGITSEKQWIQEDQASYISFNAASNSRSQIKAALDNASKIMSLTKTAPDYLVGQNPPEDISSNRIYRILEMNGYDPQYAASVFLGWAQKKFGKRNTIWLFGPATTGKTNIAEAIAHAVPFYGCVNWTNENFPFNDCVDKMVIWWEEGKMTAKVVESAKAILGGSKVRVDQKCKSSAQIDPTPVIVTSNTNMCAVIDGNSTTFEHQQPLQDRMFKFELTKRLEHDFGKVTKQEVKDFFRWASDHVTEVTHEFYVRKGGARKRPAPNDADISEPKRACPSVAQPSTSDAEAPVDYADRYQNKCSRHVGMNLMLFPCRQCERMNQNVDICFTHGVMDCAECFPVSESQPVSVVRKRTYQKLCPIHHIMGRAPEVACSACELANVDLDDCDMEQ

SEQ ID NO: 53 - protein, 623 aa, Adeno-associated virus 4
MPGFYEIVLKVPSDLDEHLPGISDSFVSWVAEKEWELPPDSDMDLNLIEQAPLTVAEKLQREFLVEWRRVSKAPEALFFVQFEKGDSYFHLHILVETVGVKSMVVGRYVSQIKEKLVTRIYRGVEPQLPNWFAVTKTRNGAGGGNKVVDDCYIPNYLLPKTQPELQWAWTNMDQYISACLNLAERKRLVAQHLTHVSQTQEQNKENQNPNSDAPVIRSKTSARYMELVGWLVDRGITSEKQWIQEDQASYISFNAASNSRSQIKAALDNASKIMSLTKTAPDYLVGQNPPEDISSNRIYRILEMNGYDPQYAASVFLGWAQKKFGKRNTIWLFGPATTGKTNIAEAIAHAVPFYGCVNWTNENFPFNDCVDKMVIWWEEGKMTAKVVESAKAILGGSKVRVDQKCKSSAQIDPTPVIVTSNTNMCAVIDGNSTTFEHQQPLQDRMFKFELTKRLEHDFGKVTKQEVKDFFRWASDHVTEVTHEFYVRKGGARKRPAPNDADISEPKRACPSVAQPSTSDAEAPVDYADRYQNKCSRHVGMNLMLFPCRQCERMNQNVDICFTHGVMDCAECFPVSESQPVSVVRKRTYQKLCPIHHIMGRAPEVACSACELANVDLDDCDMEQ

SEQ ID NO: 54 - protein, 537 aa, Adeno-associated virus 4
  VARIANT 537: note = Xaa = any amino acid
MPGFYEIVLKVPSDLDEHLPGISDSFVSWVAEKEWELPPDSDMDLNLIEQAPLTVAEKLQREFLVEWRRVSKAPEALFFVQFEKGDSYFHLHILVETVGVKSMVVGRYVSQIKEKLVTRIYRGVEPQLPNWFAVTKTRNGAGGGNKVVDDCYIPNYLLPKTQPELQWAWTNMDQYISACLNLAERKRLVAQHLTHVSQTQEQNKENQNPNSDAPVIRSKTSARYMELVGWLVDRGITSEKQWIQEDQASYISFNAASNSRSQIKAALDNASKIMSLTKTAPDYLVGQNPPEDISSNRIYRILEMNGYDPQYAASVFLGWAQKKFGKRNTIWLFGPATTGKTNIAEAIAHAVPFYGCVNWTNENFPFNDCVDKMVIWWEEGKMTAKVVESAKAILGGSKVRVDQKCKSSAQIDPTPVIVTSNTNMCAVIDGNSTTFEHQQPLQDRMFKFELTKRLEHDFGKVTKQEVKDFFRWASDHVTEVTHEFYVRKGGARKRPAPNDADISEPKRACPSVAQPSTSDAEAPVDYADRLARGQPLX

SEQ ID NO: 55 - protein, 623 aa, Adeno-associated virus 4; identical to SEQ ID NO: 53

SEQ ID NO: 56 - protein, 544 aa, Adeno-associated virus 4
MSDDSEMRAAAGGAAVEGGQGADGVGNASGDWHCDSTWSEGHVTTTSTRTWVLPTYNNHLYKRLGESLQSNTYNGFSTPWGYFDFNRFHCHFSPRDWQRLINNNWGMRPKAMRVKIFNIQVKEVTTSNGETTVANNLTSTVQIFADSSYELPYVMDAGQEGSLPPFPNDVFMVPQYGYCGLVTGNTSQQQTDRNAFYCLEYFPSQMLRTGNNFEITYSFEKVPFHSMYAHSQSLDRLMNPLIDQYLWGLQSTTTGTTLNAGTATTNFTKLRPTNFSNFKKNWLPGPSIKQQGFSKTANQNYKIPATGSDSLIKYETHSTLDGRWSALTPGPPMATAGPADSKFSNSQLIFAGPKQNGNTATVPGTLIFTSEEELAATNATDTDMWGNLPGGDQSNSNLPTVDRLTALGAVPGMVWQNRDIYYQGPIWAKIPHTDGHFHPSPLIGGFGLKHPPPQIFIKNTPVPANPATTFSSTPVNSFITQYSTGQVSVQIDWEIQKERSKRWNPEVQFTSNYGQQNSLLWAPDAAGKYTEPRAIGTRYLTHHL

SEQ ID NO: 57 - protein, 734 aa, Adeno-associated virus 4
MTDGYLPDWLEDNLSEGVREWWALQPGAPKPKANQQHQDNARGLVLPGYKYLGPGNGLDKGEPVNAADAAALEHDKAYDQQLKAGDNPYLKYNHADAEFQQRLQGDTSFGGNLGRAVFQAKKRVLEPLGLVEQAGETAPGKKRPLIESPQQPDSSTGIGKKGKQPAKKKLVFEDETGAGDGPPEGSTSGAMSDDSEMRAAAGGAAVEGGQGADGVGNASGDWHCDSTWSEGHVTTTSTRTWVLPTYNNHLYKRLGESLQSNTYNGFSTPWGYFDFNRFHCHFSPRDWQRLINNNWGMRPKAMRVKIFNIQVKEVTTSNGETTVANNLTSTVQIFADSSYELPYVMDAGQEGSLPPFPNDVFMVPQYGYCGLVTGNTSQQQTDRNAFYCLEYFPSQMLRTGNNFEITYSFEKVPFHSMYAHSQSLDRLMNPLIDQYLWGLQSTTTGTTLNAGTATTNFTKLRPTNFSNFKKNWLPGPSIKQQGFSKTANQNYKIPATGSDSLIKYETHSTLDGRWSALTPGPPMATAGPADSKFSNSQLIFAGPKQNGNTATVPGTLIFTSEEELAATNATDTDMWGNLPGGDQSNSNLPTVDRLTALGAVPGMVWQNRDIYYQGPIWAKIPHTDGHFHPSPLIGGFGLKHPPPQIFIKNTPVPANPATTFSSTPVNSFITQYSTGQVSVQIDWEIQKERSKRWNPEVQFTSNYGQQNSLLWAPDAAGKYTEPRAIGTRYLTHHL

SEQ ID NO: 58 - protein, 598 aa, Adeno-associated virus 4
TAPGKKRPLIESPQQPDSSTGIGKKGKQPAKKKLVFEDETGAGDGPPEGSTSGAMSDDSEMRAAAGGAAVEGGQGADGVGNASGDWHCDSTWSEGHVTTTSTRTWVLPTYNNHLYKRLGESLQSNTYNGFSTPWGYFDFNRFHCHFSPRDWQRLINNNWGMRPKAMRVKIFNIQVKEVTTSNGETTVANNLTSTVQIFADSSYELPYVMDAGQEGSLPPFPNDVFMVPQYGYCGLVTGNTSQQQTDRNAFYCLEYFPSQMLRTGNNFEITYSFEKVPFHSMYAHSQSLDRLMNPLIDQYLWGLQSTTTGTTLNAGTATTNFTKLRPTNFSNFKKNWLPGPSIKQQGFSKTANQNYKIPATGSDSLIKYETHSTLDGRWSALTPGPPMATAGPADSKFSNSQLIFAGPKQNGNTATVPGTLIFTSEEELAATNATDTDMWGNLPGGDQSNSNLPTVDRLTALGAVPGMVWQNRDIYYQGPIWAKIPHTDGHFHPSPLIGGFGLKHPPPQIFIKNTPVPANPATTFSSTPVNSFITQYSTGQVSVQIDWEIQKERSKRWNPEVQFTSNYGQQNSLLWAPDAAGKYTEPRAIGTRYLTHHL

SEQ ID NO: 59 - DNA, 129 bp, Adeno-associated virus 4
  source 1..129: mol_type = genomic DNA
ttggccactccctctatgcgcgctcgctcactcactcggccctgcggccagaggccggcagtctggagacctttggtgtccagggcagggccgagtgagtgagcgagcgcgcatagagggagtggccaa

SEQ ID NO: 60 - DNA, 125 bp, Adeno-associated virus 4
  source 1..125: mol_type = genomic DNA
ttggccactccctctatgcgcgctcgctcactcactcggccctggagaccaaaggtctccagactgccggcctctggccggcagggccgagtgagtgagcgagcgcgcatagagggagtggccaa

SEQ ID NO: 61 - DNA, 4768 bp, Adeno-associated virus 4
  variation 3009: note = n is a, c, t, or g
  source 1..4768: mol_type = genomic DNA
ttggccactccctctatgcgcgctcgctcactcactcggccctggagaccaaaggtctccagactgccggcctctggccggcagggccgagtgagtgagcgagcgcgcatagagggagtggccaactccatcatctaggtttgcccactgacgtcaatgtgacgtcctagggttagggaggtccctgtattagcagtcacgtgagtgtcgtatttcgcggagcgtagcggagcgcataccaagctgccacgtcacagccacgtggtccgtttgcgacagtttgcgacaccatgtggtcaggagggtatataaccgcgagtgagccagcgaggagctccattttgcccgcgaattttgaacgagcagcagccatgccggggttctacgagatcgtgctgaaggtgcccagcgacctggacgagcacctgcccggcatttctgactcttttgtgagctgggtggccgagaaggaatgggagctgccgccggattctgacatggacttgaatctgattgagcaggcacccctgaccgtggccgaaaagctgcaacgcgagttcctggtcgagtggcgccgcgtgagtaaggccccggaggccctcttctttgtccagttcgagaagggggacagctacttccacctgcacatcctggtggagaccgtgggcgtcaaatccatggtggtgggccgctacgtgagccagattaaagagaagctggtgacccgcatctaccgcggggtcgagccgcagcttccgaactggttcgcggtgaccaagacgcgtaatggcgccggaggcgggaacaaggtggtggacgactgctacatccccaactacctgctccccaagacccagcccgagctccagtgggcgtggactaacatggaccagtatataagcgcctgtttgaatctcgcggagcgtaaacggctggtggcgcagcatctgacgcacgtgtcgcagacgcaggagcagaacaaggaaaaccagaaccccaattctgacgcgccggtcatcaggtcaaaaacctccgccaggtacatggagctggtcgggtggctggtggaccgcgggatcacgtcagaaaagcaatggatccaggaggaccaggcgtcctacatctccttcaacgccgcctccaactcgcggtcacaaatcaaggccgcgctggacaatgcctccaaaatcatgagcctgacaaagacggctccggactacctggtgggccagaacccgccggaggacatttccagcaaccgcatctaccgaatcctcgagatgaacgggtacgatccgcagtacgcggcctccgtcttcctgggctgggcgcaaaagaagttcgggaagaggaacaccatctggctctttgggccggccacgacgggtaaaaccaacatcgcggaagccatcgcccacgccgtgcccttctacggctgcgtgaactggaccaatgagaactttccgttcaacgattgcgtcgacaagatggtgatctggtgggaggagggcaagatgacggccaaggtcgtagagagcgccaaggccatcctgggcggaagcaaggtgcgcgtggaccaaaagtgcaagtcatcggcccagatcgacccaactcccgtgatcgtcacctccaacaccaacatgtgcgcggtcatcgacggaaactcgaccaccttcgagcaccaacaaccactccaggaccggatgttcaagttcgagctcaccaagcgcctggagcacgactttggcaaggtcaccaagcaggaagtcaaagactttttccggtgggcgtcagatcacgtgaccgaggtgactcacgagttttacgtcagaaagggtggagctagaaagaggcccgcccccaatgacgcagatataagtgagcccaagcgggcctgtccgtcagttgcgcagccatcgacgtcagacgcggaagctccggtggactacgcggacaggtaccaaaacaaatgttctcgtcacgtgggtatgaatctgatgctttttccctgccggcaatgcgagagaatgaatcagaatgtggacatttgcttcacgcacggggtcatggactgtgccgagtgcttccccgtgtcagaatctcaacccgtgtctgtcgtcagaaagcggacgtatcagaaactgtgtccgattcatcacatcatggggagggcgcccgaggtggcctgctcggcctgcgaactggccaatgtggacttggatgactgtgacatggaacaataaatgactcaaaccagatatgactgacggttaccttccagattggctagaggacaacctctctgaaggcgttcgagagtggtgggcgctgcaacctggagcccctaaacccaaggcaaatcaacaacatcaggacaacgctcggggtcttgtgcttccgggttacaaatacctcggacccggcaacggactcgacaagggggaacccgtcaacgcagcggacgcggcagccctcgagcacgacaaggcctacgaccagcagctcaaggccggtgacaacccctacctcaagtacaaccacgccgacgcggagttccagcagcggcttcagggcgacacaccgtttgggggcaacctcggcagagcagtcttccaggccaaaaagagggttcttgaacctcttggtctggttgagcaagcgggtgagacggctcctggaaagaagagaccgttgattgaatccccccagcagcccgactcctccacgggtatcggcaaaaaaggcaagcagccggctaaaaagaagctcgttttcgaagacgaaactggagcaggcgacggaccccctgagggatcaacttccggagccatgtctgatgacagtgagatgcgtgcagcagctggcggagctgcagtcgagggsggacaaggtgccgatggagtgggtaatgcctcgggtgattggcattgcgattccacctggtctgagggccacgtcacgaccaccagcaccagaacctgggtcttgcccacctacaacaaccacctntacaagcgactcggagagagcctgcagtccaacacctacaacggattctccaccccctggggatactttgacttcaaccgcttccactgccacttctcaccacgtgactggcagcgactcatcaacaacaactggggcatgcgacccaaagccatgcgggtcaaaatcttcaacatccaggtcaaggaggtcacgacgtcgaacggcgagacaacggtggctaataaccttaccagcacggttcagatctttgcggactcgtcgtacgaactgccgtacgtgatggatgcgggtcaagagggcagcctgcctccttttcccaacgacgtctttatggtgccccagtacggctactgtggactggtgaccggcaacacttcgcagcaacagactgacagaaatgccttctactgcctggagtactttccttcgcagatgctgcggactggcaacaactttgaaattacgtacagttttgagaaggtgcctttccactcgatgtacgcgcacagccagagcctggaccggctgatgaaccctctcatcgaccagtacctgtggggactgcaatcgaccaccaccggaaccaccctgaatgccgggactgccaccaccaactttaccaagctgcggcctaccaacttttccaactttaaaaagaactggctgcccgggccttcaatcaagcagcagggcttctcaaagactgccaatcaaaactacaagatccctgccaccgggtcagacagtctcatcaaatacgagacgcacagcactctggacggaagatggagtgccctgacccccggacctccaatggccacggctggacctgcggacagcaagttcagcaacagccagctcatctttgcggggcctaaacagaacggcaacacggccaccgtacccgggactctgatcttcacctctgaggaggagctggcagccaccaacgccaccgatacggacatgtggggcaacctacctggcggtgaccagagcaacagcaacctgccgaccgtggacagactgacagccttgggagccgtgcctggaatggtctggcaaaacagagacatttactaccagggtcccatttgggccaagattcctcataccgatggacactttcacccctcaccgctgattggtgggtttgggctgaaacacccgcctcctcaaatttttatcaagaacaccccggtacctgcgaatcctgcaacgaccttcagctctactccggtaaactccttcattactcagtacagcactggccaggtgtcggtgcagattgactgggagatccagaaggagcggtccaaacgctggaaccccgaggtccagtttacctccaactacggacagcaaaactctctgttgtgggctcccgatgcggctgggaaatacactgagcctagggctatcggtacccgctacctcacccaccacctgtaataacctgttaatcaataaaccggtttattcgtttcagttgaactttggtctccgtgtccttcttatcttatctcgtttccatggctactgcgtacataagcagcggcctgcggcgcttgcgcttcgcggtttacaactgccggttaatcagtaacttctggcaaaccatgatgatggagttggccactccctctatgcgcgctcgctcactcactcggccctggagaccaaaggtctccagactgccggcctctggccggcagggccgagtgagtgagcgagcgcgcatagagggagtggccaa

SEQ ID NO: 62 - DNA, 3098 bp, Adeno-associated virus
  source 1..3098: mol_type = genomic DNA
gaattcgccctttctacggctgcgtcaactggaccaatgagaactttcccttcaacgattgcgtcgacaagatggtgatctggtgggaggagggcaagatgacggccaaggtcgtggagtccgccaaggccattctcggcggcagcaaggtgcgcgtggaccaaaagtgcaagtcttccgcccagatcgatcccacccccgtgatcgtcacttccaacaccaacatgtgcgctgtgattgacgggaacagcaccaccttcgagcaccagcagccgttacaagaccggatgttcaaatttgaactcacccgccgtctggagcacgactttggcaaggtgacaaagcaggaagtcaaagagttcttccgctgggcgcaggatcacgtgaccgaggtggcgcatgagttctacgtcagaaagggtggagccaacaagagacccgcccccgatgacgcggataaaagcgagcccaagcgggcctgcccctcagtcgcggatccatcgacgtcagacgcggaaggagctccggtggactttgccgacaggtaccaaaacaaatgttctcgtcacgcgggcatgcttcagatgctgtttccctgcaagacatgcgagagaatgaatcagaatttcaacatttgcttcacgcacgggaccagagactgttcagaatgtttccccggcgtgtcagaatctcaaccggtcgtcagaaagaggacgtatcggaaactctgtgccattcatcatctgctggggcgggctcccgagattgcttgctcggcctgcgatctggtcaacgtggacctggatgaccgtgtttctgagcaataaatgacttaaaccaggtatggctgccgatggttatcttccagattggctcgaggacaacctctctgagggcattcgcgagtggtgggacttgaaacctggagccccgaaacccaaagccaaccagcaaaagcaggacgacggccggggtctggtgcttcctggctacaagtacctcggacccttcaacggactcgacaagggagagccggtcaacgaggcagacgccgcggccctcgagcacgacaaggcctacgacaagcagctcgagcagggggacaacccgtacctcaagtacaaccacgccgacgccgagtttcaggagcgtcttcaagaagatacgtcttttgggggcaacctcgggcgagcagtcttccaggccaagaagcgggttctcgaacctctcggtctggttgaggaaggcgctaagacggctcctggaaagaagagacccatagaatcccccgactcctccacgggcatcggcaagaaaggccagcagcccgctaaaaagaagctcaactttgggcagactggcgactcagagtcagtgcccgacccccaacctctcggagaacctcccgccgcgccctcaggtctgggatctggtacaatggctgcaggcggtggcgcaccaatggcagacaataacgaaggcgccgacggagtgggtaatgcctccggaaattggcattgcgattccacatggctgggcgacagagtcatcaccaccagcacccgcacctgggccctgcccacctacaacaaccacctctacaagcagatatcaagtcagagcggggctaccaacgacaaccacttcttcggctacagcaccccctggggctattttgacttcaacagattccactgccacttctcaccacgtgactggcagcgactcatcaacaacaactggggattccggcccagaaagctgcggttcaagttgttcaacatccaggtcaaggaggtcacgacgaacgacggcgttacgaccatcgctaataaccttaccagcacgattcaggtcttctcggactcggagtaccaactgccgtacgtcctcggctctgcgcaccagggctgcctccctccgttccctgcggacgtgttcatgattcctcagtacggatatctgactctaaacaacggcagtcagtctgtgggacgttcctccttctactgcctggagtactttccttctcagatgctgagaacgggcaataactttgaattcagctacacctttgaggaagtgcctttccacagcagctatgcgcacagccagagcctggaccggctgatgaatcccctcatcgaccagtacctgtactacctggcccggacccagagcactacggggtccacaagggagctgcagttccatcaggctgggcccaacaccatggccgagcaatcaaagaactggctgcccggaccctgttatcggcagcagagactgtcaaaaaacatagacagcaacaacaacagtaactttgcctggaccggggccactaaataccatctgaatggtagaaattcattaaccaacccgggcgtagccatggccaccaacaaggacgacgaggaccagttctttcccatcaacggagtgctggtttttggcgaaacgggggctgccaacaagacaacgctggaaaacgtgctaatgaccagcgaggaggagatcaaaaccaccaatcccgtggctacagaagaatacggtgtggtctccagcaacctgcaatcgtctacggccggaccccagacacagactgtcaacagccagggggctctgcccggcatggtctggcagaaccgggacgtgtacctgcagggtcccatctgggccaaaattcctcacacggacggcaactttcacccgtctcccctgatgggcggatttggactcaaacacccgcctcctcaaattctcatcaaaaacaccccggtacctgctaatcctccagaggtgtttactcctgccaagtttgcctcatttatcacgcagtacagcaccggccaggtcagcgtggagatcgagtgggaactgcagaaagaaaacagcaaacgctggaatccagagattcagtacacctcaaattatgccaagtctaataatgtggaatttgctgtcaacaacgaaggggtttatactgagcctcgccccattggcacccgttacctcacccgtaacctgtaattgcctgttaatcaataaaccggttaattcgtttcagttgaactttggtctctgcgaagggcgaattc

SEQ ID NO: 63 - protein, 728 aa, synthetic construct
  REGION 1..728: note = Description of Artificial Sequence: Synthetic polypeptide
MAADGYLPDWLEDNLSEGIREWWDLKPGAPKPKANQQKQDDGRGLVLPGYKYLGPFNGLDKGEPVNEADAAALEHDKAYDKQLEQGDNPYLKYNHADAEFQERLQEDTSFGGNLGRAVFQAKKRVLEPLGLVEEGAKTAPGKKRPIESPDSSTGIGKKGQQPAKKKLNFGQTGDSESVPDPQPLGEPPAAPSGLGSGTMAAGGGAPMADNNEGADGVGNASGNWHCDSTWLGDRVITTSTRTWALPTYNNHLYKQISSQSGATNDNHFFGYSTPWGYFDFNRFHCHFSPRDWQRLINNNWGFRPRKLRFKLFNIQVKEVTTNDGVTTIANNLTSTIQVFSDSEYQLPYVLGSAHQGCLPPFPADVFMIPQYGYLTLNNGSQSVGRSSFYCLEYFPSQMLRTGNNFEFSYTFEEVPFHSSYAHSQSLDRLMNPLIDQYLYYLARTQSTTGSTRELQFHQAGPNTMAEQSKNWLPGPCYRQQRLSKNIDSNNNSNFAWTGATKYHLNGRNSLTNPGVAMATNKDDEDQFFPINGVLVFGETGAANKTTLENVLMTSEEEIKTTNPVATEEYGVVSSNLQSSTAGPQTQTVNSQGALPGMVWQNRDVYLQGPIWAKIPHTDGNFHPSPLMGGFGLKHPPPQILIKNTPVPANPPEVFTPAKFASFITQYSTGQVSVEIEWELQKENSKRWNPEIQYTSNYAKSNNVEFAVNNEGVYTEPRPIGTRYLTRNL

SEQ ID NO: 64 - DNA, 2495 bp, Adeno-associated virus
  source 1..2495: mol_type = genomic DNA
gaattcgccctttctacggctgcgtcaactagaccaatgagaactttcccttcaacgattgcgtcgacaagatggtgatctggtgggaggagggcaagatgacggccaaggtcgtggagtccgccaaggccattcatcatctgctggggcgggctcccgagattgcttgctcggcctgcgatctggtcaacgtggacctggatgactgtgtttctgagcaataaatgacttaaaccaggtatggctgccgatggttatcttccagattggctcgaggacaacctctctgagggcattcgcgagtggtgggacttgaaacctggagccccgaaacccaaagccaaccagcaaaagcaggacgacggccggggtctggtgcttcctggctacaagtacctcggacccttcaacggactcgacaagggagagccggtcaacgaggcagacgccgcggccctcgagcacgacaaggcctacgacaagcagctcgagcagggggacaacccgtacctcaagtacaaccacgccgacgccgagtttcaggagcgtcttcaagaagatacgtcttttgggggcaacctcgggcgagcagtcttccaggccaagaagcgggttctcgaacctctcggtctggttgaggaaggcgctaagacggctcctggaaagaagagacccatagaatcccccgactcctccacgggcatcggcaagaaaggccagcagcccgctaaaaagaagctcaactttgggcagactggcgactcagagtcagtgcccgaccctcaaccaatcggagaaccccccgcaggcccctctggtctgggatctggtacaatggctgcaggcggtggcgctccaatggcagacaataacgaaggcgccgacggagtgggtaatgcctccggaaattggcattgcgattccacatggctgggcgacagagtcatcaccaccagcacccgcacctgggccctgcccacctacaacaaccacctctacaagcagatatcaagtcagagcggggctaccaacgacaaccacttcttcggctacagcaccccctggggctattttgacttcaacagattccactgccacttctcaccacgtgactggcagcgactcatcaacaacaactggggattccggcccagaaagctgcggttcaagttgttcaacatccaggtcaaggaggtcacgacgaacgacggcgttacgaccatcgctaataaccttaccagcacgattcaggtcttctcggactcggagtaccaactgccgtacgtcctcggctctgcgcaccagggctgcctccctccgttccctgcggacgtgttcatgattcctcagtacggatatctgactctaaacaacggcagtcagtctgtgggacgttcctccttctactgcctggagtactttccttctcagatgctgagaacgggcaataactttgaattcagctacacctttgaggaagtgcctttccacagcagctatgcgcacagccagagcctggaccggctgatgaatcccctcatcgaccagtacctgtactacctggcccggacccagagcactacggggtccacaagggagctgcagttccatcaggctgggcccaacaccatggccgagcaatcaaagaactggctgcccggaccctgttatcggcagcagagactgtcaaaaaacatagacagcaacaacaccagtaactttgcctggaccggggccactaaataccatctgaatggtagaaattcattaaccaacccgggcgtagccatggccaccaacaaggacgacgaggaccagttctttcccatcaacggagtgctggtttttggcaaaacgggggctgccaacaagacaacgctggaaaacgtgctaatgaccagcgaggaggagatcaaaaccaccaatcccgtggctacagaacagtacggtgtggtctccagcaacctgcaatcgtctacggccggaccccagacacagactgtcaacagccagggggctctgcccggcatggtctggcagaaccgggacgtgtacctgcagggtcccatctgggccaaaattcctcacacggacggcaactttcacccgtctcccctgatgggcggatttggactcaaacacccgcctcctcaaattctcatcaaaaacaccccggtacctgctaatcctccagaggtgtttactcctgccaagtttgcctcatttatcacgcagtacagcaccggccaggtcagcgtggagatcgagtgggaactgcagaaagaaaacagcaaacgctggaatccagagattcagtacacctcaaattatgccaagtctaataatgtggaatttgctgtcaacaacgaaggggtttatactgagcctcgccccattggcacccgttacctcacccgtaacctgtaattgcctgttaatcaataaaccggttaattcgtttcagttgaactttggtctctgcgaagggcgaattc

SEQ ID NO: 65 - protein, 728 aa, synthetic construct
  REGION 1..728: note = Description of Artificial Sequence: Synthetic polypeptide
MAADGYLPDWLEDNLSEGIREWWDLKPGAPKPKANQQKQDDGRGLVLPGYKYLGPFNGLDKGEPVNEADAAALEHDKAYDKQLEQGDNPYLKYNHADAEFQERLQEDTSFGGNLGRAVFQAKKRVLEPLGLVEEGAKTAPGKKRPIESPDSSTGIGKKGQQPAKKKLNFGQTGDSESVPDPQPIGEPPAGPSGLGSGTMAAGGGAPMADNNEGADGVGNASGNWHCDSTWLGDRVITTSTRTWALPTYNNHLYKQISSQSGATNDNHFFGYSTPWGYFDFNRFHCHFSPRDWQRLINNNWGFRPRKLRFKLFNIQVKEVTTNDGVTTIANNLTSTIQVFSDSEYQLPYVLGSAHQGCLPPFPADVFMIPQYGYLTLNNGSQSVGRSSFYCLEYFPSQMLRTGNNFEFSYTFEEVPFHSSYAHSQSLDRLMNPLIDQYLYYLARTQSTTGSTRELQFHQAGPNTMAEQSKNWLPGPCYRQQRLSKNIDSNNTSNFAWTGATKYHLNGRNSLTNPGVAMATNKDDEDQFFPINGVLVFGKTGAANKTTLENVLMTSEEEIKTTNPVATEQYGVVSSNLQSSTAGPQTQTVNSQGALPGMVWQNRDVYLQGPIWAKIPHTDGNFHPSPLMGGFGLKHPPPQILIKNTPVPANPPEVFTPAKFASFITQYSTGQVSVEIEWELQKENSKRWNPEIQYTSNYAKSNNVEFAVNNEGVYTEPRPIGTRYLTRNL

SEQ ID NO: 66 - DNA, 2504 bp, Adeno-associated virus
  source 1..2504: mol_type = genomic DNA
gaattcgccctttctacggctgcgtcaactggaccaatgagaactttcccttcaacgattgcgtcgacaagatggtgatctggtgggaggagggcaagatgacggccaaggtcgtggagtccgccaaggccattcatcatctgctggggcgggctcccgagattgcttgctcggcctgcgatctggtcaacgtggacctggatgactgtgtttctgagcaataaatgacttaaaccaggtatggctgccgatggttatcttccagattggctcgaggacaacctctctgagggcattcgcgagtggtgggacttgaaacctggagccccgaaacccaaagccaaccagcaaaagcaggacgacggccggggtctggtgcttcctggctacaagtacctcggacccttcaacggactcgacaagggagagccggtcaacgaggcagacgccgcggccctcgagcacgacaaggcctacgacaagcagctcgagcagggggacaacccgtacctcaagtacaaccacgccgacgccgagtttcaggagcgtcttcaagaagatacgtcttttgggggcaacctcgggcgagcagtcttccaggccaagaagcgggttctcgaacctctcggtctggttgaggaaggcgctaagacggctcctggaaagaagagacccatagaatcccccgactcctccacgggcatcggcaagaaaggccagcagcccgctaaaaagaagctcaactttgggcagactggcgactcagagtcagtgcccgaccctcaaccaatcggagaaccccccgcaggcccctctggtctgggatctggtacaatggctgcaggcggtggcgctccaatggcagacaataacgaaggcgccgacggagtgggtaatgcctccggaaattggcattgcgattccacatggctgggcgacagagtcatcaccaccagcacccgcacctgggccctgcccacctacaacaaccacctctacaagcagatatcaagtcagagcggggctaccaacgacaaccacttcttcggctacagcaccccctggggctattttgacttcaacagattccactgccacttctcatcacgtgactggcagcgactcatcaacaacaactggggattccggcccaagagactcaacttcaagctcttcaacatccaggtcaaggaggtcacgcagaatgaaggcaccaagaccatcgccaataaccttaccagcacgattcaggtctttacggactcggaataccggctcccgtacgtcctcggctctgcgcaccagggctgcctgcctccgttcccggcggacgtcttcatgattcctcagtacgggtacctgactctgaacaacggcagtcaggccgtgggccgttcctccttctactgcctggagtactttccttctcaaatgctgagaacgggcaacaactttgagttcagctaccagtttgaggacgtgccttttcacagcagctacgcgcacagccaaagcctggaccggctgatgaaccccctcatcgaccagtacctgtactacctgtctcggactcagtccacgggaggtaccgcaggaactcagcagttgctattttctcaggccgggcctaataacatgtcggctcaggccaaaaactggctacccgggccctgctaccggcagcaacgcgtctccacgacactgtcgcaaaataacaacagcaactttgcttggaccggtgccaccaagtatcatctgaatggcagagactctctggtaaatcccggtgtcgctatggcaacgcacaaggacgacgaagagcgattttttccatccagcggagtcttgatgtttgggaaacagggagctggaaaagacaacgtggactatagcagcgttatgctaaccagtgaggaagaaatcaaaaccaccaacccagtggccacagaacagtacggcgtggtggccgataacctgcaacagcaaaacgccgctcctattgtaggggccgtcaacagtcaaggagccttacctggcatggtctggcagaaccgggacgtgtacctgcagggtcctatctgggccaagattcctcacacggacggcaactttcatccttcgccgctgatgggaggctttggactgaaacacccgcctcctcagatcctgattaagaatacacctgttcccgcggatcctccaactaccttcagtcaagccaagccggcgtcgttcatcacgcagtacagcaccggacaggtcagcgtggaaattgaatgggagctgcagaaagagaacagcaagcgctggaacccagagattcagtatacttccaactactacaaatctacaaatgtggactttgctgtcaatactgagggtacttattcagagcctcgccccattggcacccgttacctcacccgtaacctgtaattgcctgttaatcaataaaccggttaattcgtttcagttgaactttggtctctgcgaagggcgaattc

SEQ ID NO: 67 - protein, 731 aa, synthetic construct
  REGION 1..731: note = Description of Artificial Sequence: Synthetic polypeptide
MAADGYLPDWLEDNLSEGIREWWDLKPGAPKPKANQQKQDDGRGLVLPGYKYLGPFNGLDKGEPVNEADAAALEHDKAYDKQLEQGDNPYLKYNHADAEFQERLQEDTSFGGNLGRAVFQAKKRVLEPLGLVEEGAKTAPGKKRPIESPDSSTGIGKKGQQPAKKKLNFGQTGDSESVPDPQPIGEPPAGPSGLGSGTMAAGGGAPMADNNEGADGVGNASGNWHCDSTWLGDRVITTSTRTWALPTYNNHLYKQISSQSGATNDNHFFGYSTPWGYFDFNRFHCHFSSRDWQRLINNNWGFRPKRLNFKLFNIQVKEVTQNEGTKTIANNLTSTIQVFTDSEYRLPYVLGSAHQGCLPPFPADVFMIPQYGYLTLNNGSQAVGRSSFYCLEYFPSQMLRTGNNFEFSYQFEDVPFHSSYAHSQSLDRLMNPLIDQYLYYLSRTQSTGGTAGTQQLLFSQAGPNNMSAQAKNWLPGPCYRQQRVSTTLSQNNNSNFAWTGATKYHLNGRDSLVNPGVAMATHKDDEERFFPSSGVLMFGKQGAGKDNVDYSSVMLTSEEEIKTTNPVATEQYGVVADNLQQQNAAPIVGAVNSQGALPGMVWQNRDVYLQGPIWAKIPHTDGNFHPSPLMGGFGLKHPPPQILIKNTPVPADPPTTFSQAKPASFITQYSTGQVSVEIEWELQKENSKRWNPEIQYTSNYYKSTNVDFAVNTEGTYSEPRPIGTRYLTRNL

SEQ ID NO: 68 - DNA, 3128 bp, Adeno-associated virus
  source 1..3128: mol_type = genomic DNA
gaattcgccctttctacggctgcgtcaactggaccaatgagaactttcccttcaacgattgcgtcgacaagatggtgatctggtgggaggagggcaagatgacggccaaggtcgtggagtccgccaaggccattctcggcggcagcaaggtgcgcgtggaccaaaagtgcaagtcttccgcccagatcgatcccacccccgtgatcgtcacttccaacaccaacatgtgcgccgtgattgacgggaacagcaccaccttcgagcaccagcagccgttacaagaccggatgttcaaatttgaactcacccgccgtctggagcacgactttggcaaggtgacaaagcaggaagtcaaagagttcttccgctgggcgcaggatcacgtgaccgaggtggcgcatgagttctacgtcagaaagggtggagccaacaagagacccgcccccgatgacgcggataaaagcgagcccaagcgggcctgcccctcagtcgcggatccatcgacgtcagacgcggaaggagctccggtggactttgccgacaggtaccaaaacaaatgttctcgtcacgcgggcatgcttcagatgctgtttccctgcaagacatgcgagagaatgaatcagaatttcaacatttgcttcacgcacgggaccagagactgttcagaatgtttccccggcgtgtcagaatctcaaccggtcgtcagaaagaggacgtatcggaaactctgtgccattcatcatctgctagggcgggctcccgagattgcttgctcggcctgcgatctggtcaacgtggacctggatgactgtgtttctgagcaataaatgacttaaaccaggtatggctgccgatggttatcttccagattggctcgaggacaacctctctgagggcattcgcgagtggtgggacttgaaacctggagccccgaaacccaaagccaaccagcaaaagcaggacgacggccggggtctggtgcttcctggctacaagtacctcggacccttcaacggactcgacaagggggagcccgtcaacgcggcggacgcagcggccctcgagcacgacaaggcctacgaccagcagctcaaagcgggtgacaatccgtacctgcggtataaccacgccgacgccgagtttcaggagcgtctgcaagaagatacgtcttttgggggcaacctcgggcgagcagtcttccaggccaagaagcgggttctcgaacctctcggtctggttgaggaaggcgctaagacggctcctggaaagaagagaccggtagagccatcaccccagcgttctccagactcctctacgggcatcggcaagacaggccagcagcccgcgaaaaagagactcaactttgggcagactggcgactcagagtcagtgcccgaccctcaaccaatcggagaaccccccgcaggcccctctggtctgggatctggtacaatggctgcaggcggtggcgctccaatggcagacaataacgaaggcgccgacggagtgggtagttcctcaggaaattggcattgcgattccacatggctgggcgacagagtcatcaccaccagcacccgaacctgggccctccccacctacaacaaccacctctacaagcaaatctccaacgggacatcgggaggaagcaccaacgacaacacctacttcggctacagcaccccctgggggtattttgactttaacagattccactgccacttctcaccacgtgactggcagcgactcatcaacaacaactggggattccggcccaagagactcaacttcaagctcttcaacatccaggtcaaggaggtcacgcagaatgaaggcaccaagaccatcgccaataaccttaccagcacgattcaggtctttacggactcggaataccagctcccgtacgtcctcggctctgcgcaccagggctgcctgcctccgttcccggcggacgtcttcatgattcctcagtacgggtacctgactctgaacaacggcagtcaggccgtgggccgttcctccttctactgcctggagtactttccttctcaaatgctgagaacgggcaacaactttgagttcagctaccagtttgaggacgtgccttttcacagcagctacgcgcacagccaaagcctggaccggctgatgaaccccctcatcgaccagtacctgtactacctgtctcggactcagtccacgggaggtaccgcaggaactcagcagttgctattttctcaggccgggcctaataacatgtcggctcaggccaaaaactggctacccgggccctgctaccggcagcaacgcgtctccacgacactgtcgcaaaataacaacagcaactttgcttggaccggtgccaccaagtatcatctgaatggcagagactctctggtaaatcccggtgtcgctatggcaacgcacaaggacgacgaagagcgattttttccatccagcggagtcttgatgtttgggaaacagggagctggaaaagacaacgtggactatagcagcgttatgctaaccagtgaggaagaaatcaaaaccaccaacccagtggccacagaacagtacggcgtggtggccgataacctgcaacagcaaaacgccgctcctattgtaggggccgtcaacagtcaaggagccttacctggcatggtctggcagaaccgggacgtgtacctgcagggtcctatctgggccaagattcctcacacggacggcaactttcatccttcgccgctgatgggaggctttggactgaaacacccgcctcctcagatcctgattaagaatacacctgttcccgcggatcctccaactaccttcagtcaagccaagctggcgtcgttcatcacgcagtacagcaccggacaggtcagcgtggaaattgaatgggagctgcagaaagagaacagcaagcgctggaacccagagattcagtatacttccaactactacaaatctacaaatgtggactttgctgtcaatactgagggtacttattcagagcctcgccccattggcacccgttacctcacccgtaacctgtaattgcctgttaatcaataaaccggctaattcgtttcagttgaactttggtctctgcgaagggcgaattc

SEQ ID NO: 69 - protein, 738 aa, synthetic construct
  REGION 1..738: note = Description of Artificial Sequence: Synthetic polypeptide
MAADGYLPDWLEDNLSEGIREWWDLKPGAPKPKANQQKQDDGRGLVLPGYKYLGPFNGLDKGEPVNAADAAALEHDKAYDQQLKAGDNPYLRYNHADAEFQERLQEDTSFGGNLGRAVFQAKKRVLEPLGLVEEGAKTAPGKKRPVEPSPQRSPDSSTGIGKTGQQPAKKRLNFGQTGDSESVPDPQPIGEPPAGPSGLGSGTMAAGGGAPMADNNEGADGVGSSSGNWHCDSTWLGDRVITTSTRTWALPTYNNHLYKQISNGTSGGSTNDNTYFGYSTPWGYFDFNRFHCHFSPRDWQRLINNNWGFRPKRLNFKLFNIQVKEVTQNEGTKTIANNLTSTIQVFTDSEYQLPYVLGSAHQGCLPPFPADVFMIPQYGYLTLNNGSQAVGRSSFYCLEYFPSQMLRTGNNFEFSYQFEDVPFHSSYAHSQSLDRLMNPLIDQYLYYLSRTQSTGGTAGTQQLLFSQAGPNNMSAQAKNWLPGPCYRQQRVSTTLSQNNNSNFAWTGATKYHLNGRDSLVNPGVAMATHKDDEERFFPSSGVLMFGKQGAGKDNVDYSSVMLTSEEEIKTTNPVATEQYGVVADNLQQQNAAPIVGAVNSQGALPGMVWQNRDVYLQGPIWAKIPHTDGNFHPSPLMGGFGLKHPPPQILIKNTPVPADPPTTFSQAKLASFITQYSTGQVSVEIEWELQKENSKRWNPEIQYTSNYYKSTNVDFAVNTEGTYSEPRPIGTRYLTRNL

SEQ ID NO: 70 - DNA, 3084 bp, Adeno-associated virus
  source 1..3084: mol_type = genomic DNA
gaattcgccctttctacggctgcatcaactggaccaatgagaactttcccttcaacgattgcgtcgacaagatggtgatctggtgggaggagggcaagatgacggccaaggtcgtggagtccgccaaggccattctcggcggcagcaaggtgcgcgtggaccaaaagtgcaagtcgtccgcccagatcgaccccacccccgtgatcgtcacctccaacaccaacatgtgcgccgtgattgacgggaacagcaccaccttcgagcaccagcagccgttgcaggaccggatgttcaagttcgaactcacccgccgtctggagcacgactttggcaaggtgaccaagcaggaagtcaaagagttcttccgctgggcgcaggatcacgtgaccgaggtggcgcatgagttctacgtcagaaagggcggagccagcaaaagacccgcccccgatgacgcggatataagcgagcccaagcgggcctgcccctcagtcgcggatccatcgacgtcagacgcggaaggagctccggtggactttgccgacaggtaccaaaacaaatgttctcgtcacgcgggcatgcttcagatgctgtttccctgcaaaacgtgcgagaaaatgaatcagaatttcaacatttgcttcacgcacggggtcagagactgctcagaatgtttccccggtgcatcagaatctcaaccggtcgtcagaaaaaaaacgtatcagaaactgtgtgccattcatcatctgctggggcgggcacccgagattgcttgctcggcctgcgatctggtcaacgtggacctggacgactgtgtttctgagcaataaatgacttaaaccaggtatggctgccgatggttatcttccagattggcttgaggacaacctctctgagggcattcgcgagtggtgggacctgaaacctggagccccgaaacccaaagccaaccagcaaaagcaggacgacggccggggtctggtgcttcctggctacaagtacctcggacccttcaacggactcgacaagggggagcccgtcaacgcggcggacgcagcggccctcgagcacgacaaggcctacgaccagcagctcaaagcgggtgacaatccgtacctgcggtataaccacgccgacgccgagtttcaggagcgtctgcaagaagatacgtcttttgggggcaacctcgggcgagcagtcttccaggccaagaagcgggttctcgaacctctcggtctggttgaggaaggcgctaagacggctcctggaaagaagagaccggtagagccatcacctcagcgttcccccgactcctccacgggcatcggcaagaaaggccaccagcccgcgagaaagagactgaactttgggcagactggcgactcggagtcagtccccgaccctcaaccaatcggagaaccaccagcaggcccctctggtctgggatctggtacaatggctgcaggcggtggcgctccaatggcagacaataacgaaggcgccgacggagtgggtagttcctcaggaaattggcattgcgattccacatggctgggcgacagagtcatcaccaccagcacccgaacctgggccctgcccacctacaacaaccatctctacaagcaaatctccaacgggacatcgggaggaagcactaacgacaacacctactttggctacagcaccccctgggggtattttgacttcaacagattccactgccacttctcaccacgtgactggcagcgactcatcaacaataactggggattccggcccaagagactcaacttcaagctcttcaacatccaggtcaaggaggtcacgcagaatgaaggcaccaagaccatcgccaataaccttaccagcacgattcaggtgtttacggactcggaataccagctcccgtacgtccccggctctgcgcaccagggctgcctccctccgttcccggcggacgtcttcatgattcctcagtacgggtatctgaccctaaacaatggcagtcaggctgtgggccgttcctccttctactgcctggaatacttcccttctcaaatgctgaggacgggcaacaactttgaattcagctacaccttcgaggacgtgcctttccacagcagctacgcgcacagccagagcctggaccggctgatgaaccctctcatcgaccagtacctgtattacttatccagaactcagtccacaggaggaactcaaggtactcagcaattgttattttctcaagccgggcccgcaaacatgtcggctcaggccaagaactggctacctggaccgtgttaccgtcagcaacgagtttccacgacactgtcgcaaaacaacaacagcaattttgcttggaccggtgccaccaagtatcacctgaatggcagagactccctggttaatcccggcgttgccatggctacccacaaggacgacgaggagcgcttcttcccgtcaagcggagttctaatgtttggcaagcagggggctggaaaagacaatgtggactacagcagcgtgatgctcaccagcgaagaagaaattaaaactactaacccagtggctacagagcagtatggtgtggtggcagacaacctgcagcagaccaacggagctcccattgtgggaactgtcaacagccagggggccttacctggtatggtctggcaaaaccgggacgtgtacctgcagggccccatctgggccaaaattcctcacacggacggcaactttcatccttcgccgctgatgggaggctttggactgaaacacccgcctcctcagatcctggtgaaaaacactcctgttcctgcggatcctccgaccaccttcagccaggccaagctggcttcttttatcacgcagtacagcaccggacaggtcagcgtggaaatcgaatgggagctgcagaaagaaaacagcaagcgctggaacccagagattcagtatacttccaactactacaaatctacaaatgtggactttgctgtcaatactgagggtacttattcagagcctcgccccattggcactcgttatctcacccgtaatctgtaattgcttgttaatcaataaaccggt

SEQ ID NO: 71 - protein, 738 aa, synthetic construct
  REGION 1..738: note = Description of Artificial Sequence: Synthetic polypeptide
MAADGYLPDWLEDNLSEGIREWWDLKPGAPKPKANQQKQDDGRGLVLPGYKYLGPFNGLDKGEPVNAADAAALEHDKAYDQQLKAGDNPYLRYNHADAEFQERLQEDTSFGGNLGRAVFQAKKRVLEPLGLVEEGAKTAPGKKRPVEPSPQRSPDSSTGIGKKGHQPARKRLNFGQTGDSESVPDPQPIGEPPAGPSGLGSGTMAAGGGAPMADNNEGADGVGSSSGNWHCDSTWLGDRVITTSTRTWALPTYNNHLYKQISNGTSGGSTNDNTYFGYSTPWGYFDFNRFHCHFSPRDWQRLINNNWGFRPKRLNFKLFNIQVKEVTQNEGTKTIANNLTSTIQVFTDSEYQLPYVPGSAHQGCLPPFPADVFMIPQYGYLTLNNGSQAVGRSSFYCLEYFPSQMLRTGNNFEFSYTFEDVPFHSSYAHSQSLDRLMNPLIDQYLYYLSRTQSTGGTQGTQQLLFSQAGPANMSAQAKNWLPGPCYRQQRVSTTLSQNNNSNFAWTGATKYHLNGRDSLVNPGVAMATHKDDEERFFPSSGVLMFGKQGAGKDNVDYSSVMLTSEEEIKTTNPVATEQYGVVADNLQQTNGAPIVGTVNSQGALPGMVWQNRDVYLQGPIWAKIPHTDGNFHPSPLMGGFGLKHPPPQILVKNTPVPADPPTTFSQAKLASFITQYSTGQVSVEIEWELQKENSKRWNPEIQYTSNYYKSTNVDFAVNTEGTYSEPRPIGTRYLTRNL

SEQ ID NO: 72 - DNA, 3123 bp, Adeno-associated virus
  source 1..3123: mol_type = genomic DNA
gaattcgcccttggctgcgtcaactggaccaatgagaactttcccttcaacgattgcgtcgacaagatggtgatctggtgggaggagggcaagatgacggccaaggtcgtggagtccgccaaggccattctcggcggcagcaaggtgcgcgtggaccaaaagtgcaagtcgtccgcccagatcgaccccacccccgtgatcgtcacctccaacaccaacatgtgcgccgtgattgacgggaacagcaccaccttcgagcaccagcagccgttgcaggaccggatgttcaagttcgaactcacccgccgtctggagcacgactttggcaaggtgaccaagcaggaagtcaaagagttcttccgctgggcgcaggatcacgtgaccgaggtggcgcatgagttctacgtcagaaagggcggagccagcaaaagacccgcccccgatgacgcggatataagcgagcccaagcgggcctgcccctcagtcgcggatccatcgacgtcagacgcggaaggagctccggtggactttgccgacaggtaccaaaacaaatgttctcgtcacgcgggcatgctccagatgctgtttccctgcaaaacgtgcgagagaatgaatcagaatttcaacatttgcttcacgcacggggtcagagactgctcagaatgtttccccggtgcatcagaatctcaaccggtcgtcagaaaaaaaacgtatcagaaactgtgtgccattcatcatctgctggggcgggcacccgagattgcttgctcggcctgcgatctggtcaacgtggacctggacgactgtgtttctgagcaataaatgacttaaaccaggtatggctgccgatggttatcttccagattggcttgaggacaacctctctgagggcattcgcgagtggtgggacctgaaacctggagccccgaaacccaaagccaaccagcaaaagcaggacgacggccggggtctggtgcttcctggctacaagtacctcggacccttcaacggactcgacaagggggagcccgtcaacgcggcggacgcagcggccctcgagcacgacaaggcctacgaccagcagctcaaagcgggtgacaatccgtacctgcggtataaccacgccgacgccgagtttcaggagcgtctgcaagaagatacgtcttttgggggcaacctcgggcgagcagtcttccaggccaagaagcgggttctcgaacctctcggtctggttgaggaaggcgctaagacggctcctggaaagaagagaccggtagagccatcacctcagcgttcccccgactcctccacgggcatcggcaagaaaggccaccagcccgcgagaaagagactgaactttgggcagactggcgactcggagtcagtccccgaccctcaaccaatcggagaaccaccagcaggcccctctggtctgggatctggtacaatggctgcaggcggtggcgctccaatggcagacaataacgaaggcgccgacggagtgggtagttcctcaggaaattggcattgcgattccacatggctgggcgacagagtcatcaccaccagcacccgaacctgggccctgcccacctacaacaaccatctctacaagcaaatctccaacgggacatcgggaggaagcactaacgacaacacctactttggctacagcaccccctgggggtattttgacttcaacagattccactgccacttctcaccacgtgactggcagcgactcatcaacaataactggggattccggcccaagagactcaacttcaagctcttcaacatccaggtcaaggaggtcacgcagaatgaaggcaccaagaccatcgccaataaccttaccagcacgattcaggtgtttacggactcggaataccagctcccgtacgtcctcggctctgcgcaccagggctgcctccctccgttcccggcggacgtcttcatgattcctcagtacgggtatctgaccctaaacaatggcagtcaggctgtgggccgttcctccttctactgcctggaatacttcccttctcaaatgctgaggacgggcaacaactttgaattcagctacaccttcgaggacgtgcctttccacagcagctacgcgcacagccagagcctggaccggctgatgaaccctctcatcgaccagtacctgtattacttatccagaactcagtccacaggaggaactcaaggtactcagcaattgttattttctcaagccgggcccgcaaacatgtcggctcaggccaagaactggctacctggaccgtgttaccgtcagcaacgagtttccacgacactgtcgcaaaacaacaacagcaattttgcttggaccggtgccaccaagtatcacctgaatggcagagactccctggttaatcccggcgttgccatggctacccacaaggacgacgaggagcgcttcttcccgtcaagcggagttctaatgtttggcaagcagggggctggaaaagacaatgtggactacagcagcgtgatgctcaccagcgaagaagaaattaaaactactaacccagtggctacagagcagtatggtgtggtggcagacaacctgcagcagaccaacggagctcccattgtgggaactgtcaacagccagggggccttacctggtatggtctggcaaaaccgggacgtgtacctgcagggccccatctgggccaaaattcctcacacggacggcaactttcatccttcgccgctgatgggaggctttggactgaaacacccgcctcctcagatcctggtgaaaaacactcctgttcctgcggatcctccgaccaccttcagccaggccaagctggcttcttttatcacgcagtacagcaccggacaggtcagcgtggaaatcgaatgggagctgcagaaagaaaacagcaagcgctggaacccagagattcagtatacttccaactactacaaatctacaaatgtggactttgctgtcaatactgagggtacttattcagagcctcgccccattggcactcgttatctcacccgtaatctgtaattgcttgttaatcaataaaccggttaattcgtttcagttgaactttggtctctgcgaagggcgaattc

SEQ ID NO: 73 - protein, 738 aa, synthetic construct
  REGION 1..738: note = Description of Artificial Sequence: Synthetic polypeptide
MAADGYLPDWLEDNLSEGIREWWDLKPGAPKPKANQQKQDDGRGLVLPGYKYLGPFNGLDKGEPVNAADAAALEHDKAYDQQLKAGDNPYLRYNHADAEFQERLQEDTSFGGNLGRAVFQAKKRVLEPLGLVEEGAKTAPGKKRPVEPSPQRSPDSSTGIGKKGHQPARKRLNFGQTGDSESVPDPQPIGEPPAGPSGLGSGTMAAGGGAPMADNNEGADGVGSSSGNWHCDSTWLGDRVITTSTRTWALPTYNNHLYKQISNGTSGGSTNDNTYFGYSTPWGYFDFNRFHCHFSPRDWQRLINNNWGFRPKRLNFKLFNIQVKEVTQNEGTKTIANNLTSTIQVFTDSEYQLPYVLGSAHQGCLPPFPADVFMIPQYGYLTLNNGSQAVGRSSFYCLEYFPSQMLRTGNNFEFSYTFEDVPFHSSYAHSQSLDRLMNPLIDQYLYYLSRTQSTGGTQGTQQLLFSQAGPANMSAQAKNWLPGPCYRQQRVSTTLSQNNNSNFAWTGATKYHLNGRDSLVNPGVAMATHKDDEERFFPSSGVLMFGKQGAGKDNVDYSSVMLTSEEEIKTTNPVATEQYGVVADNLQQTNGAPIVGTVNSQGALPGMVWQNRDVYLQGPIWAKIPHTDGNFHPSPLMGGFGLKHPPPQILVKNTPVPADPPTTFSQAKLASFITQYSTGQVSVEIEWELQKENSKRWNPEIQYTSNYYKSTNVDFAVNTEGTYSEPRPIGTRYLTRNL

SEQ ID NO: 74 - DNA, 3122 bp, Adeno-associated virus
  source 1..3122: mol_type = genomic DNA
gaattcgccctttctacggctgcgtcaactggaccaatgagaactttcccttcaacgattgcgtcgacaagatggtgatctggtgggaggagggcaagatgacggccaaggtcgtggagtccgccaaggccattctcggcggcagcaaggtgcgtgtggaccaaaagtgcaagtcttccgcccagatcgatcccacccccgtgatcgtcacctccaacaccaacatgtgcgccgtgattgacgggaacagcgccaccttcgagcaccagcagccgttgcaggaccggatgttcaaatttgaactcacccgccgtctggagcatgactttggcaaggtgacgaagcaggaagtcaaagagttcttccgctgggcgcaggatcacgtgaccgaggtggcgcatgagttccacgtcagaaagggtggagccaacaagagacccgcccccgatgacgcggatataagcgagcccaagcgggcctgcccctcagtcgcggatccatcgacgtcagacgcggaaggagctccggtggactttgccgacaggtaccaaaacaaatgttctcgtcacgcgggcatgcttcagatgctgtttccctgcaagacatgcgagagaatgaatcagaatttcaacatttgcttcacgcacgggaccagagactgttcagaatgtttccccggcgtgtcagaatctcaaccggtcgtcagaaagaggacgtatcggaaactctgtgcgattcatcatctgctggggcgggctcccgagattgcttgctcggcctgcgatctggtcaacgtggacctggatgactgtgtttctgagcaataaatgacttaaaccaggtatggctgccgatggttatcttccagattggctcgaggacaacctctctgagggcattcgcgagtggtgggacttgaaacctggagccccgaaacccaaagccaaccagcaaaagcaggacgacggccggggtctggtgcttcctggctacaagtacctcggacccttcaacggactcgacaagggggagcccgtcaacgcggcggacgcagcggccctcgagcacgacaaagcctacgaccagcagctcaaagcgggtgacaatccgtacctgcggtataatcacgccgacgccgagtttcaggagcgtctgcaagaagatacgtcttttgggggcaacctcgggcgagcagtcttccaggccaagaagcgggttctcgaacctctcggtctggttgaggaaggcgctaagacggctcctggaaagaagagactggtagagcagtcgccacaagagccagactcctcctcgggcatcggcaagacaggccagcagcccgctaaaaagagactcaattttggtcagactggcgactcagagtcagtccccgacccacaacctctcggagaacctccagcagccccctcaggtctgggacctaatacaatggcttcaggcggtggcgctccaatggcagacaataacgaaggcgccgacggagtgggtaattcctcgggaaattggcattgcgattccacatggctgggggacagagtcatcaccaccagcacccgaacctgggccctgcccacctacaacaaccacctctacaagcaaatctccaacggcacctcgggaggaagcaccaacgacaacacctattttggctacagcaccccctgggggtattttgacttcaacagattccactgtcacttttcaccacgtgactggcaacgactcatcaacaacaattggggattccggcccaaaagactcaacttcaagctgttcaacatccaggtcaaggaagtcacgacgaacgaaggcaccaagaccatcgccaataatctcaccagcaccgtgcaggtctttacggactcggagtaccagttaccgtacgtgctaggatccgctcaccagggatgtctgcctccgttcccggcggacgtcttcacggttcctcagtacggctatttaactttaaacaatggaagccaagccctgggacgttcctccttctactgtctggagtatttcccatcgcagatgctgagaaccggcaacaactttcagttcagctacaccttcgaggacgtgcctttccacagcagctacgcgcacagccagagcctggacaggctgatgaatcccctcatcgaccagtacctgtactacctggtcagaacgcaaacgactggaactggagggacgcagactctggcattcagccaagcgggtcctagctcaatggccaaccaggctagaaattgggtgcccggaccttgctaccggcagcagcgcgtctccacgacaaccaaccagaacaacaacagcaactttgcctggacgggagctgccaagtttaagctgaacggccgagactctctaatgaatccgggcgtggcaatggcttcccacaaggatgacgacgaccgcttcttcccttcgagcggggtcctgatttttggcaagcaaggagccgggaacgatggagtggattacagccaagtgctgattacagatgaggaagaaatcaaggctaccaaccccgtggccacagaagaatatggagcagtggccatcaacaaccaggccgccaatacgcaggcgcagaccggactcgtgcacaaccagggggtgattcccggcatggtgtggcagaatagagacgtgtacctgcagggtcccatctgggccaaaattcctcacacggacggcaactttcacccgtctcccctgatgggcggctttggactgaagcacccgcctcctcaaattctcatcaagaacacaccggttccagcggacccgccgcttaccttcaaccaggccaagctgaactctttcatcacgcagtacagcaccggacaggtcagcgtggaaatcgagtgggagctgcagaaagaaaacagcaaacgctggaatccagagattcaatacacttccaactactacaaatctacaaatgtggactttgctgtcaacacggaaggagtttatagcgagcctcgccccattggcacccgttacctcacccgcaacctgtaattacatgttaatcaataaaccggttaattcgtttcagttgaactttggtctctgcgaagggcgaattc

SEQ ID NO: 75 - protein, 736 aa, synthetic construct
  REGION 1..736: note = Description of Artificial Sequence: Synthetic polypeptide
MAADGYLPDWLEDNLSEGIREWWDLKPGAPKPKANQQKQDDGRGLVLPGYKYLGPFNGLDKGEPVNAADAAALEHDKAYDQQLKAGDNPYLRYNHADAEFQERLQEDTSFGGNLGRAVFQAKKRVLEPLGLVEEGAKTAPGKKRLVEQSPQEPDSSSGIGKTGQQPAKKRLNFGQTGDSESVPDPQPLGEPPAAPSGLGPNTMASGGGAPMADNNEGADGVGNSSGNWHCDSTWLGDRVITTSTRTWALPTYNNHLYKQISNGTSGGSTNDNTYFGYSTPWGYFDFNRFHCHFSPRDWQRLINNNWGFRPKRLNFKLFNIQVKEVTTNEGTKTIANNLTSTVQVFTDSEYQLPYVLGSAHQGCLPPFPADVFTVPQYGYLTLNNGSQALGRSSFYCLEYFPSQMLRTGNNFQFSYTFEDVPFHSSYAHSQSLDRLMNPLIDQYLYYLVRTQTTGTGGTQTLAFSQAGPSSMANQARNWVPGPCYRQQRVSTTTNQNNNSNFAWTGAAKFKLNGRDSLMNPGVAMASHKDDDDRFFPSSGVLIFGKQGAGNDGVDYSQVLITDEEEIKATNPVATEEYGAVAINNQAANTQAQTGLVHNQGVIPGMVWQNRDVYLQGPIWAKIPHTDGNFHPSPLMGGFGLKHPPPQILIKNTPVPADPPLTFNQAKLNSFITQYSTGQVSVEIEWELQKENSKRWNPEIQYTSNYYKSTNVDFAVNTEGVYSEPRPIGTRYLTRNL

SEQ ID NO: 76 - DNA, 3117 bp, Adeno-associated virus
  source 1..3117: mol_type = genomic DNA
gaattcgcccttggctgcgtcaactggaccaatgagaactttcccttcaacgattgcgtcgacaagatggtgatctggtgggaggagggcaagatgacggccaaggtcgtggagtccgccaaggccattctcggcggcagcaaggtgcgtgtggaccaaaagtgcaagtcttccgcccagatcgatcccacccccgtgatcgtcacctccaacaccaacatgtgcgccgtgattgacgggaacagcaccaccttcgagcaccagcagccgttgcaggaccggatgttcaaatttgaactcacccgccgtctggagcatgactttggcaaggtgacgaagcaggaagtcaaagagttcttccgctgggcgcaggatcacgtgaccgaggtggcgcatgagttccacgtcagaaagggtggagccaacaagagacccgcccccgatgacgcggatataagcgagcccaagcgggcctgcccctcagtcgcggatccatcgacgtcagacgcggaaggagctccggtggactttgccgacaggtaccaaaacaaatgttctcgtcacgcgggcatgcttcagatgctgtttccctgcaagacatgcgagagaatgaatcagaatttcaacatttgcttcacgcacgggaccagagactgttcagaatgtttccccggcgtgtcagaatctcaaccggtcgtcagaaagaggacgtatcggaaactctgtgcgattcatcatctgctggggcgggctcccgagattgcttgctcggcctgcgatctggtcaacgtggacctggatgactgtgtttctgagcaataaatgacttaaaccaggtatggctgccgatggttatcttccagattggctcgaggacaacctctctgagggcattcgcgagtggtgggacttgaaacctggagccccgaaacccaaagccaaccagcaaaagcaggacgacggccggggtctggtgcttcctggctacaagtacctcggacccttcaacggactcgacaagggggagcccgtcaacgcggcggacgcagcggccctcgagcacgacaaagcctacgaccagcagctcaaagcgggtgacaatccgtacctgcggtataatcacgccgacgccgagtttcaggagcgtctgcaagaagatacgtcttttgggggcaacctcgggcgagcagtcttccaggccaagaagcgggttctcgaacctctcggtctggttgaggaaggcgctaagacggctcctggaaagaagagaccggtagagcagtcgccacaagagccagactcctcctcgggcatcggcaagacaggccagcagcccgctaaaaagagactcaattttggtcagactggcgactcagagtcagtccccgacccacaacctctcggagaacctccagcagccccctcaggtctgggacctaatacaatggcttcaggcggtggcgctccaatggcagacaataacgaaggcgccgacggagtgggtaattcctcgggaaattggcattgcgattccacatggctgggggacagagtcatcaccaccagcacccgaacctgggccctgcccacctacaacaaccacctctacaagcaaatctccaacggcacctcgggaggaagcaccaacgacaacacctattttggctacagcaccccctgggggtattttgacttcaacagattccactgtcacttttcaccacgtgactggcaacgactcatcaacaacaattggggattccggcccaaaagactcaacttcaagctgttcaacatccaggtcaaggaagtcacgacgaacgaaggcaccaagaccatcgccaataatctcaccagcaccgtgcgggtctttacggactcggagtaccagttaccgtacgtgctaggatccgctcaccagggatgtctgcctccgttcccggcggacgtcttcatggttcctcagtacggctatttaactttaaacaatggaagccaagccctgggacgttcctccttctactgtctggagtatttcccatcgcagatgctgagaaccggcaacaactttcagttcagctacaccttcgaggacgtgcctttccacagcagctacgcgcacagccagagcctggacaggctgatgaatcccctcatcgaccagtacctgtactacctggtcagaacgcaaacgactggaactggagggacgcagactctggcattcagccaagcgggtcctagctcaatggccaaccaggctagaaattgggtgcccggaccttgctaccggcagcagcgcgtctccacgacaaccaaccagagcaacaacagcaactttgcctggacgggagctgccaagtttaagctgaacggccgagactctctaatgaatccgggcgtggcaatggcttcccacaaggatgacgacgaccgcttcttcccttcgagcggggtcctgatttttggcaagcaaggagccgggaacgatggagtggattacagccaagtgctgattacagatgaggaagaaatcaaggctaccaaccccgtggccacagaagaatatggagcagtggccatcaacaaccaggccgccaatacgcaggcgcagaccggactcgtgcacaaccagggggtgattcccggcatggtgtggcagaatagagacgtgtacctgcagggtcccatctgggccaaaattcctcacacggacggcaactttcacccgtctcccctgatgggcggctttggactgaagcacccgcctcctcaaattctcatcaagaacacaccggttccagcggacccgccgcttaccttcaaccaggccaagctgaactctttcatcacgcagtacagcaccggacaggtcagcgtggaaatcgagtgggagctgcagaaagaaaacagcaaacgctggaatccagagattcaatacacttccaactactacaaatctacaaatgtggactttgctgtcaacacggaaggagtttatagcgagcctcgccccattggcacccgttacctcacccgcaacctgtaattacatgttaatcaataaaccggttaattcgtttcagttgaactttggtctctgcgaagggcgaattc

SEQ ID NO: 77 - protein, 736 aa, synthetic construct
  REGION 1..736: note = Description of Artificial Sequence: Synthetic polypeptide
MAADGYLPDWLEDNLSEGIREWWDLKPGAPKPKANQQKQDDGRGLVLPGYKYLGPFNGLDKGEPVNAADAAALEHDKAYDQQLKAGDNPYLRYNHADAEFQERLQEDTSFGGNLGRAVFQAKKRVLEPLGLVEEGAKTAPGKKRPVEQSPQEPDSSSGIGKTGQQPAKKRLNFGQTGDSESVPDPQPLGEPPAAPSGLGPNTMASGGGAPMADNNEGADGVGNSSGNWHCDSTWLGDRVITTSTRTWALPTYNNHLYKQISNGTSGGSTNDNTYFGYSTPWGYFDFNRFHCHFSPRDWQRLINNNWGFRPKRLNFKLFNIQVKEVTTNEGTKTIANNLTSTVRVFTDSEYQLPYVLGSAHQGCLPPFPADVFMVPQYGYLTLNNGSQALGRSSFYCLEYFPSQMLRTGNNFQFSYTFEDVPFHSSYAHSQSLDRLMNPLIDQYLYYLVRTQTTGTGGTQTLAFSQAGPSSMANQARNWVPGPCYRQQRVSTTTNQSNNSNFAWTGAAKFKLNGRDSLMNPGVAMASHKDDDDRFFPSSGVLIFGKQGAGNDGVDYSQVLITDEEEIKATNPVATEEYGAVAINNQAANTQAQTGLVHNQGVIPGMVWQNRDVYLQGPIWAKIPHTDGNFHPSPLMGGFGLKHPPPQILIKNTPVPADPPLTFNQAKLNSFITQYSTGQVSVEIEWELQKENSKRWNPEIQYTSNYYKSTNVDFAVNTEGVYSEPRPIGTRYLTRNL

SEQ ID NO: 78 - DNA, 3121 bp, Adeno-associated virus
  source 1..3121: mol_type = genomic DNA
gaattcgcccttctacggctgcgtcaactggaccaatgagaactttcccttcaacgattgcgtcgacaagatggtgatctggtgggaggagggcaagatgacggccaaggtcgtggagtccgccaaggccattctcggcggcagcaaggtgcgtgtggaccaaaagtgcaagtcttccgcccagatcgatcccacccccgtgatcgtcacctccaacaccaacatgtgcgccgtgattgacgggaacagcaccaccttcgagcaccagcagccgttgcaggaccggatgttcaaatttgaactcacccgccgtctggagcatgactttggcaaggtgacgaagcaggaagtcaaagagttcttccgctgggcgcaggatcacgtgaccgaggtggcgcatgagttccacgtcagaaagggtggcgccaacaagagacccgcccccgatgacgcggatataagcgagcccaagcgggcctgcccctcagtcgcggatccatcgacgtcagacgcggaaggagctccggtggactttgccgacaggtaccaaaacaaatgttctcgtcacgcgggcatgcttcagatgctgtttccctgcaagacatgcgagagaatgaatcagaatttcaacatttgcttcacgcacgggaccagagactgttcagaatgtttccccggcgtgtcagaatctcaaccggtcgtcagaaagaggacgtatcggaaactctgtgcgattcatcatctgctggggcgggctcccgagattgcttgctcggcctgcgatctggtcaacgtggacctggatgactgtgtttctgagcaataaatgacttaaaccaggtatggctgccgatggttatcttccagattggctcgaggacaacctctctgagggcattcgcgagtggtgggacttgaaacctggagccccgaaacccaaagccaaccagcaaaagcaggacgacggccggggtctggtgcttcctggctacaagtacctcggacccttcaacggactcgacaagggggagcccgtcaacgcggcggacgcagcggccctcgagcacgacaaagcctacgaccagcagctcaaagcgggtgacaatccgtacctgcggtataatcacgccgacgccgagtttcaggagcgtctgcaagaagatacgtcctttgggggcaacctcgggcgagcagtcttccaggccaagaagcgggttctcgaacctctcggtctggttgaggaaggcgctaagacggctcctggaaagaagagaccggtagagcagtcgccacaagagccagactcctcctcgggcatcggcaagacaggccagcagcccgctaaaaagagactcaattttggtcagactggcgactcagagtcagtccccgacccacaacctctcggagaacctccagcagccccctcaggtctgggacctaatacaatggcttcaggcggtggcgctccaatggcagacaataacgaaggcgccgacggagtgggtaattcctcgggaaattggcattgcgattccacatggctgggggacagagtcatcaccaccagcacccgaacctgggccctgcccacctacaacaaccacctctacaagcaaatctccaacggcacctcgggaggaagcaccaacgacaacacctattttggctacagcaccccctgggggtattttgacttcaacagattccactgtcacttttcaccacgtgactggcaacgactcatcaacaacaattggggattccggcccaaaagactcaacttcaagctgttcaacatccaggtcaaggaagtcacgacgaacgaaggcaccaagaccatcgccaataatctcaccagcaccgtgcaggtctttacggacttggagtaccagttaccgtacgtgctaggatccgctcaccagggatgtctgcctccgttcccggcggacgtcttcatggttcctcagtacggctatttaactttaaacaatggaagccaagccctgggacgttcctccttctactgtctggagtatttcccatcgcagatgccgagaaccggcaacaactttcagttcagctacaccttcgaggacgtgcctttccacagcagctacgcgcacagccagagcctggacaggctgatgaatcccctcatcgaccagtacctgtactacctggtcagaacgcaaacgactggaactggagggacgcagactctggcattcagccaagcgggtcctagctcaatggccaaccaggctagaaattgggtgcccggaccttgctaccggcagcagcgcgtctccacgacaaccaaccagaacaacaacagcaactttgcctggacgggagctgccaagtttaagctgaacggccgagactctctaatgaatccgggcgtggcaatggcttcccacaaggatgacgacgaccgcttcttcccttcgagcggggtcctgatttttggcaagcaaggagccgggaacgatggagtggattacagccaagtgctgattacagatgaggaagaaatcaaggctaccaaccccgtggccacagaagaatatggagcagtggccatcaacaaccaggccgccaatacgcaggcgcagaccggactcgtgcacaaccagggggtgattcccggcatggtgtggcagaatagagacgtgtacctgcagggtcccatctgggccaaaattcctcacacggacggcaactttcacccgtctcccctgatgggcggctttggactgaagcacccgcctcctcaaattctcatcaagaacacaccggttccagcggacccgccgcttaccttcaaccaggccaagctgaactctttcatcacgcagtacagcaccggacaggtcagcgtggaaatcgagtgggagctgcagaaagaaaacagcaaacgctggaatccagagattcaatacacttccaactactacaaatctacaaatgtggactttgctgtcaacacggaaggagtttatagcgagcctcgccccattggcacccgttacctcacccgcaacctgtaattacatgttaatcaataaaccggttaattcgtttcagttgaactttggtctctgcgaagggcgaattc

SEQ ID NO: 79 - protein, 736 aa, synthetic construct
  REGION 1..736: note = Description of Artificial Sequence: Synthetic polypeptide
MAADGYLPDWLEDNLSEGIREWWDLKPGAPKPKANQQKQDDGRGLVLPGYKYLGPFNGLDKGEPVNAADAAALEHDKAYDQQLKAGDNPYLRYNHADAEFQERLQEDTSFGGNLGRAVFQAKKRVLEPLGLVEEGAKTAPGKKRPVEQSPQEPDSSSGIGKTGQQPAKKRLNFGQTGDSESVPDPQPLGEPPAAPSGLGPNTMASGGGAPMADNNEGADGVGNSSGNWHCDSTWLGDRVITTSTRTWALPTYNNHLYKQISNGTSGGSTNDNTYFGYSTPWGYFDFNRFHCHFSPRDWQRLINNNWGFRPKRLNFKLFNIQVKEVTTNEGTKTIANNLTSTVQVFTDLEYQLPYVLGSAHQGCLPPFPADVFMVPQYGYLTLNNGSQALGRSSFYCLEYFPSQMPRTGNNFQFSYTFEDVPFHSSYAHSQSLDRLMNPLIDQYLYYLVRTQTTGTGGTQTLAFSQAGPSSMANQARNWVPGPCYRQQRVSTTTNQNNNSNFAWTGAAKFKLNGRDSLMNPGVAMASHKDDDDRFFPSSGVLIFGKQGAGNDGVDYSQVLITDEEEIKATNPVATEEYGAVAINNQAANTQAQTGLVHNQGVIPGMVWQNRDVYLQGPIWAKIPHTDGNFHPSPLMGGFGLKHPPPQILIKNTPVPADPPLTFNQAKLNSFITQYSTGQVSVEIEWELQKENSKRWNPEIQYTSNYYKSTNVDFAVNTEGVYSEPRPIGTRYLTRNL

SEQ ID NO: 80 - DNA, 3122 bp, Adeno-associated virus
  source 1..3122: mol_type = genomic DNA
gaattcgccctttctacggctgcgtcaactggaccaatgagaactttcccttcaacgattgcgtcgacaagatggtgatctggtgggaggagggcaagatgacggccaaggtcgtggagtccgccaaggccattctcggcggcagcaaggtgcgtgtggaccaaaagtgcaagtcttccgcccagatcgatcccacccccgtgatcgtcacctccaacaccaacatgtgcgccgtgattgacgggaacagcaccaccttcgagcaccagcagccgttgcaggaccggatgttcaaatttgaactcacccgccgtctggagcatgactttggcaaggtgacgaagcaggaagtcaaagggttcttccgctgggcgcaggatcacgtgaccgaggtggcgcatgagttccacgtgcgagcccaagcgggcctgcccctcagtcgcggatccatcgacgtcagaccagaaagggtggagccaacaagagacccgcccccgatgacgcggatataagcggaaggagctccggtggactttgccgacaggtaccaaaacaaatgttctcgtcacgcgggcatgcttcagatgctgtttccctgcaagacatgcgagagaatgaatcagaatttcaacatttgcttcacgcacgggaccagagactgttcagaatgtttccccggcgtgtcagaatctcaaccggtcgtcagaaagaggacgtatcggaaactctgtgcgattcatcatctgctggggcgggctcccgagattgcttgctcggcctgcgatctggtcaacgtggacctggatgactgtgtttctgagcaataaatgacttaaaccaggtatggctgccgatggttatcttccagattggctcgaggacaacctctctgagggcattcgcgagtggtgggacttgaaacctggagccccgaaacccaaagccaaccagcaaaagcaggacgacggccggggtctggtgcttcctggctacaagtacctcggacccttcaacggactcgacaagggggagcccgtcaacgcggcggacgcagcggccctcgagcacgacaaagcctacgaccagcagctcaaagcgggtgacaatccgtacctgcggtataatcacgccgacgccgagtttcaggagcgtctgcaagaagatacgtcttttgggggcaacctcgggcgagcagtcttccaggccaagaagcgggttctcgaacctctcggtctggttgaggaaggcgctaagacggctcctggaaagaagagaccggtagagcagtcgccacaagagccagactcctcctcgggcatcggcaagacaggccagcagcccgctaaaaagagactcaattttggtcagactggcgactcagagtcagtccccgacccacaacctctcggagaacctccagcagccccctcaggtctgggacctaatacaatggcttcaggcggtggcgctccaatggcagacaataacgaaggcgccgacggagtgggtaattcctcgggaaattggcattgcgattccacatggctgggggacagagtcatcaccaccagcacccgaacctgggccctgcccacctacaacaaccacctctacaagcaaatctccaacggcacctcgggaggaagcaccaacgacaacacctattttggctacagcaccccctgggggtattttgacttcaacagattccactgtcacttttcaccacgtgactggcaacgactcatcaacaacaattggggattccggcccaaaagactcaacttcaagctgttcaacatccaggtcaaggaagtcacgacgaacgaaggcaccaagaccatcgccaataatctcaccagcaccgtgcaggtctttacggactcggagtaccagttaccgtacgtgctaggatccgctcaccagggatgtctgcctccgttcccggcggacgtcttcatggttcctcagtacggctatttaactttaaacaatggaagccaagccctgggacgttcctccttctactgtctggagtatttcccatcgcagatgctgagaaccggcaacaactttcagttcagctacaccttcgaggacgtgcctttccacagcagctacgcgcacagccagagcctggacaggctgatgaatcccctcatcgaccagtacctgtactacctggtcagaacgcaaacgactggaactggagggacgcagactctggcattcagccaagcgggtcctagctcaatggccaaccaggctagaaattgggtgcccggaccttgctaccggcagcagcgcgtctccacgacaaccaaccagaacaacaacagcaactttgcctggacgggagctgccaagtttaagctgaacggccgagactctctaatgaatccgggcgtggcaatggcttcccacaaggatgacgacgaccgcttcttcccttcgagcggggtcctgatttttggcaagcaaggagccgggaacgatggagtggattacagccaagtgctgattacagatgaggaagaaatcaaggctaccaaccccgtggccacagaagaatatggagcagtggccatcaacaaccaggccgccaatacgcaggcgcagaccggactcgtgcacaaccagggggtgattcccggcatggtgtggcagaatagagacgtgtacctgcagggtcccatctgggccaaaattcctcacacggacggcaactttcacccgtctcccctgatgggcggctttggactgaagcacccgcctcctcaaattctcatcaagaacacaccggttccagcggacccgccgcttaccttcaaccaggccaagctgaactctttcatcacgcagtacagcaccggacaggtcagcgtggaaatcgagtgggagctgcagaaagaaaacagcaaacgctggaatccagagattcaatacacttccaactactacaaatctacaaatgtggactttgctgtcaacacggagggggtttatagcgagcctcgccccattggcacccgttacctcacccgcaacctgtaattacatgttaatcaataaaccggttaattcgtttcagttgaactttggtctctgcgaagggcgaattc

SEQ ID NO: 81 - protein, 736 aa, synthetic construct
  REGION 1..736: note = Description of Artificial Sequence: Synthetic polypeptide
MAADGYLPDWLEDNLSEGIREWWDLKPGAPKPKANQQKQDDGRGLVLPGYKYLGPFNGLDKGEPVNAADAAALEHDKAYDQQLKAGDNPYLRYNHADAEFQERLQEDTSFGGNLGRAVFQAKKRVLEPLGLVEEGAKTAPGKKRPVEQSPQEPDSSSGIGKTGQQPAKKRLNFGQTGDSESVPDPQPLGEPPAAPSGLGPNTMASGGGAPMADNNEGADGVGNSSGNWHCDSTWLGDRVITTSTRTWALPTYNNHLYKQISNGTSGGSTNDNTYFGYSTPWGYFDFNRFHCHFSPRDWQRLINNNWGFRPKRLNFKLFNIQVKEVTTNEGTKTIANNLTSTVQVFTDSEYQLPYVLGSAHQGCLPPFPADVFMVPQYGYLTLNNGSQALGRSSFYCLEYFPSQMLRTGNNFQFSYTFEDVPFHSSYAHSQSLDRLMNPLIDQYLYYLVRTQTTGTGGTQTLAFSQAGPSSMANQARNWVPGPCYRQQRVSTTTNQNNNSNFAWTGAAKFKLNGRDSLMNPGVAMASHKDDDDRFFPSSGVLIFGKQGAGNDGVDYSQVLITDEEEIKATNPVATEEYGAVAINNQAANTQAQTGLVHNQGVIPGMVWQNRDVYLQGPIWAKIPHTDGNFHPSPLMGGFGLKHPPPQILIKNTPVPADPPLTFNQAKLNSFITQYSTGQVSVEIEWELQKENSKRWNPEIQYTSNYYKSTNVDFAVNTEGVYSEPRPIGTRYLTRNL

SEQ ID NO: 82 - DNA, 2370 bp, Adeno-associated virus
  source 1..2370: mol_type = genomic DNA
gaattcgccctttctacggctgcgtcaactggaccaatgagaactttcccttcaacgattgcgtcgacaagatggtgatctggtgggaggagggcaagatgacggccaaggtcgtggagtccgccaaggccattctcggcggcagcaaggtgcgcgtggaccaaaagtgcaagtcgtccgcccagatcgaccccacccccgtgatcgtcacctccaacaccaacatgtgcgccgtgattgacgggaacagcaccaccttcgagcaccagcagccgttgcaggaccggatgttcaagttcgaactcacccgccgtctggagcacgactttggcaaggtgaccaagcaggaagtcaaagagttcttccgctgggcgcaggatcacgtgaccgaggtggcgcatgagttctacgtcagaaagggcggagccagcaaaagacccgcccccgatgacgcggatataagcgagcccaagcgggcctgcccctcagtcgcggatccatcgacgtcagacgcggaaggagctccggtggactttgccgacaggtaccaaaacaaatgttctcgtcacgcgggcatgcttcagacgctgtttccctgcaaaacgtgcgagagaatgaatcagaatttcaacatttgcttcacgcacggggtcagagactgctcagaatgtttccccggtgcatcagaatctcaaccggtcgtcagaaaaaaaacgtatcagaaactgtgtgccattcatcatctgctggggcgggcacccgagattgcttgctcggcctgcgatctggtcaacgtggacctggacgactgtgtttctgagcaataaatgacttaaaccaggtatggctgccgatggttatcttccagattggcttgaggacaacctctctgagggcattcgcgagtggtgggacctgaaacctggagccccgaaacccaaagccaaccagcaaaagcaggacgacggccggggtctggtgcttcctggctacaagtacctcggacccttcaacggactcgacaagggggagcccgtcaacgcggcggacgcagcggccctcgagcacgacaaggcctacgaccagcagctcaaagcgggtgacaatccgtacctgcggtataaccacgccgacgccgagtttcaggagcgtctgcaagaagatacgtcttttgggggcaacctcgggcgagcagtcttccaggccaagaagcgggttctcgaacctctcggtctggttgaggaaggcgctaagacggctcctggaaagaagagaccggtagagccatcacctcagcgttcccccgactcctccacgggcatcggcaagaaaggccaccagcccgcgagaaagagactgaactttgggcagactggcgactcggagtcagtccccgaccctcaaccaatcggagaaccaccagcaggcccctctggtctgggatctggtacaatggctgcaggcggtggcgctccaatggcagacaataacgaaggcgccgacggagtgggtagttcctcaggaaattggcattgcgattccacatggctgggcgacagagtcatcaccaccagcacccgaacctgggccctgcccacctacaacaaccatctctacaagcaaatctccaacgggacatcgggaggaagcactaacgacaacacctactttggctacagcaccccctgggggtattttgacttcaacagattccactgccacttctcaccacgtgactggcagcgactcatcaacaataactggggattccggcccaagagactcaacttcaagctcttcaacatccaggtcaaggaggtcacgcagaatgaaggcaccaagaccatcgccaataaccttaccagcacgattcaggtgtttacggactcggaataccagctcccgtacgtcctcggctctgcgcaccagggctgcctccctccgttcccggcggacgtcttcatgattcctcagtacgggtatctgaccctaaacaatggcagtcaggctgtgggccgttcctccttctactgcctggaatacttcccttctcaaatgctgaggacgggcaacaactttgaattcagctacaccttcgaggacgtgcctttccacagcagctacgcgcacagccagagcctggaccggctgatgaaccctctcatcgaccagtacctgtattacttatccagaactcagtccacaggaggaactcaaggtactcagcaattgttattttctcaagccgggcccgcaaacatgtyggctcaggccaagaactggctacctggaccgtgttaccgtcagcaacgagtttccacgacactgtcgcaaaacaacaacagcaattttgctggaccggtgccacca

SEQ ID NO: 83 - protein, 738 aa, synthetic construct; identical to SEQ ID NO: 73
  REGION 1..738: note = Description of Artificial Sequence: Synthetic polypeptide

SEQ ID NO: 84 - DNA, 2205 bp, Adeno-associated virus
  source 1..2205: mol_type = genomic DNA
atgactgacggttaccttccagattggctagaggacaacctctctgaaggcgttcgagagtggtgggcgctgcaacctggagcccctaaacccaaggcaaatcaacaacatcaggacaacgctcggggtcttgtgcttccgggttacaaatacctcggacccggcaacggactcgacaagggggaacccgtcaacgcagcggacgcggcagccctcgagcacgacaaggcctacgaccagcagctcaaggccggtgacaacccctacctcaagtacaaccacgccgacgcggagttccagcagcggcttcagggcgacacatcgtttgggggcaacctcggcagagcagtcttccaggccaaaaagagggttcttgaacctcttggtctggttgagcaagcgggtgagacggctcctggaaagaagagaccgttgattgaatccccccagcagcccgactcctccacgggtatcggcaaaaaaggcaagcagccggctaaaaagaagctcgttttcgaagacgaaactggagcaggcgacggaccccctgagggatcaacttccggagccatgtctgatgacagtgagatgcgtgcagcagctggcggagctgcagtcgagggcggacaaggtgccgatggagtgggtaatgcctcgggtgattggcattgcgattccacctggtctgagggccacgtcacgaccaccagcaccagaacctgggtcttgcccacctacaacaaccacctctacaagcgactcggagagagcctgcagtccaacacctacaacggattctccaccccctggggatactttgacttcaaccgcttccactgccacttctcaccacgtgactggcagcgactcatcaacaacaactggggcatgcgacccaaagccatgcgggtcaaaatcttcaacatccaggtcaaggaggtcacgacgtcgaacggcgagacaacggtggctaataaccttaccagcacggttcagatctttgcggactcgtcgtacgaactgccgtacgtgatggatgcgggtcaagagggcagcctgcctccttttcccaacgacgtctttatggtgccccagtacggctactgtggactggtgaccggcaacacttcgcagcaacagactgacagaaatgccttctactgcctggagtactttccttcgcagatgctgcggactggcaacaactttgaaattacgtacagttttgagaaggtgcctttccactcgatgtacgcgcacagccagagcctggaccggctgatgaaccctctcatcgaccagtacctgtggggactgcaatcgaccaccaccggaaccaccctgaatgccgggactgccaccaccaactttaccaagctgcggcctaccaacttttccaactttaaaaagaactggctgcccgggccttcaatcaagcagcagggcttctcaaagactgccaatcaaaactacaagatccctgccaccgggtcagacagtctcatcaaatacgagacgcacagcactctggacggaagatggagtgccctgacccccggacctccaatggccacggctggacctgcggacagcaagttcagcaacagccagctcatctttgcggggcctaaacagaacggcaacacggccaccgtacccgggactctgatcttcacctctgaggaggagctggcagccaccaacgccaccgatacggacatgtggggcaacctacctggcggtgaccagagcaacagcaacctgccgaccgtggacagactgacagccttgggagccgtgcctggaatggtctggcaaaacagagacatttactaccagggtcccatttgggccaagattcctcataccgatggacactttcacccctcaccgctgattggtgggtttgggctgaaacacccgcctcctcaaatttttatcaagaacaccccggtacctgcgaatcctgcaacgaccttcagctctactccggtaaactccttcattactcagtacagcactggccaggtgtcggtgcagattgactgggagatccagaaggagcggtccaaacgctggaaccccgaggtccagtttacctccaactacggacagcaaaactctctgttgtgggctcccgatgcggctgggaaatacactgagcctagggctatcggtacccgctacctcacccaccacctgtaa

SEQ ID NO: 85 - protein, 734 aa, Adeno-associated virus; identical to SEQ ID NO: 57

SEQ ID NO: 86 - DNA, 3128 bp, Adeno-associated virus
  source 1..3128: mol_type = genomic DNA
gaattcgccctttctacggctgcgtcaactggaccaatgagaactttcccttcaacgattgcgtcgacaagatgttgatctggtgggaggagggcaagatgacggccaaggtcgtggagtccgccaaggccattctcggcggcagcaaagtgcgcgtggaccaaaagtgcaagccgtccgcccagatcgaccccacccccgtgatcgtcacctccaacaccaacatgtgcgccgtgattgacgggaacagcaccaccttcgagcaccagcagccgttgcgggaccggatgttcaagtttgaactcacccgccgtctggagcacgactttggcaaggtgacaaagcaggaagtcagagagttcttccgctgggcgcaggatcacgtgaccgaggtggcgcacgagttctacgtcagaaagggtggagccaacaagagacccgcccccgatgacgcggataaaagcgagcccaagcgggcctgcccctcagtcgcggatccatcgacgtcagacgcggaaggagctccggtggactttgccgacaggtaccaaaacaaatgttctcgtcacgcgggcatgcttcagatgctgtttccctgcaaaacatgcgagagaatgaatcagaatttcaacatttgcttcacgcacgggaccagagactgttcagaatgtttccccggcgtgtcagaatctcaaccggtcgtcagaaaaaagacgtatcggaaactctgtgcgattcatcatctgctggggcgggcacccgagattgcttgctcggcctgcgatctggtcaacgtggacctagatgactgtgtttctgagcaataaatgacttaaaccaggtatggctgccgatggttatcttccagattggctcgaggacaacctctctgagggcattcgcgagtggtgggacttgaaacctggagccccgaaacccaaagccaaccagcaaaagcaggacgacggccggggtctggtgcttcctggctacaagtacctcggacccttcaacggactcgacaagggggagcccgtcaacgcggcggacgcagcggccctcgagcacgacaaggcctacgaccagcagctcaaagcgggtgacaatccgtacctgcggtataaccacgccgacgccgagtttcaggagcgtctgcaagaagatacgtcttttgggggcaacctcgggcgagcagtcttccaggccaagaagcgggttctcgaacctctcggtctggttgaggaaggcgctaagacggctcctggaaagaagagaccggtagagccatcaccccagcgttctccagactcctctacgggcatcggcaagaaaggccagcagcccgcgaaaaagagactcaactttgggcagactggcgactcagagtcagtgcccgaccctcaaccaatcggagaaccccccgcaggcccctctggtctgggatctggtacaatggctgcaggcggtggcgctccaatggcagacaataacgaaggcgccgacggagtgggtagttcctcaggaaattggcattgcgattccacatggctgggcgacagagtcatcaccaccagcacccgaacctgggccctccccacctacaacaaccacctctacaagcaaatctccaacgggacttcgggaggaagcaccaacgacaacacctacttcggctacagcaccccctgggggtattttgactttaacagattccactgccacttctcaccacgtgactggcagcgactcatcaacaacaactggggattccggcccaagagactcaacttcaagctcttcaacatccaggtcaaggaggtcacgcagaatgaaggcaccaagaccatcgccaataaccttaccagcacgattcaggtctttacggactcggaataccagctcccgtacgtcctcggctctgcgcaccagggctgcctgcctccgttcccggcggacgtcttcatgattcctcagtacgggtacctgactctgaacaatggcagtcaggccgtgggccgttcctccttctactgcctggagtactttccttctcaaatgctgagaacgggcaacaactttgagttcagctaccagtttgaggacgtgccttttcacagcagctacgcgcacagccaaagcctggaccggctgatgaaccccctcatcgaccagtacctgtactacctgtctcggactcagtccacgggaggtaccgcaggaactcagcagttgctattttctcaggccgggcctaataacatgtcggctcaggccaaaaactggctacccgggccctgctaccggcagcaacgcgtctccacgacactgtcgcaaaataacaacagcaactgtaaatcccggtgtcgctatggcaacccacaaggacgacgaagagcgattttgcctggaccggtgccaccaagtatcatctgaatggcagagactctctgttttccgtccagcggagtcttaatgtttgggaaacagggagctggaaaagacaacgtggactatagcagcgttatgctaaccagtgaggaagaaattaaaaccaccaacccagtggccacggaacagtacggcgtggtggccgataacctgcaacagcaaaacgccgctcctattgtaggggccgtcaacagtcaaggagccttacctggcatggtctggcagaaccgggacgtgtacctgcagggtcctatctgggccaagattcctcacacggacggaaactttcatccctcgccgctgatgggaggctttggactgaaacacccgcctcctcagatcctgattaagaatacacctgttcccgcggatcctccaactaccttcagtcaagctaagctggcgtcgttcatcacgcagtacagcaccggacaggtcagcgtggaaattgaatgggagctgcagaaagaaaacagcaaacgctggaacccagagattcaatacacttccaactactacaaatctacaaatgtggacttcgctgttaacacagatggcacttattctgagcctcgccccattggcacccgttacctcacccgtaatctgtaattgctcgttaatcaataaaccggttgattcgtttcagttgaactttggtctctgcgaagggcgaattc

SEQ ID NO: 87 - protein, 738 aa, synthetic construct; identical to SEQ ID NO: 7
  REGION 1..738: note = Description of Artificial Sequence: Synthetic polypeptide

SEQ ID NO: 88 - DNA, 3128 bp, Adeno-associated virus
  source 1..3128: mol_type = genomic DNA
gaattcgccctttctacggctgcgtcaactggaccaatgagaactttcccttcaacgattgcgtcgacaagatggtgatctggtgggaggagggcaagatgacggccaaggtcgtggagtccgccaaggccattctcggcggcagcaaagtgcgcgtggaccaaaagtgcaagtcgtccgcccagatcgaccccacccccgtgatcgtcacctccaacaccaacatgtgcgccgtgattgacgggaacagcaccaccttcgagcaccagcagccgttgcaggaccggatgttcaagtttgaactcacccgccgtctggagcacgactttggcaaggtgacaaagcaggaagtcagagagttcttccgctgggcgcaggatcacgtgaccgaggtggcgcacgagttctacgtcagaaagggtggagccaacaagagacccgcccccgatgacgcggataaaagcgagcccaagcgggcctgcccctcagtcgcggatccatcgacgtcagacgcggaaggagctccggtggactttgccgacaggtaccaaaacaaatgttctcgtcacgcgggcatgcttcagatgctgtttccctgcaaaacatgcgagagaatgaatcagaatttcaacatttgcttcacgcacgggaccagagactgttcagaatgtttccccggcgtgtcagaatctcaaccggttgtcagaaaaaagacgtatcggaaactctgtgcgattcatcatctgctggggcgggcacccgagattgcttgctcggcctgcgatctggtcaacgtggacctagatgactgtgtttctgagcaataaatgacttaaaccaggtatggctgccgatggttatcttccagattggctcgaggacaacctctctgagggcattcgcgagtggtgggacttgaaacctggagccccgaaacccaaagccaaccagcaaaagcaggacgacggccggggtctggtgcttcctggctacaagtacctcggacccttcaacggactcgacaagggggagcccgtcaacgcggcggacgcagcggccctcgagcacgacaaggcctacgaccagcagctcaaagcgggtgacaatccgtacctgcggtataaccacgccgacgccgagtttcaggagcgtctgcaagaagatacgtcttttgggggcaacctcgggcgagcagtcttccaggccaagaagcgggttctcgaacctctcggtctggttgaggaaggcgctaagacggctcctggaaagaagagaccggtagagccatcaccccagcgttctccagactcctctacgggcatcggcaagaaaggccagcagcccgcgaaaaagagactcaactttgggcagactggcgactcagagtcagtgcccgaccctcaaccaatcggagaaccccccgcaggcccctctggtctgggatctggtacaatggctgcaggcggtggcgctccaatggcagacaataacgaaggcgccgacggagtgggtagttcctcaggaaattggcattgcgattccacatggctgggcgacagagtcatcaccaccagcacccgaacctgggccctccccacctacaacaaccacctctacaagcaaatctccaacgggacttcgggaggaagcaccaacgacaacacctacttcggctacagcaccccctgggggtattttgactttaacagattccactgccacttctcaccacgtgactggcagcgactcatcaacaacaactggggattccggcccaagagacccaacttcaagctcttcaacatccaggtcaaggaggtcacgcagaatgaaggcaccaagaccatcgccaataaccttaccagcacgattcaggtctttacggactcggaataccagctcccgtacgtcctcggctctgcgcaccagggctgcctgcctccgttcccggcggacgtcttcatgattcctcagtacgggtacctgactctgaacaatggcagtcaggccgtgggccgttcctccttctactgcctggagtactttccttctcaaatgctgagaacgggcaacaactttgagttcagctaccagtttgaggacgtgccttttcacagcagctacgcgcacagccaaagcctggaccggctgatgaaccccctcatcgaccagtacctgtactacctgtctcggactcagtccacgggaggtaccgcaggaactcagcagttgctattttctcaggccgggcctaataacatgtcggctcaggccaaaaactggctacccgggccctgctaccggcagcaacgcgtctccacgacactgtcgcaaaataacaacagcaactttgcctggaccggtgccaccaagtatcatctgaatggcagagactctctggtaaatcccggtgtcgctatggcaacccacaaggacgacgaagagcgattttttccgtccagcggagtcttaatgtttgggaaacagggagctggaaaagacaacgtggactatagcagcgttatgctaaccagtgaggaagaaattaaaaccaccaacccagtggccacagaacagtacggcgtggtggccgataacctgcaacagcaaaacgccgctcctattgtaggggccgtcaacagtcaaggagccttacctggcatggtctggcagaaccgggacgtgtacctgcagggtcctatctgggccaagattcctcacacggacggaaactttcatccctcgccgctgatgggaggctttggactgaaacacccgcctcctcagatcctgattaagaatacacctgttcccgcggatcctccaactaccttcagtcaagctaagctggcgtcgttcatcacgcagtacagcaccggacaggtcagcgtggaaattgaatgggagctgcagaaagaaaacagcaaacgctggaacccagagattcaatacacttccaactactacaaatctacaaatgtggactttgctgttaacacagatggcacttattctgagcctcgccccattggcacccgttacctcacccgtaatctgtaattgcttgttaatcaataaaccggttgattcgtttcagttgaactttggtctctgcgaagggcgaattc

SEQ ID NO: 89 - protein, 738 aa, synthetic construct
  REGION 1..738: note = Description of Artificial Sequence: Synthetic polypeptide
MAADGYLPDWLEDNLSEGIREWWDLKPGAPKPKANQQKQDDGRGLVLPGYKYLGPFNGLDKGEPVNAADAAALEHDKAYDQQLKAGDNPYLRYNHADAEFQERLQEDTSFGGNLGRAVFQAKKRVLEPLGLVEEGAKTAPGKKRPVEPSPQRSPDSSTGIGKKGQQPAKKRLNFGQTGDSESVPDPQPIGEPPAGPSGLGSGTMAAGGGAPMADNNEGADGVGSSSGNWHCDSTWLGDRVITTSTRTWALPTYNNHLYKQISNGTSGGSTNDNTYFGYSTPWGYFDFNRFHCHFSPRDWQRLINNNWGFRPKRPNFKLFNIQVKEVTQNEGTKTIANNLTSTIQVFTDSEYQLPYVLGSAHQGCLPPFPADVFMIPQYGYLTLNNGSQAVGRSSFYCLEYFPSQMLRTGNNFEFSYQFEDVPFHSSYAHSQSLDRLMNPLIDQYLYYLSRTQSTGGTAGTQQLLFSQAGPNNMSAQAKNWLPGPCYRQQRVSTTLSQNNNSNFAWTGATKYHLNGRDSLVNPGVAMATHKDDEERFFPSSGVLMFGKQGAGKDNVDYSSVMLTSEEEIKTTNPVATEQYGVVADNLQQQNAAPIVGAVNSQGALPGMVWQNRDVYLQGPIWAKIPHTDGNFHPSPLMGGFGLKHPPPQILIKNTPVPADPPTTFSQAKLASFITQYSTGQVSVEIEWELQKENSKRWNPEIQYTSNYYKSTNVDFAVNTDGTYSEPRPIGTRYLTRNL

SEQ ID NO: 90 - protein, 738 aa, Adeno-associated virus
MAADGYLPDWLEDNLSEGIREWWDLKPGAPKPKANQQKQDDGRGLVLPGYKYLGPFNGLDKGEPVNAADAAALEHDKAYDQQLKAGDNPYLRYNHADAEFQERLQEDTSFGGNLGRAVFQAKKRVLEPLGLVEEAAKTAPGKKRPVEPSPQRSPDSSTGIGKKGQQPAKKRLNFGQTGDSESVPDPQPIGEPPAGPSGLGSGTMAAGGGAPMADNNEGADGVGSSSGNWHCDSTWLGDRVITTSTRTWALPTYNNHLYKQISNGTSGGSTNDNTYFGYSTPWGYFDFNRFHCHFSPRDWQRLINNNWGFRPKRLSFKLFNIQVKEVTQNEGTKTIANNLTSTIQVFTDSEYQLPYVLGSAHQGCLPPFPADVFMIPQYGYLTLNNGSQAVGRSSFYCLEYFPSQMLRTGNNFEFSYTFEDVPFHSSYAHSQSLDRLMNPLIDQYLYYLSRTQSTGGTQGTQQLLFSQAGPANMSAQAKNWLPGPCYRQQRVSTTLSQNNNSNFAWTGATKYHLNGRDSLVNPGVAMATHKDDEERFFPSSGVLMFGKQGAGRDNVDYSSVMLTSEEEIKTTNPVATEQYGVVADNLQQTNTGPIVGNVNSQGALPGMVWQNRDVYLQGPIWAKIPHTDGNFHPSPLMGGFGLKHPPPQILIKNTPVPADPPTTFSQAKLASFITQYSTGQVSVEIEWELQKENSKRWNPEIQYTSNYYKSTNVDFAVNTEGTYSEPRPIGTRYLTRNL

SEQ ID NO: 91 - DNA, 2172 bp, synthetic construct
  misc_feature 1..2172: note = Description of Artificial Sequence: Synthetic polynucleotide
  source 1..2172: mol_type = other DNA
atgtcttttgttgatcaccctccagattggttggaagaagttggtgaaggtcttcgcgagtttttgggccttgaagcgggcccaccgaaaccaaaacccaatcagcagcatcaagatcaagcccgtggtcttgtgctgcctggttataactatctcggacccggaaacggtctcgatcgaggagagcctgtcaacagggcagacgaggtcgcgcgagagcacgacatctcgtacaacgagcagcttgaggcgggagacaacccctacctcaagtacaaccacgcggacgccgagtttcaggagaagctcgccgacgacacatccttcgggggaaacctcggaaaggcagtctttcaggccaagaaaagggttctcgaaccttttggcctggttgaagagggtgctaagacggcccctaccggaaagcggatagacgaccactttccaaaaagaaagaaggctcggaccgaagaggactccaagccttccacctcgtcagacgccgaagctggacccagcggatcccagcagctgcaaatcccagcccaaccagcctcaagtttgggagctgatacaatgtctgcgggaggtggcggcccattgggcgacaataaccaaggtgccgatggagtgggcaatgcctcgggagattggcattgcgattccacgtggatgggggacagagtcgtcaccaagtccacccgaacctgggtgctgcccagctacaacaaccaccagtaccgagagatcaaaagcggctccgtcgacggaagcaacgccaacgcctactttggatacagcaccccctgggggtactttgactttaaccgcttccacagccactggagcccccgagactggcaaagactcatcaacaactactggggcttcagaccccggtccctcagagtcaaaatcttcaacattcaagtcaaagaggtcacggtgcaggactccaccaccaccatcgccaacaacctcacctccaccgtccaagtgtttacggacgacgactaccagctgccctacgtcgtcggcaacgggaccgagggatgcctgccggccttccctccgcaggtctttacgctgccgcagtacggttacgcgacgctgaaccgcgacaacacagaaaatcccaccgagaggagcagcttcttctgcctagagtactttcccagcaagatgctgagaacgggcaacaactttgagtttacctacaactttgaggaggtgcccttccactccagcttcgctcccagtcagaacctgttcaagctggccaacccgctggtggaccagtacttgtaccgcttcgtgagcacaaataacactggcggagtccagttcaacaagaacctggccgggagatacgccaacacctacaaaaactggttcccggggcccatgggccgaacccagggctggaacctgggctccggggtcaaccgcgccagtgtcagcgccttcgccacgaccaataggatggagctcgagggcgcgagttaccaggtgcccccgcagccgaacggcatgaccaacaacctccagggcagcaacacctatgccctggagaacactatgatcttcaacagccagccggcgaacccgggcaccaccgccacgtacctcgagggcaacatgctcatcaccagcgagagcgagacgcagccggtgaaccgcgtggcgtacaacgtcggcgggcagatggccaccaacaaccagagctccaccactgcccccgcgaccggcacgtacaacctccaggaaatcgtgcccggcagcgtgtggatggagagggacgtgtacctccaaggacccatctgggccaagatcccagagacgggggcgcactttcacccctctccggccatgggcggattcggactcaaacacccaccgcccatgatgctcatcaagaacacgcctgtgcccggaaatatcaccagcttctcggacgtgcccgtcagcagcttcatcacccagtacagcaccgggcaggtcaccgtggagatggagtgggagctcaagaaggaaaactccaagaggtggaacccagagatccagtacacaaacaactacaacgacccccagtttgtggactttgccccggacagcaccggggaatacagaaccaccagacctatcggaacccgataccttacccgacccctt

SEQ ID NO: 92 - protein, 720 aa, synthetic construct
  REGION 1..720: note = Description of Artificial Sequence: Synthetic polypeptide
MSFVDHPPDWLEEVGEGLREFLGLEAGPPKPKPNQQHQDQARGLVLPGYNYLGPGNGLDRGEPVNRADEVAREHDISYNEQLEAGDNPYLKYNHADAEFQEKLADDTSFGGNLGKAVFQAKKRVLEPFGLVEEGAKTAPTGKRIDDHFPKRKKARTEEDSKPSTSSDAEAGPSGSQQLQIPAQPASSLGADTMSAGGGGPLGDNNQGADGVGNASGDWHCDSTWMGDRVVTKSTRTWVLPSYNNHQYREIKSGSVDGSNANAYFGYSTPWGYFDFNRFHSHWSPRDWQRLINNYWGFRPRSLRVKIFNIQVKEVTVQDSTTTIANNLTSTVQVFTDDDYQLPYVVGNGTEGCLPAFPPQVFTLPQYGYATLNRDNTENPTERSSFFCLEYFPSKMLRTGNNFEFTYNFEEVPFHSSFAPSQNLFKLANPLVDQYLYRFVSTNNTGGVQFNKNLAGRYANTYKNWFPGPMGRTQGWNLGSGVNRASVSAFATTNRMELEGASYQVPPQPNGMTNNLQGSNTYALENTMIFNSQPANPGTTATYLEGNMLITSESETQPVNRVAYNVGGQMATNNQSSTTAPATGTYNLQEIVPGSVWMERDVYLQGPIWAKIPETGAHFHPSPAMGGFGLKHPPPMMLIKNTPVPGNITSFSDVPVSSFITQYSTGQVTVEMEWELKKENSKRWNPEIQYTNNYNDPQFVDFAPDSTGEYRTTRPIGTRYL

SEQ ID NO: 93 - protein, 724 aa, Adeno-associated virus 5
MSFVDHPPDWLEEVGEGLREFLGLEAGPPKPKPNQQHQDQARGLVLPGYNYLGPGNGLDRGEPVNRADEVAREHDISYNEQLEAGDNPYLKYNHADAEFQEKLADDTSFGGNLGKAVFQAKKRVLEPFGLVEEGAKTAPTGKRIDDHFPKRKKARTEEDSKPSTSSDAEAGPSGSQQLQIPAQPASSLGADTMSAGGGGPLGDNNQGADGVGNASGDWHCDSTWMGDRVVTKSTRTWVLPSYNNHQYREIKSGSVDGSNANAYFGYSTPWGYFDFNRFHSHWSPRDWQRLINNYWGFRPRSLRVKIFNIQVKEVTVQDSTTTIANNLTSTVQVFTDDDYQLPYVVGNGTEGCLPAFPPQVFTLPQYGYATLNRDNTENPTERSSFFCLEYFPSKMLRTGNNFEFTYNFEEVPFHSSFAPSQNLFKLANPLVDQYLYRFVSTNNTGGVQFNKNLAGRYANTYKNWFPGPMGRTQGWNLGSGVNRASVSAFATTNRMELEGASYQVPPQPNGMTNNLQGSNTYALENTMIFNSQPANPGTTATYLEGNMLITSESETQPVNRVAYNVGGQMATNNQSSTTAPATGTYNLQEIVPGSVWMERDVYLQGPIWAKIPETGAHFHPSPAMGGFGLKHPPPMMLIKNTPVPGNITSFSDVPVSSFITQYSTGQVTVEMEWELKKENSKRWNPEIQYTNNYNDPQFVDFAPDSTGEYRTTRPIGTRYLTRPL

SEQ ID NO: 94 - DNA, 2175 bp, Adeno-associated virus 5
  source 1..2175: mol_type = genomic DNA
atgtcttttgttgatcaccctccagattggttggaagaagttggtgaaggtcttcgcgagtttttgggccttgaagcgggcccaccgaaaccaaaacccaatcagcagcatcaagatcaagcccgtggtcttgtgctgcctggttataactatctcggacccggaaacggtctcgatcgaggagagcctgtcaacagggcagacgaggtcgcgcgagagcacgacatctcgtacaacgagcagcttgaggcgggagacaacccctacctcaagtacaaccacgcggacgccgagtttcaggagaagctcgccgacgacacatccttcgggggaaacctcggaaaggcagtctttcaggccaagaaaagggttctcgaaccttttggcctggttgaagagggtgctaagacggcccctaccggaaagcggatagacgaccactttccaaaaagaaagaaggctcggaccgaagaggactccaagccttccacctcgtcagacgccgaagctggacccagcggatcccagcagctgcaaatcccagcccaaccagcctcaagtttgggagctgatacaatgtctgcgggaggtggcggcccattgggcgacaataaccaaggtgccgatggagtgggcaatgcctcgggagattggcattgcgattccacgtggatgggggacagagtcgtcaccaagtccacccgaacctgggtgctgcccagctacaacaaccaccagtaccgagagatcaaaagcggctccgtcgacggaagcaacgccaacgcctactttggatacagcaccccctgggggtactttgactttaaccgcttccacagccactggagcccccgagactggcaaagactcatcaacaactactggggcttcagaccccggtccctcagagtcaaaatcttcaacattcaagtcaaagaggtcacggtgcaggactccaccaccaccatcgccaacaacctcacctccaccgtccaagtgtttacggacgacgactaccagctgccctacgtcgtcggcaacgggaccgagggatgcctgccggccttccctccgcaggtctttacgctgccgcagtacggttacgcgacgctgaaccgcgacaacacagaaaatcccaccgagaggagcagcttcttctgcctagagtactttcccagcaagatgctgagaacgggcaacaactttgagtttacctacaactttgaggaggtgcccttccactccagcttcgctcccagtcagaacctgttcaagctggccaacccgctggtggaccagtacttgtaccgcttcgtgagcacaaataacactggcggagtccagttcaacaagaacctggccgggagatacgccaacacctacaaaaactggttcccggggcccatgggccgaacccagggctggaacctgggctccggggtcaaccgcgccagtgtcagcgccttcgccacgaccaataggatggagctcgagggcgcgagttaccaggtgcccccgcagccgaacggcatgaccaacaacctccagggcagcaacacctatgccctggagaacactatgatcttcaacagccagccggcgaacccgggcaccaccgccacgtacctcgagggcaacatgctcatcaccagcgagagcgagacgcagccggtgaaccgcgtggcgtacaacgtcggcgggcagatggccaccaacaaccagagctccaccactgcccccgcgaccggcacgtacaacctccaggaaatcgtgcccggcagcgtgtggatggagagggacgtgtacctccaaggacccatctgggccaagatcccagagacgggggcgcactttcacccctctccggccatgggcggattcggactcaaacacccaccgcccatgatgctcatcaagaacacgcctgtgcccggaaatatcaccagcttctcggacgtgcccgtcagcagcttcatcacccagtacagcaccgggcaggtcaccgtggagatggagtgggagctcaagaaggaaaactccaagaggtggaacccagagatccagtacacaaacaactacaacgacccccagtttgtggactttgccccggacagcaccggggaatacagaaccaccagacctatcggaacccgataccttacccgacccctttaa

SEQ ID NO: 95 - DNA, 2208 bp, Adeno-associated virus
  source 1..2208: mol_type = genomic DNA
atggctgccgatggttatcttccagattggctcgaggacaacctctctgagggcattcgcgagtggtgggacttgaaacctggagccccgaaacccaaagccaaccagcaaaagcaggacgacggccggggtctggtgcttcctggctacaagtacctcggacccttcaacggactcgacaagggggagcccgtcaacgcggcggatgcagcggccctcgagcacgacaaggcctacgaccagcagctcaaagcgggtgacaatccgtacctgcggtataaccacgccgacgccgagtttcaggagcgtctgcaagaagatacgtcttttgggggcaacctcgggcgagcagtcttccaggccaagaagagggttctcgaaccttttggtctggttgaggaaggtgctaagacggctcctggaaagaaacgtccggtagagcagtcgccacaagagccagactcctcctcgggcattggcaagacaggccagcagcccgctaaaaagagactcaattttggtcagactggcgactcagagtcagtccccgacccacaacctctcggagaacctccagcaacccccgctgctgtgggacctactacaatggcttcaggcggtggcgcaccaatggcagacaataacgaaggcgccgacggagtgggtaatgcctcaggaaattggcattgcgattccacatggctgggcgacagagtcatcaccaccagcacccgaacatgggccttgcccacctataacaaccacctctacaagcaaatctccagtgcttcaacgggggccagcaacgacaaccactacttcggctacagcaccccctgggggtattttgatttcaacagattccactgccatttctcaccacgtgactggcagcgactcatcaacaacaattggggattccggcccaagagactcaacttcaagctcttcaacatccaagtcaaggaggtcacgacgaatgatggcgtcacgaccatcgctaataaccttaccagcacggttcaagtcttctcggactcggagtaccagttgccgtacgtcctcggctctgcgcaccagggctgcctccctccgttcccggcggacgtgttcatgattccgcagtacggctacctaacgctcaacaatggcagccaggcagtgggacggtcatccttttactgcctggaatatttcccatcgcagatgctgagaacgggcaataactttaccttcagctacaccttcgaggacgtgcctttccacagcagctacgcgcacagccagagcctggaccggctgatgaatcctctcatcgaccagtacctgtattacctgaacagaactcagaatcagtccggaagtgcccaaaacaaggacttgctgtttagccgggggtctccagctggcatgtctgttcagcccaaaaactggctacctggaccctgttaccggcagcagcgcgtttctaaaacaaaaacagacaacaacaacagcaactttacctggactggtgcttcaaaatataaccttaatgggcgtgaatctataatcaaccctggcactgctatggcctcacacaaagacgacaaagacaagttctttcccatgagcggtgtcatgatttttggaaaggagagcgccggagcttcaaacactgcattggacaatgtcatgatcacagacgaagaggaaatcaaagccactaaccccgtggccaccgaaagatttgggactgtggcagtcaatctccagagcagcagcacagaccctgcgaccggagatgtgcatgttatgggagccttacctggaatggtgtggcaagacagagacgtatacctgcagggtcctatttgggccaaaattcctcacacggatggacactttcacccgtctcctctcatgggcggctttggacttaagcacccgcctcctcagatcctcatcaaaaacacgcctgttcctgcgaatcctccggcagagttttcggctacaaagtttgcttcattcatcacccagtattccacaggacaagtgagcgtggagattgaatgggagctgcagaaagaaaacagcaaacgctggaatcccgaagtgcagtatacatctaactatgcaaaatctgccaacgttgatttcactgtggacaacaatggactttatactgagcctcgccccattggcacccgttacctcacccgtcccctg

SEQ ID NO: 96 - protein, 736 aa, Adeno-associated virus 6
MAADGYLPDWLEDNLSEGIREWWDLKPGAPKPKANQQKQDDGRGLVLPGYKYLGPFNGLDKGEPVNAADAAALEHDKAYDQQLKAGDNPYLRYNHADAEFQERLQEDTSFGGNLGRAVFQAKKRVLEPFGLVEEGAKTAPGKKRPVEQSPQEPDSSSGIGKTGQQPAKKRLNFGQTGDSESVPDPQPLGEPPATPAAVGPTTMASGGGAPMADNNEGADGVGNASGNWHCDSTWLGDRVITTSTRTWALPTYNNHLYKQISSASTGASNDNHYFGYSTPWGYFDFNRFHCHFSPRDWQRLINNNWGFRPKRLNFKLFNIQVKEVTTNDGVTTIANNLTSTVQVFSDSEYQLPYVLGSAHQGCLPPFPADVFMIPQYGYLTLNNGSQAVGRSSFYCLEYFPSQMLRTGNNFTFSYTFEDVPFHSSYAHSQSLDRLMNPLIDQYLYYLNRTQNQSGSAQNKDLLFSRGSPAGMSVQPKNWLPGPCYRQQRVSKTKTDNNNSNFTWTGASKYNLNGRESIINPGTAMASHKDDKDKFFPMSGVMIFGKESAGASNTALDNVMITDEEEIKATNPVATERFGTVAVNLQSSSTDPATGDVHVMGALPGMVWQDRDVYLQGPIWAKIPHTDGHFHPSPLMGGFGLKHPPPQILIKNTPVPANPPAEFSATKFASFITQYSTGQVSVEIEWELQKENSKRWNPEVQYTSNYAKSANVDFTVDNNGLYTEPRPIGTRYLTRPL

SEQ ID NO: 97 - protein, 623 aa, Adeno-associated virus 6
MPGFYEIVIKVPSDLDEHLPGISDSFVNWVAEKEWELPPDSDMDLNLIEQAPLTVAEKLQRDFLVQWRRVSKAPEALFFVQFEKGESYFHLHILVETTGVKSMVLGRFLSQIRDKLVQTIYRGIEPTLPNWFAVTKTRNGAGGGNKVVDECYIPNYLLPKTQPELQWAWTNMEEYISACLNLAERKRLVAHDLTHVSQTQEQNKENLNPNSDAPVIRSKTSARYMELVGWLVDRGITSEKQWIQEDQASYISFNAASNSRSQIKAALDNAGKIMALTKSAPDYLVGPAPPADIKTNRIYRILELNGYDPAYAGSVFLGWAQKRFGKRNTIWLFGPATTGKTNIAEAIAHAVPFYGCVNWTNENFPFNDCVDKMVIWWEEGKMTAKVVESAKAILGGSKVRVDQKCKSSAQIDPTPVIVTSNTNMCAVIDGNSTTFEHQQPLQDRMFKFELTRRLEHDFGKVTKQEVKEFFRWAQDHVTEVAHEFYVRKGGANKRPAPDDADKSEPKRACPSVADPSTSDAEGAPVDFADRYQNKCSRHAGMLQMLFPCKTCERMNQNFNICFTHGTRDCSECFPGVSESQPVVRKRTYRKLCAIHHLLGRAPEIACSACDLVNVDLDDCVSEQ

SEQ ID NO: 98 - DNA, 4683 bp, Adeno-associated virus 6
  source 1..4683: mol_type = genomic DNA
ttggccactccctctctgcgcgctcgctcgctcactgaggccgggcgaccaaaggtcgcccgacgcccgggctttgcccgggcggcctcagtgagcgagcgagcgcgcagagagggagtggccaactccatcactaggggttcctggaggggtggagtcgtgacgtgaattacgtcatagggttagggaggtcctgtattagaggtcacgtgagtgttttgcgacattttgcgacaccatgtggtcacgctgggtatttaagcccgagtgagcacgcagggtctccattttgaagcgggaggtttgaacgcgcagcgccatgccggggttttacgagattgtgattaaggtccccagcgaccttgacgagcatctgcccggcatttctgacagctttgtgaactgggtggccgagaaggaatgggagttgccgccagattctgacatggatctgaatctgattgagcaggcacccctgaccgtggccgagaagctgcagcgcgacttcctggtccagtggcgccgcgtgagtaaggccccggaggccctcttctttgttcagttcgagaagggcgagtcctacttccacctccatattctggtggagaccacgggggtcaaatccatggtgctgggccgcttcctgagtcagattagggacaagctggtgcagaccatctaccgcgggatcgagccgaccctgcccaactggttcgcggtgaccaagacgcgtaatggcgccggaggggggaacaaggtggtggacgagtgctacatccccaactacctcctgcccaagactcagcccgagctgcagtgggcgtggactaacatggaggagtatataagcgcgtgtttaaacctggccgagcgcaaacggctcgtggcgcacgacctgacccacgtcagccagacccaggagcagaacaaggagaatctgaaccccaattctgacgcgcctgtcatccggtcaaaaacctccgcacgctacatggagctggtcgggtggctggtggaccggggcatcacctccgagaagcagtggatccaggaggaccaggcctcgtacatctccttcaacgccgcctccaactcgcggtcccagatcaaggccgctctggacaatgccggcaagatcatggcgctgaccaaatccgcgcccgactacctggtaggccccgctccgcccgccgacattaaaaccaaccgcatttaccgcatcctggagctgaacggctacgaccctgcctacgccggctccgtctttctcggctgggcccagaaaaggttcggaaaacgcaacaccatctggctgtttgggccggccaccacgggcaagaccaacatcgcggaagccatcgcccacgccgtgcccttctacggctgcgtcaactggaccaatgagaactttcccttcaacgattgcgtcgacaagatggtgatctggtgggaggagggcaagatgacggccaaggtcgtggagtccgccaaggccattctcggcggcagcaaggtgcgcgtggaccaaaagtgcaagtcgtccgcccagatcgatcccacccccgtgatcgtcacctccaacaccaacatgtgcgccgtgattgacgggaacagcaccaccttcgagcaccagcagccgttgcaggaccggatgttcaaatttgaactcacccgccgtctggagcatgactttggcaaggtgacaaagcaggaagtcaaagagttcttccgctgggcgcaggatcacgtgaccgaggtggcgcatgagttctacgtcagaaagggtggagccaacaagagacccgcccccgatgacgcggataaaagcgagcccaagcgggcctgcccctcagtcgcggatccatcgacgtcagacgcggaaggagctccggtggactttgccgacaggtaccaaaacaaatgttctcgtcacgcgggcatgcttcagatgctgtttccctgcaaaacatgcgagagaatgaatcagaatttcaacatttgcttcacgcacgggaccagagactgttcagaatgtttccccggcgtgtcagaatctcaaccggtcgtcagaaagaggacgtatcggaaactctgtgccattcatcatctgctggggcgggctcccgagattgcttgctcggcctgcgatctggtcaacgtggatctggatgactgtgtttctgagcaataaatgacttaaaccaggtatggctgccgatggttatcttccagattggctcgaggacaacctctctgagggcattcgcgagtggtgggacttgaaacctggagccccgaaacccaaagccaaccagcaaaagcaggacgacggccggggtctggtgcttcctggctacaagtacctcggacccttcaacggactcgacaagggggagcccgtcaacgcggcggatgcagcggccctcgagcacgacaaggcctacgaccagcagctcaaagcgggtgacaatccgtacctgcggtataaccacgccgacgccgagtttcaggagcgtctgcaagaagatacgtcttttgggggcaacctcgggcgagcagtcttccaggccaagaagagggttctcgaaccttttggtctggttgaggaaggtgctaagacggctcctggaaagaaacgtccggtagagcagtcgccacaagagccagactcctcctcgggcattggcaagacaggccagcagcccgctaaaaagagactcaattttggtcagactggcgactcagagtcagtccccgacccacaacctctcggagaacctccagcaacccccgctgctgtgggacctactacaatggcttcaggcggtggcgcaccaatggcagacaataacgaaggcgccgacggagtgggtaatgcctcaggaaattggcattgcgattccacatggctgggcgacagagtcatcaccaccagcacccgaacatgggccttgcccacctataacaaccacctctacaagcaaatctccagtgcttcaacgggggccagcaacgacaaccactacttcggctacagcaccccctgggggtattttgatttcaacagattccactgccatttctcaccacgtgactggcagcgactcatcaacaacaattggggattccggcccaagagactcaacttcaagctcttcaacatccaagtcaaggaggtcacgacgaatgatggcgtcacgaccatcgctaataaccttaccagcacggttcaagtcttctcggactcggagtaccagttgccgtacgtcctcggctctgcgcaccagggctgcctccctccgttcccggcggacgtgttcatgattccgcagtacggctacctaacgctcaacaatggcagccaggcagtgggacggtcatccttttactgcctggaatatttcccatcgcagatgctgagaacgggcaataactttaccttcagctacaccttcgaggacgtgcctttccacagcagctacgcgcacagccagagcctggaccggctgatgaatcctctcatcgaccagtacctgtattacctgaacagaactcagaatcagtccggaagtgcccaaaacaaggacttgctgtttagccgggggtctccagctggcatgtctgttcagcccaaaaactggctacctggaccctgttaccggcagcagcgcgtttctaaaacaaaaacagacaacaacaacagcaactttacctggactggtgcttcaaaatataaccttaatgggcgtgaatctataatcaaccctggcactgctatggcctcacacaaagacgacaaagacaagttctttcccatgagcggtgtcatgatttttggaaaggagagcgccggagcttcaaacactgcattggacaatgtcatgatcacagacgaagaggaaatcaaagccactaaccccgtggccaccgaaagatttgggactgtggcagtcaatctccagagcagcagcacagaccctgcgaccggagatgtgcatgttatgggagccttacctggaatggtgtggcaagacagagacgtatacctgcagggtcctatttgggccaaaattcctcacacggatggacactttcacccgtctcctctcatgggcggctttggacttaagcacccgcctcctcagatcctcatcaaaaacacgcctgttcctgcgaatcctccggcagagttttcggctacaaagtttgcttcattcatcacccagtattccacaggacaagtgagcgtggagattgaatgggagctgcagaaagaaaacagcaaacgctggaatcccgaagtgcagtatacatctaactatgcaaaatctgccaacgttgatttcactgtggacaacaatggactttatactgagcctcgccccattggcacccgttacctcacccgtcccctgtaattgtgtgttaatcaataaaccggttaattcgtgtcagttgaactttggtctcatgtcgttattatcttatctggtcaccatagcaaccggttacacattaactgcttagttgcgcttcgcgaatacccctagtgatggagttgcccactccctctatgcgcgctcgctcgctcggtggggccggcagagcagagctctgccgtctgcggacctttggtccgcaggccccaccgagcgagcgagcgcgcatagagggagtgggcaa

SEQ ID NO: 99 - DNA, 2211 bp, Adeno-associated virus
  source 1..2211: mol_type = genomic DNA
atggctgccgatggttatcttccagattggctcgaggacaacctctctgagggcattcgcgagtggtgggacttgaaacctggagccccgaaacccaaagccaaccagcaaaagcaggacgacggccggggtctggtgcttcctggctacaagtacctcggacccttcaacggactcgacaagggggagcccgtcaacgcggcggatgcagcggccctcgagcacgacaaggcctacgaccagcagctcaaagcgggtgacaatccgtacctgcggtataaccacgccgacgccgagtttcaggagcgtctgcaagaagatacgtcttttgggggcaacctcgggcgagcagtcttccaggccaagaagagggttctcgaaccttttggtctggttgaggaaggtgctaagacggctcctggaaagaaacgtccggtagagcagtcgccacaagagccagactcctcctcgggcattggcaagacaggccagcagcccgctaaaaagagactcaattttggtcagactggcgactcagagtcagtccccgacccacaacctctcggagaacctccagcaacccccgctgctgtgggacctactacaatggcttcaggcggtggcgcaccaatggcagacaataacgaaggcgccgacggagtgggtaatgcctcaggaaattggcattgcgattccacatggctgggcgacagagtcatcaccaccagcacccgaacatgggccttgcccacctataacaaccacctctacaagcaaatctccagtgcttcaacgggggccagcaacgacaaccactacttcggctacagcaccccctgggggtattttgatttcaacagattccactgccatttctcaccacgtgactggcagcgactcatcaacaacaattggggattccggcccaagagactcaacttcaagctcttcaacatccaagtcaaggaggtcacgacgaatgatggcgtcacgaccatcgctaataaccttaccagcacggttcaagtcttctcggactcggagtaccagttgccgtacgtcctcggctctgcgcaccagggctgcctccctccgttcccggcggacgtgttcatgattccgcagtacggctacctaacgctcaacaatggcagccaggcagtgggacggtcatccttttactgcctggaatatttcccatcgcagatgctgagaacgggcaataactttaccttcagctacaccttcgaggacgtgcctttccacagcagctacgcgcacagccagagcctggaccggctgatgaatcctctcatcgaccagtacctgtattacctgaacagaactcagaatcagtccggaagtgcccaaaacaaggacttgctgtttagccgggggtctccagctggcatgtctgttcagcccaaaaactggctacctggaccctgttaccggcagcagcgcgtttctaaaacaaaaacagacaacaacaacagcaactttacctggactggtgcttcaaaatataaccttaatgggcgtgaatctataatcaaccctggcactgctatggcctcacacaaagacgacaaagacaagttctttcccatgagcggtgtcatgatttttggaaaggagagcgccggagcttcaaacactgcattggacaatgtcatgatcacagacgaagaggaaatcaaagccactaaccccgtggccaccgaaagatttgggactgtggcagtcaatctccagagcagcagcacagaccctgcgaccggagatgtgcatgttatgggagccttacctggaatggtgtggcaagacagagacgtatacctgcagggtcctatttgggccaaaattcctcacacggatggacactttcacccgtctcctctcatgggcggctttggacttaagcacccgcctcctcagatcctcatcaaaaacacgcctgttcctgcgaatcctccggcagagttttcggctacaaagtttgcttcattcatcacccagtattccacaggacaagtgagcgtggagattgaatgggagctgcagaaagaaaacagcaaacgctggaatcccgaagtgcagtatacatctaactatgcaaaatctgccaacgttgatttcactgtggacaacaatggactttatactgagcctcgccccattggcacccgttacctcacccgtcccctgtaa

SEQ ID NO: 100 - protein, 736 aa, Adeno-associated virus; identical to SEQ ID NO: 96

SEQ ID NO: 101 - protein, 736 aa, Adeno-associated virus
MAADGYLPDWLEDNLSEGIREWWDLKPGAPKPKANQQKQDDGRGLVLPGYKYLGPFNGLDKGEPVNAADAAALEHDKAYDQQLKAGDNPYLRYNHADAEFQERLQEDTSFGGNLGRAVFQAKKRVLEPFGLVEEGAKTAPGKKRPVEQSPQEPDSSSGIGKTGQQPAKKRLNFGQTGDSESVPDPQPLGEPPATPAAVGPTTMASGGGAPMADNNEGADGVGNASGNWHCDSTWLGDRVITTSTRTWALPTYNNHLYKQISSASTGASNDNHYFGYSTPWGYFDFNRFHCHFSPRDWQRLINNNWGFRPKRLNFKLFNIQVKEVTTNDGVTTIANNLTSTVQVFSDSEYQLPYVLGSAHQGCLPPFPADVFMIPQYGYLTLNNGSQAVGRSSFYCLEYFPSQMLRTGNNFTFSYTFEDVPFHSSYAHSQSLDRLMNPLIDQYLYYLNRTQNQSGSAQNKDLLFSRGSPAGMSVQPKNWLPGPCYRQQRVSKTKTDNNNSNFTWTGASKYNLNGRESIINPGTAMASHKDDEDKFFPMSGVMIFGKESAGASNTALDNVMITDEEEIKATNPVATERFGTVAVNLQSSSTDPATGDVHVMGALPGMVWQDRDVYLQGPIWAKIPHTDGHFHPSPLMGGFGLKHPPPQILIKNTPVPANPPAEFSATKFASFITQYSTGQVSVEIEWELQKENSKRWNPEVQYTSNYAKSANVDFTVDNNGLYTEPRPIGTRYLTRPL

SEQ ID NO: 102 - protein, 736 aa, Adeno-associated virus
MAADGYLPDWLEDNLSEGIREWWDLKPGAPKPKANQQKQDDGRGLVLPGYKYLGPFNGLDKGEPVNAADAAALEHDKAYDQQLKAGDNPYLRYNHADAEFQERLQEDTSFGGNLGRAVFQAKKRVLEPLGLVEEGAKTAPGKKRPVEQSPQEPDSSSGIGKTGQQPAKKRLNFGQTGDSESVPDPQPLGEPPATPAAVGPTTMASGGGAPMADNNEGADGVGNASGNWHCDSTWLGDRVITTSTRTWALPTYNNHLYKQISSASTGASNDNHYFGYSTPWGYFDFNRFHCHFSPRDWQRLINNNWGFRPKRLNFKLFNIQVKEVTTNDGVTTIANNLTSTVQVFSDSEYQLPYVLGSAHQGCLPPFPADVFMIPQYGYLTLNNGSQAVGRSSFYCLEYFPSQMLRTGNNFTFSYTFEDVPFHSSYAHSQSLDRLMNPLIDQYLYYLNRTQNQSGSAQNKDLLFSRGSPAGMSVQPKNWLPGPCYRQQRVSKTKTDNNNSNFTWTGASKYNLNGRESIINPGTAMASHKDDEDKFFPMSGVMIFGKESAGASNTALDNVMITDEEEIKATNPVATERFGTVAVNLQSSSTDPATGDVHVMGALPGMVWQDRDVYLQGPIWAKIPHTDGHFHPSPLMGGFGLKHPPPQILIKNTPVPANPPAEFSATKFASFITQYSTGQVSVEIEWELQKENSKRWNPEVQYTSNYAKSANVDFTVDNNGLYTEPRPIGTRYLTRPL

SEQ ID NO: 103 - protein, 736 aa, Adeno-associated virus
MAADGYLPDWLEDNLSEGIREWWDLKPGAPKPKANQQKQDDGRGLVLPGYKYLGPFNGLDKGEPVNAADAAALEHDKAYDQQLKAGDNPYLRYNHADAEFQERLQEDTSFGGNLGRAVFQAKKRVLEPLGLVEEGAKTAPGKKRPVEQSPQEPDSSSGIGKTGQQPAKKRLNFGQTGDSESVPDPQPLGEPPATPAAVGPTTMASGGGAPMADNNEGADGVGNASGNWHCDSTWLGDRVITTSTRTWALPTYNNHLYKQISSASTGASNDNHYFGYSTPWGYFDFNRFHCHFSPRDWQRLINNNWGFRPKRLNFKLFNIQVKEVTTNDGVTTIANNLTSTVQVFSDSEYQLPYVLGSAHQGCLPPFPADVFMIPQYGYLTLNNGSQAVGRSSFYCLEYFPSQMLRTGNNFTFSYTFEDVPFHSSYAHSQSLDRLMNPLIDQYLYYLNRTQNQSGSAQNKDLLFSRGSPAGMSVQPKNWLPGPCYRQQRVSKTKTDNNNSNFTWTGASKYNLNGRESIINPGTAMASHKDDKDKFFPMSGVMIFGKESAGASNTALDNVMITDEEEIKATNPVATERFGTVAVNLQSSSTDPATGDVHVMGALPGMVWQDRDVYLQGPIWAKIPHTDGHFHPSPLMGGFGLKHPPPQILIKNTPVPANPPAEFSATKFASFITQYSTGQVSVEIEWELQKENSKRWNPEVQYTSNYAKSANVDFTVDNNGLYTEPRPIGTRYLTRPL

SEQ ID NO: 104 - DNA, 2214 bp, Adeno-associated virus
  source 1..2214: mol_type = genomic DNA
atggctgccgatggttatcttccagattggctcgaggacaacctctctgagggcattcgcgagtggtgggacctgaaacctggagccccgaaacccaaagccaaccagcaaaagcaggacaacggccggggtctggtgcttcctggctacaagtacctcggacccttcaacggactcgacaagggggagcccgtcaacgcggcggacgcagcggccctcgagcacgacaaggcctacgaccagcagctcaaagcgggtgacaatccgtacctgcggtataaccacgccgacgccgagtttcaggagcgtctgcaagaagatacgtcatttgggggcaacctcgggcgagcagtcttccaggccaagaagcgggttctcgaacctctcggtctggttgaggaaggcgctaagacggctcctgcaaagaagagaccggtagagccgtcacctcagcgttcccccgactcctccacgggcatcggcaagaaaggccagcagcccgccagaaagagactcaatttcggtcagactggcgactcagagtcagtccccgaccctcaacctctcggagaacctccagcagcgccctctagtgtgggatctggtacagtggctgcaggcggtggcgcaccaatggcagacaataacgaaggtgccgacggagtgggtaatgcctcaggaaattggcattgcgattccacatggctgggcgacagagtcattaccaccagcacccgaacctgggccctgcccacctacaacaaccacctctacaagcaaatctccagtgaaactgcaggtagtaccaacgacaacacctacttcggctacagcaccccctgggggtattttgactttaacagattccactgccacttctcaccacgtgactggcagcgactcatcaacaacaactggggattccggcccaagaagctgcggttcaagctcttcaacatccaggtcaaggaggtcacgacgaatgacggcgttacgaccatcgctaataaccttaccagcacgattcaggtattctcggactcggaataccagctgccgtacgtcctcggctctgcgcaccagggctgcctgcctccgttcccggcggacgtcttcatgattcctcagtacggctacctgactctcaacaatggcagtcagtctgtgggacgttcctccttctactgcctggagtacttcccctctcagatgctgagaacgggcaacaactttgagttcagctacagcttcgaggacgtgcctttccacagcagctacgcacacagccagagcctggaccggctgatgaatcccctcatcgaccagtacttgtactacctggccagaacacagagtaacccaggaggcacagctggcaatcgggaactgcagttttaccagggcgggccttcaactatggccgaacaagccaagaattggttacctggaccttgcttccggcaacaaagagtctccaaaacgctggatcaaaacaacaacagcaactttgcttggactggtgccaccaaatatcacctgaacggcagaaactcgttggttaatcccggcgtcgccatggcaactcacaaggacgacgaggaccgctttttcccatccagcggagtcctgatttttggaaaaactggagcaactaacaaaactacattggaaaatgtgttaatgacaaatgaagaagaaattcgtcctactaatcctgtagccacggaagaatacgggatagtcagcagcaacttacaagcggctaatactgcagcccagacacaagttgtcaacaaccagggagccttacctggcatggtctggcagaaccgggacgtgtacctgcagggtcccatctgggccaagattcctcacacggatggcaactttcacccgtctcctttgatgggcggctttggacttaaacatccgcctcctcagatcctgatcaagaacactcccgttcccgctaatcctccggaggtgtttactcctgccaagtttgcttcgttcatcacacagtacagcaccggacaagtcagcgtggaaatcgagtgggagctgcagaaggaaaacagcaagcgctggaacccggagattcagtacacctccaactttgaaaagcagactggtgtggactttgccgttgacagccagggtgtttactctgagcctcgccctattggcactcgttacctcacccgtaatctgtaa

SEQ ID NO: 105 - protein, 738 aa, Adeno-associated virus
MAADGYLPDWLEDNLSEGIREWWALKPGAPKPKANQQKQDDGRGLVLPGYKYLGPFNGLDKGEPVNAADAAALEHDKAYDQQLQAGDNPYLRYNHADAEFQERLQEDTSFGGNLGRAVFQAKKRVLEPLGLVEEGAKTAPGKKRPVEPSPQRSPDSSTGIGKKGQQPARKRLNFGQTGDSESVPDPQPLGEPPAAPSGVGPNTMAAGGGAPMADNNEGADGVGSSSGNWHCDSTWLGDRVITTSTRTWALPTYNNHLYKQISNGTSGGATNDNTYFGYSTPWGYFDFNRFHCHFSPRDWQRLINNNWGFRPKRLSFKLFNIQVKEVTQNEGTKTIANNLTSTIQVFTDSEYQLPYVLGSAHQGCLPPFPADVFMIPQYGYLTLNNGSQAVGRSSFYCLEYFPSQMLRTGNNFQFTYTFEDVPFHSSYAHSQSLDRLMNPLIDQYLYYLSRTQTTGGTANTQTLGFSQGGPNTMANQAKNWLPGPCYRQQRVSTTTGQNNNSNFAWTAGTKYHLNGRNSLANPGIAMATHKDDEERFFPSNGILIFGKQNAARDNADYSDVMLTSEEEIKTTNPVATEEYGIVADNLQQQNTAPQIGTVNSQGALPGMVWQNRDVYLQGPIWAKIPHTDGNFHPSPLMGGFGLKHPPPQILIKNTPVPADPPTTFNQSKLNSFITQYSTGQVSVEIEWELQKENSKRWNPEIQYTSNYYKSTSVDFAVNTEGVYSEPRPIGTRYLTRNL

SEQ ID NO: 106 - protein, 737 aa, Adeno-associated virus 7
MAADGYLPDWLEDNLSEGIREWWDLKPGAPKPKANQQKQDNGRGLVLPGYKYLGPFNGLDKGEPVNAADAAALEHDKAYDQQLKAGDNPYLRYNHADAEFQERLQEDTSFGGNLGRAVFQAKKRVLEPLGLVEEGAKTAPAKKRPVEPSPQRSPDSSTGIGKKGQQPARKRLNFGQTGDSESVPDPQPLGEPPAAPSSVGSGTVAAGGGAPMADNNEGADGVGNASGNWHCDSTWLGDRVITTSTRTWALPTYNNHLYKQISSETAGSTNDNTYFGYSTPWGYFDFNRFHCHFSPRDWQRLINNNWGFRPKKLRFKLFNIQVKEVTTNDGVTTIANNLTSTIQVFSDSEYQLPYVLGSAHQGCLPPFPADVFMIPQYGYLTLNNGSQSVGRSSFYCLEYFPSQMLRTGNNFEFSYSFEDVPFHSSYAHSQSLDRLMNPLIDQYLYYLARTQSNPGGTAGNRELQFYQGGPSTMAEQAKNWLPGPCFRQQRVSKTLDQNNNSNFAWTGATKYHLNGRNSLVNPGVAMATHKDDEDRFFPSSGVLIFGKTGATNKTTLENVLMTNEEEIRPTNPVATEEYGIVSSNLQAANTAAQTQVVNNQGALPGMVWQNRDVYLQGPIWAKIPHTDGNFHPSPLMGGFGLKHPPPQILIKNTPVPANPPEVFTPAKFASFITQYSTGQVSVEIEWELQKENSKRWNPEIQYTSNFEKQTGVDFAVDSQGVYSEPRPIGTRYLTRNL

SEQ ID NO: 107 - protein, 623 aa, synthetic construct
  REGION 1..623: note = Description of Artificial Sequence: Synthetic polypeptide
MPGFYEIVIKVPSDLDEHLPGISDSFVNWVAEKEWELPPDSDMDLNLIEQAPLTVAEKLQRDFLVQWRRVSKAPEALFFVQFEKGESYFHLHVLVETTGVKSMVLGRFLSQIREKLVQTIYRGVEPTLPNWFAVTKTRNGAGGGNKVVDECYIPNYLLPKTQPELQWAWTNMEEYISACLNLAERKRLVAQHLTHVSQTQEQNKENLNPNSDAPVIRSKTSARYMELVGWLVDRGITSEKQWIQEDQASYISFNAASNSRSQIKAALDNAGKIMALTKSAPDYLVGPSLPADIKTNRIYRILELNGYDPAYAGSVFLGWAQKKFGKRNTIWLFGPATTGKTNIAEAIAHAVPFYGCVNWTNENFPFNDCVDKMVIWWEEGKMTAKVVESAKAILGGSKVRVDQKCKSSAQIDPTPVIVTSNTNMCAVIDGNSTTFEHQQPLQDRMFKFELTRRLEHDFGKVTKQEVKEFFRWASDHVTEVAHEFYVRKGGASKRPAPDDADISEPKRACPSVADPSTSDAEGAPVDFADRYQNKCSRHAGMIQMLFPCKTCERMNQNFNICFTHGVRDCLECFPGVSESQPVVRKKTYRKLCAIHHLLGRAPEIACSACDLVNVDLDDCVSEQ

SEQ ID NO: 108 - DNA, 4721 bp, Adeno-associated virus 7
  source 1..4721: mol_type = genomic DNA
ttggccactccctctatgcgcgctcgctcgctcggtggggcctgcggaccaaaggtccgcagacggcagagctctgctctgccggccccaccgagcgagcgagcgcgcatagagggagtggccaactccatcactaggggtaccgcgaagcgcctcccacgctgccgcgtcagcgctgacgtaaatcacgtcataggggagtggtcctgtattagctgtcacgtgagtgcttttgcgacattttgcgacaccacgtggccatttgaggtatatatggccgagtgagcgagcaggatctccattttgaccgcgaaatttgaacgagcagcagccatgccgggtttctacgagatcgtgatcaaggtgccgagcgacctggacgagcacctgccgggcatttctgactcgtttgtgaactgggtggccgagaaggaatgggagctgcccccggattctgacatggatctgaatctgatcgagcaggcacccctgaccgtggccgagaagctgcagcgcgacttcctggtccaatggcgccgcgtgagtaaggccccggaggccctgttctttgttcagttcgagaagggcgagagctacttccaccttcacgttctggtggagaccacgggggtcaagtccatggtgctaggccgcttcctgagtcagattcgggagaagctggtccagaccatctaccgcggggtcgagcccacgctgcccaactggttcgcggtgaccaagacgcgtaatggcgccggcggggggaacaaggtggtggacgagtgctacatccccaactacctcctgcccaagacccagcccgagctgcagtgggcgtggactaacatggaggagtatataagcgcgtgtttgaacctggccgaacgcaaacggctcgtggcgcagcacctgacccacgtcagccagacgcaggagcagaacaaggagaatctgaaccccaattctgacgcgcccgtgatcaggtcaaaaacctccgcgcgctacatggagctggtcgggtggctggtggaccggggcatcacctccgagaagcagtggatccaggaggaccaggcctcgtacatctccttcaacgccgcctccaactcgcggtcccagatcaaggccgcgctggacaatgccggcaagatcatggcgctgaccaaatccgcgcccgactacctggtggggccctcgctgcccgcggacattaaaaccaaccgcatctaccgcatcctggagctgaacgggtacgatcctgcctacgccggctccgtctttctcggctgggcccagaaaaagttcgggaagcgcaacaccatctggctgtttgggcccgccaccaccggcaagaccaacattgcggaagccatcgcccacgccgtgcccttctacggctgcgtcaactggaccaatgagaactttcccttcaacgattgcgtcgacaagatggtgatctggtgggaggagggcaagatgacggccaaggtcgtggagtccgccaaggccattctcggcggcagcaaggtgcgcgtggaccaaaagtgcaagtcgtccgcccagatcgaccccacccccgtgatcgtcacctccaacaccaacatgtgcgccgtgattgacgggaacagcaccaccttcgagcaccagcagccgttgcaggaccggatgttcaaatttgaactcacccgccgtctggagcacgactttggcaaggtgacgaagcaggaagtcaaagagttcttccgctgggccagtgatcacgtgaccgaggtggcgcatgagttctacgtcagaaagggcggagccagcaaaagacccgcccccgatgacgcggatataagcgagcccaagcgggcctgcccctcagtcgcggatccatcgacgtcagacgcggaaggagctccggtggactttgccgacaggtaccaaaacaaatgttctcgtcacgcgggcatgattcagatgctgtttccctgcaaaacgtgcgagagaatgaatcagaatttcaacatttgcttcacacacggggtcagagactgtttagagtgtttccccggcgtgtcagaatctcaaccggtcgtcagaaaaaagacgtatcggaaactctgcgcgattcatcatctgctggggcgggcgcccgagattgcttgctcggcctgcgacctggtcaacgtggacctggacgactgcgtttctgagcaataaatgacttaaaccaggtatggctgccgatggttatcttccagattggctcgaggacaacctctctgagggcattcgcgagtggtgggacctgaaacctggagccccgaaacccaaagccaaccagcaaaagcaggacaacggccggggtctggtgcttcctggctacaagtacctcggacccttcaacggactcgacaagggggagcccgtcaacgcggcggacgcagcggccctcgagcacgacaaggcctacgaccagcagctcaaagcgggtgacaatccgtacctgcggtataaccacgccgacgccgagtttcaggagcgtctgcaagaagatacgtcatttgggggcaacctcgggcgagcagtcttccaggccaagaagcgggttctcgaacctctcggtctggttgaggaaggcgctaagacggctcctgcaaagaagagaccggtagagccgtcacctcagcgttcccccgactcctccacgggcatcggcaagaaaggccagcagcccgccagaaagagactcaatttcggtcagactggcgactcagagtcagtccccgaccctcaacctctcggagaacctccagcagcgccctctagtgtgggatctggtacagtggctgcaggcggtggcgcaccaatggcagacaataacgaaggtgccgacggagtgggtaatgcctcaggaaattggcattgcgattccacatggctgggcgacagagtcattaccaccagcacccgaacctgggccctgcccacctacaacaaccacctctacaagcaaatctccagtgaaactgcaggtagtaccaacgacaacacctacttcggctacagcaccccctgggggtattttgactttaacagattccactgccacttctcaccacgtgactggcagcgactcatcaacaacaactggggattccggcccaagaagctgcggttcaagctcttcaacatccaggtcaaggaggtcacgacgaatgacggcgttacgaccatcgctaataaccttaccagcacgattcaggtattctcggactcggaataccagctgccgtacgtcctcggctctgcgcaccagggctgcctgcctccgttcccggcggacgtcttcatgattcctcagtacggctacctgactctcaacaatggcagtcagtctgtgggacgttcctccttctactgcctggagtacttcccctctcagatgctgagaacgggcaacaactttgagttcagctacagcttcgaggacgtgcctttccacagcagctacgcacacagccagagcctggaccggctgatgaatcccctcatcgaccagtacttgtactacctggccagaacacagagtaacccaggaggcacagctggcaatcgggaactgcagttttaccagggcgggccttcaactatggccgaacaagccaagaattggttacctggaccttgcttccggcaacaaagagtctccaaaacgctggatcaaaacaacaacagcaactttgcttggactggtgccaccaaatatcacctgaacggcagaaactcgttggttaatcccggcgtcgccatggcaactcacaaggacgacgaggaccgctttttcccatccagcggagtcctgatttttggaaaaactggagcaactaacaaaactacattggaaaatgtgttaatgacaaatgaagaagaaattcgtcctactaatcctgtagccacggaagaatacgggatagtcagcagcaacttacaagcggctaatactgcagcccagacacaagttgtcaacaaccagggagccttacctggcatggtctggcagaaccgggacgtgtacctgcagggtcccatctgggccaagattcctcacacggatggcaactttcacccgtctcctttgatgggcggctttggacttaaacatccgcctcctcagatcctgatcaagaacactcccgttcccgctaatcctccggaggtgtttactcctgccaagtttgcttcgttcatcacacagtacagcaccggacaagtcagcgtggaaatcgagtgggagctgcagaaggaaaacagcaagcgctggaacccggagattcagtacacctccaactttgaaaagcagactggtgtggactttgccgttgacagccagggtgtttactctgagcctcgccctattggcactcgttacctcacccgtaatctgtaattgcatgttaatcaataaaccggttgattcgtttcagttgaactttggtctcctgtgcttcttatcttatcggtttccatagcaactggttacacattaactgcttgggtgcgcttcacgataagaacactgacgtcaccgcggtacccctagtgatggagttggccactccctctatgcgcgctcgctcgctcggtggggcctgcggaccaaaggtccgcagacggcagagctctgctctgccggccccaccgagcgagcgagcgcgcatagagggagtggccaa

SEQ ID NO: 109 - DNA, 2214 bp, Adeno-associated virus; identical to SEQ ID NO: 104
  source 1..2214: mol_type = genomic DNA

SEQ ID NO: 110 - protein, 737 aa, Adeno-associated virus; identical to SEQ ID NO: 106

SEQ ID NO: 111 - DNA, 2217 bp, Adeno-associated virus
  source 1..2217: mol_type = genomic DNA
atggctgccgatggttatcttccagattggctcgaggacaacctctctgagggcattcgcgagtggtgggcgctgaaacctggagccccgaagcccaaagccaaccagcaaaagcaggacgacggccggggtctggtgcttcctggctacaagtacctcggacccttcaacggactcgacaagggggagcccgtcaacgcggcggacgcagcggccctcgagcacgacaaggcctacgaccagcagctgcaggcgggtgacaatccgtacctgcggtataaccacgccgacgccgagtttcaggagcgtctgcaagaagatacgtcttttgggggcaacctcgggcgagcagtcttccaggccaagaagcgggttctcgaacctctcggtctggttgaggaaggcgctaagacggctcctggaaagaagagaccggtagagccatcaccccagcgttctccagactcctctacgggcatcggcaagaaaggccaacagcccgccagaaaaagactcaattttggtcagactggcgactcagagtcagttccagaccctcaacctctcggagaacctccagcagcgccctctggtgtgggacctaatacaatggctgcaggcggtggcgcaccaatggcagacaataacgaaggcgccgacggagtgggtagttcctcgggaaattggcattgcgattccacatggctgggcgacagagtcatcaccaccagcacccgaacctgggccctgcccacctacaacaaccacctctacaagcaaatctccaacgggacatcgggaggagccaccaacgacaacacctacttcggctacagcaccccctgggggtattttgactttaacagattccactgccacttttcaccacgtgactggcagcgactcatcaacaacaactggggattccggcccaagagactcagcttcaagctcttcaacatccaggtcaaggaggtcacgcagaatgaaggcaccaagaccatcgccaataacctcaccagcaccatccaggtgtttacggactcggagtaccagctgccgtacgttctcggctctgcccaccagggctgcctgcctccgttcccggcggacgtgttcatgattccccagtacggctacctaacactcaacaacggtagtcaggccgtgggacgctcctccttctactgcctggaatactttccttcgcagatgctgagaaccggcaacaacttccagtttacttacaccttcgaggacgtgcctttccacagcagctacgcccacagccagagcttggaccggctgatgaatcctctgattgaccagtacctgtactacttgtctcggactcaaacaacaggaggcacggcaaatacgcagactctgggcttcagccaaggtgggcctaatacaatggccaatcaggcaaagaactggctgccaggaccctgttaccgccaacaacgcgtctcaacgacaaccgggcaaaacaacaatagcaactttgcctggactgctgggaccaaataccatctgaatggaagaaattcattggctaatcctggcatcgctatggcaacacacaaagacgacgaggagcgtttttttcccagtaacgggatcctgatttttggcaaacaaaatgctgccagagacaatgcggattacagcgatgtcatgctcaccagcgaggaagaaatcaaaaccactaaccctgtggctacagaggaatacggtatcgtggcagataacttgcagcagcaaaacacggctcctcaaattggaactgtcaacagccagggggccttacccggtatggtctggcagaaccgggacgtgtacctgcagggtcccatctgggccaagattcctcacacggacggcaacttccacccgtctccgctgatgggcggctttggcctgaaacatcctccgcctcagatcctgatcaagaacacgcctgtacctgcggatcctccgaccaccttcaaccagtcaaagctgaactctttcatcacgcaatacagcaccggacaggtcagcgtggaaattgaatgggagctgcagaaggaaaacagcaagcgctggaaccccgagatccagtacacctccaactactacaaatctacaagtgtggactttgctgttaatacagaaggcgtgtactctgaaccccgccccattggcacccgttacctcacccgtaatctgtaa

SEQ ID NO: 112 - DNA, 2213 bp, Adeno-associated virus 8
  source 1..2213: mol_type = genomic DNA
atggctgccgatggttatcttccagattggctcgaggacaacctctctgagggcattcgcgagtggtgggcgctgaaacctggagccccgaagcccaaagccaaccagcaaaagcaggacgacggccggggtctggtgcttcctggctacaagtacctcggacccttcaacggactcgacaagggggagcccgtcaacgcggcggacgcagcggccctcgagcacgacaaggcctacgaccagcagctgcaggcgggtgacaatccgtacctgcggtataaccacgccgacgccgagtttcaggagcgtctgcaagaagatacgtcttttgggggcaacctcgggcgagcagtcttccaggccaagaagcgggttctcgaacctctcggtctggttgaggaaggcgctaagacggctcctggaaagaagagaccggtagagccatcaccccagcgttctccagactcctctacgggcatcggcaagaaaggccaacagcccgccagaaaaagactcaattttggtcagactggcgactcagagtcagttccagaccctcaacctctcggagaacctccagcagcgccctctggtgtgggacctaatacaatggctgcaggcggtggcgcaccaatggcagacaataacgaaggcgccgacggagtgggtagttcctcgggaaattggcattgcgattccacatggctgggcgacagagtcatcaccaccagcacccgaacctgggccctgcccacctacaacaaccacctctacaagcaaatctccaacgggacatcgggaggagccaccaacgacaacacctacttcggctacagcaccccctgggggtattttgactttaacagattccactgccacttttcaccacgtgactggcagcgactcatcaacaacaactggggattccggcccaagagactcagcttcaagctcttcaacatccaggtcaaggaggtcacgcagaatgaaggcaccaagaccatcgccaataacctcaccagcaccatccaggtgtttacggactcggagtaccagctgccgtacgttctcggctctgcccaccagggctgcctgcctccgttcccggcggacgtgttcatgattccccagtacggctacctaacactcaacaacggtagtcaggccgtgggacgctcctccttctactgcctggaatactttccttcgcagatgctgagaaccggcaacaacttccagtttacttacaccttcgaggacgtgcctttccacagcagctacgcccacagccagagcttggaccggctgatgaatcctctgattgaccagtacctgtactacttgtctcggactcaaacaacaggaggcacggcaaatacgcagactctgggcttcagccaaggtgggcctaatacaatggccaatcaggcaaagaactggctgccaggaccctgttaccgccaacaacgcgtctcaacgacaaccgggcaaaacaacaatagcaactttgcctggactgctgggaccaaataccatctgaatggaagaaattcattggctaatcctggcatcgctatggcaacacacaaagacgacgaggagcgtttttttcccagtaacgggatcctgatttttggcaaacaaaatgctgccagagacaatgcggattacagcgatgtcatgctcaccagcgaggaagaaatcaaaaccactaaccctgtggctacagaggaatacggtatcgtggcagataacttgcagcagcaaaacacggctcctcaaattggaactgtcaacagccagggggccttacccggtatggtctggcagaaccgggacgtgtacctgcagggtcccatctgggccaagattcctcacacggacggcaacttccacccgtctccgctgatgggcggctttggcctgaaacatcctccgcctcagatcctgatcaagaacacgcctgtacctgcggatcctccgaccaccttcaaccagtcaaagctgaactctttcatcacgcaatacagcaccggacaggtcagcgtggaaattgaatgggagctgcagaaggaaaacagcaagcgctggaaccccgagatccagtacacctccaactactacaaatctacaagtgtggactttgctgtaatacagaaggcgtgtactctgaaccccgccccattggcacccgttacctcacccgtaatctg

SEQ ID NO: 113 - DNA, 4393 bp, Adeno-associated virus 8
  source 1..4393: mol_type = genomic DNA
cagagagggagtggccaactccatcactaggggtagcgcgaagcgcctcccacgctgccgcgtcagcgctgacgtaaattacgtcataggggagtggtcctgtattagctgtcacgtgagtgcttttgcggcattttgcgacaccacgtggccatttgaggtatatatggccgagtgagcgagcaggatctccattttgaccgcgaaatttgaacgagcagcagccatgccgggcttctacgagatcgtgatcaaggtgccgagcgacctggacgagcacctgccgggcatttctgactcgtttgtgaactgggtggccgagaaggaatgggagctgcccccggattctgacatggatcggaatctgatcgagcaggcacccctgaccgtggccgagaagctgcagcgcgacttcctggtccaatggcgccgcgtgagtaaggccccggaggccctcttctttgttcagttcgagaagggcgagagctactttcacctgcacgttctggtcgagaccacgggggtcaagtccatggtgctaggccgcttcctgagtcagattcgggaaaagcttggtccagaccatctacccgcggggtcgagccccaccttgcccaactggttcgcggtgaccaaagacgcggtaatggcgccggcgggggggaacaaggtggtggacgagtgctacatccccaactacctcctgcccaagactcagcccgagctgcagtgggcgtggactaacatggaggagtatataagcgcgtgcttgaacctggccgagcgcaaacggctcgtggcgcagcacctgacccacgtcagccagacgcaggagcagaacaaggagaatctgaaccccaattctgacgcgcccgtgatcaggtcaaaaacctccgcgcgctatatggagctggtcgggtggctggtggaccggggcatcacctccgagaagcagtggatccaggaggaccaggcctcgtacatctccttcaacgccgcctccaactcgcggtcccagatcaaggccgcgctggacaatgccggcaagatcatggcgctgaccaaatccgcgcccgactacctggtggggccctcgctgcccgcggacattacccagaaccgcatctaccgcatcctcgctctcaacggctacgaccctgcctacgccggctccgtctttctcggctgggctcagaaaaagttcgggaaacgcaacaccatctggctgtttggacccgccaccaccggcaagaccaacattgcggaagccatcgcccacgccgtgcccttctacggctgcgtcaactggaccaatgagaactttcccttcaatgattgcgtcgacaagatggtgatctggtgggaggagggcaagatgacggccaaggtcgtggagtccgccaaggccattctcggcggcagcaaggtgcgcgtggaccaaaagtgcaagtcgtccgcccagatcgaccccacccccgtgatcgtcacctccaacaccaacatgtgcgccgtgattgacgggaacagcaccaccttcgagcaccagcagcctctccaggaccggatgtttaagttcgaactcacccgccgtctggagcacgactttggcaaggtgacaaagcaggaagtcaaagagttcttccgctgggccagtgatcacgtgaccgaggtggcgcatgagttttacgtcagaaagggcggagccagcaaaagacccgcccccgatgacgcggataaaagcgagcccaagcgggcctgcccctcagtcgcggatccatcgacgtcagacgcggaaggagctccggtggactttgccgacaggtaccaaaacaaatgttctcgtcacgcgggcatgcttcagatgctgtttccctgcaaaacgtgcgagagaatgaatcagaatttcaacatttgcttcacacacggggtcagagactgctcagagtgtttccccggcgtgtcagaatctcaaccggtcgtcagaaagaggacgtatcggaaactctgtgcgattcatcatctgctggggcgggctcccgagattgcttgctcggcctgcgatctggtcaacgtggacctggatgactgtgtttctgagcaataaatgacttaaaccaggtatggctgccgatggttatcttccagattggctcgaggacaacctctctgagggcattcgcgagtggtgggcgctgaaacctggagccccgaagcccaaagccaaccagcaaaagcaggacgacggccggggtctggtgcttcctggctacaagtacctcggacccttcaacggactcgacaagggggagcccgtcaacgcggcggacgcagcggccctcgagcacgacaaggcctacgaccagcagctgcaggcgggtgacaatccgtacctgcggtataaccacgccgacgccgagtttcaggagcgtctgcaagaagatacgtcttttgggggcaacctcgggcgagcagtcttccaggccaagaagcgggttctcgaacctctcggtctggttgaggaaggcgctaagacggctcctggaaagaagagaccggtagagccatcaccccagcgttctccagactcctctacgggcatcggcaagaaaggccaacagcccgccagaaaaagactcaattttggtcagactggcgactcagagtcagttccagaccctcaacctctcggagaacctccagcagcgccctctggtgtgggacctaatacaatggctgcaggcggtggcgcaccaatggcagacaataacgaaggcgccgacggagtgggtagttcctcgggaaattggcattgcgattccacatggctgggcgacagagtcatcaccaccagcacccgaacctgggccctgcccacctacaacaaccacctctacaagcaaatctccaacgggacatcgggaggagccaccaacgacaacacctacttcggctacagcaccccctgggggtattttgactttaacagattccactgccacttttcaccacgtgactggcagcgactcatcaacaacaactggggattccggcccaagagactcagcttcaagctcttcaacatccaggtcaaggaggtcacgcagaatgaaggcaccaagaccatcgccaataacctcaccagcaccatccaggtgtttacggactcggagtaccagctgccgtacgttctcggctctgcccaccagggctgcctgcctccgttcccggcggacgtgttcatgattccccagtacggctacctaacactcaacaacggtagtcaggccgtgggacgctcctccttctactgcctggaatactttccttcgcagatgctgagaaccggcaacaacttccagtttacttacaccttcgaggacgtgcctttccacagcagctacgcccacagccagagcttggaccggctgatgaatcctctgattgaccagtacctgtactacttgtctcggactcaaacaacaggaggcacggcaaatacgcagactctgggcttcagccaaggtgggcctaatacaatggccaatcaggcaaagaactggctgccaggaccctgttaccgccaacaacgcgtctcaacgacaaccgggcaaaacaacaatagcaactttgcctggactgctgggaccaaataccatctgaatggaagaaattcattggctaatcctggcatcgctatggcaacacacaaagacgacgaggagcgtttttttcccagtaacgggatcctgatttttggcaaacaaaatgctgccagagacaatgcggattacagcgatgtcatgctcaccagcgaggaagaaatcaaaaccactaaccctgtggctacagaggaatacggtatcgtggcagataacttgcagcagcaaaacacggctcctcaaattggaactgtcaacagccagggggccttacccggtatggtctggcagaaccgggacgtgtacctgcagggtcccatctgggccaagattcctcacacggacggcaacttccacccgtctccgctgatgggcggctttggcctgaaacatcctccgcctcagatcctgatcaagaacacgcctgtacctgcggatcctccgaccaccttcaaccagtcaaagctgaactctttcatcacgcaatacagcaccggacaggtcagcgtggaaattgaatgggagctgcagaaggaaaacagcaagcgctggaaccccgagatccagtacacctccaactactacaaatctacaagtgtggactttgctgttaatacagaaggcgtgtactctgaaccccgccccattggcacccgttacctcacccgtaatctgtaattgcctgttaatcaataaaccggttgattcgtttcagttgaactttggtctctgcg

SEQ ID NO: 114 - protein, 738 aa, Adeno-associated virus 8; identical to SEQ ID NO: 105

SEQ ID NO: 115 - protein, 737 aa, Adeno-associated virus 8
MAADGYLPDWLEDNLSEGIREWWALKPGAPKPKANQQKQDDGRGLVLPGYKYLGPFNGLDKGEPVNAADAAALEHDKAYDQQLQAGDNPYLRYNHADAEFQERLQEDTSFGGNLGRAVFQAKKRVLEPLGLVEEGAKTAPGKKRPVEPSPQRSPDSSTGIGKKGQQPARKRLNFGQTGDSESVPDPQPLGEPPAAPSGVGPNTMAAGGGAPMADNNEGADGVGSSSGNWHCDSTWLGDRVITTSTRTWALPTYNNHLYKQISNGTSGGATNDNTYFGYSTPWGYFDFNRFHCHFSPRDWQRLINNNWGFRPKRLSFKLFNIQVKEVTQNEGTKTIANNLTSTIQVFTDSEYQLPYVLGSAHQGCLPPFPADVFMIPQYGYLTLNNGSQAVGRSSFYCLEYFPSQMLRTGNNFQFTYTFEDVPFHSSYAHSQSLDRLMNPLIDQYLYYLSRTQTTGGTANTQTLGFSQGGPNTMANQAKNWLPGPCYRQQRVSTTTGQNNNSNFAWTAGTKYHLNGRNSLANPGIAMATHKDDEERFFPSNGILIFGKQNAARDNADYSDVMLTSEEEIKTTNPVATEEYGIVADNLQQQNTAPQIGTVNSQGALPGMVWQNRDVYLQGPIWAKIPHTDGNFHPSPLMGGFGLKHPPPQILIKNTPVPADPPTTFNQSKLNSFITQYSTGQVSVEIEWELQKENSKRWNPEIQYTSNYYKSTSVDFAVIQKACTLNPAPLAPVTSPVI

SEQ ID NO: 116 - DNA, 2217 bp, Adeno-associated virus; identical to SEQ ID NO: 111
  source 1..2217: mol_type = genomic DNA

SEQ ID NO: 117 - DNA, 2214 bp, synthetic construct
  misc_feature 1..2214: note = Description of Artificial Sequence: Synthetic polynucleotide
  source 1..2214: mol_type = other DNA
atggctgccgatggttatcttccagattggctcgaggacaacctctctgagggcattcgcgagtggtgggcgctgaaacctggagccccgaagcccaaagccaaccagcaaaagcaggacgacggccggggtctggtgcttcctggctacaagtacctcggacccttcaacggactcgacaagggggagcccgtcaacgcggcggacgcagcggccctcgagcacgacaaggcctacgaccagcagctgcaggcgggtgacaatccgtacctgcggtataaccacgccgacgccgagtttcaggagcgtctgcaagaagatacgtcttttgggggcaacctcgggcgagcagtcttccaggccaagaagcgggttctcgaacctctcggtctggttgaggaaggcgctaagacggctcctggaaagaagagaccggtagagccatcaccccagcgttctccagactcctctacgggcatcggcaagaaaggccaacagcccgccagaaaaagactcaattttggtcagactggcgactcagagtcagttccagaccctcaacctctcggagaacctccagcagcgccctctggtgtgggacctaatacaatggctgcaggcggtggcgcaccaatggcagacaataacgaaggcgccgacggagtgggtagttcctcgggaaattggcattgcgattccacatggctgggcgacagagtcatcaccaccagcacccgaacctgggccctgcccacctacaacaaccacctctacaagcaaatctccaacgggacatcgggaggagccaccaacgacaacacctacttcggctacagcaccccctgggggtattttgactttaacagattccactgccacttttcaccacgtgactggcagcgactcatcaacaacaactggggattccggcccaagagactcagcttcaagctcttcaacatccaggtcaaggaggtcacgcagaatgaaggcaccaagaccatcgccaataacctcaccagcaccatccaggtgtttacggactcggagtaccagctgccgtacgttctcggctctgcccaccagggctgcctgcctccgttcccggcggacgtgttcatgattccccagtacggctacctaacactcaacaacggtagtcaggccgtgggacgctcctccttctactgcctggaatactttccttcgcagatgctgagaaccggcaacaacttccagtttacttacaccttcgaggacgtgcctttccacagcagctacgcccacagccagagcttggaccggctgatgaatcctctgattgaccagtacctgtactacttgtctcggactcaaacaacaggaggcacggcaaatacgcagactctgggcttcagccaaggtgggcctaatacaatggccaatcaggcaaagaactggctgccaggaccctgttaccgccaacaacgcgtctcaacgacaaccgggcaaaacaacaatagcaactttgcctggactgctgggaccaaataccatctgaatggaagaaattcattggctaatcctggcatcgctatggcaacacacaaagacgacgaggagcgtttttttcccagtaacgggatcctgatttttggcaaacaaaatgctgccagagacaatgcggattacagcgatgtcatgctcaccagcgaggaagaaatcaaaaccactaaccctgtggctacagaggaatacggtatcgtggcagataacttgcctgagcggacggcgatgagtcttccgggaactgtcaacagccagggggccttacccggtatggtctggcagaaccgggacgtgtacctgcagggtcccatctgggccaagattcctcacacggacggcaacttccacccgtctccgctgatgggcggctttggcctgaaacatcctccgcctcagatcctgatcaagaacacgcctgtacctgcggatcctccgaccaccttcaaccagtcaaagctgaactctttcatcacgcaatacagcaccggacaggtcagcgtggaaattgaatgggagctgcagaaggaaaacagcaagcgctggaaccccgagatccagtacacctccaactactacaaatctacaagtgtggactttgctgttaatacagaaggcgtgtactctgaaccccgccccattggcacccgttacctcacccgtaatctg

SEQ ID NO: 118 - protein, 738 aa, synthetic construct
  REGION 1..738: note = Description of Artificial Sequence: Synthetic polypeptide
MAADGYLPDWLEDNLSEGIREWWALKPGAPKPKANQQKQDDGRGLVLPGYKYLGPFNGLDKGEPVNAADAAALEHDKAYDQQLQAGDNPYLRYNHADAEFQERLQEDTSFGGNLGRAVFQAKKRVLEPLGLVEEGAKTAPGKKRPVEPSPQRSPDSSTGIGKKGQQPARKRLNFGQTGDSESVPDPQPLGEPPAAPSGVGPNTMAAGGGAPMADNNEGADGVGSSSGNWHCDSTWLGDRVITTSTRTWALPTYNNHLYKQISNGTSGGATNDNTYFGYSTPWGYFDFNRFHCHFSPRDWQRLINNNWGFRPKRLSFKLFNIQVKEVTQNEGTKTIANNLTSTIQVFTDSEYQLPYVLGSAHQGCLPPFPADVFMIPQYGYLTLNNGSQAVGRSSFYCLEYFPSQMLRTGNNFQFTYTFEDVPFHSSYAHSQSLDRLMNPLIDQYLYYLSRTQTTGGTANTQTLGFSQGGPNTMANQAKNWLPGPCYRQQRVSTTTGQNNNSNFAWTAGTKYHLNGRNSLANPGIAMATHKDDEERFFPSNGILIFGKQNAARDNADYSDVMLTSEEEIKTTNPVATEEYGIVADNLPERTAMSLPGTVNSQGALPGMVWQNRDVYLQGPIWAKIPHTDGNFHPSPLMGGFGLKHPPPQILIKNTPVPADPPTTFNQSKLNSFITQYSTGQVSVEIEWELQKENSKRWNPEIQYTSNYYKSTSVDFAVNTEGVYSEPRPIGTRYLTRNL

SEQ ID NO: 119 - DNA, 2214 bp, synthetic construct
  misc_feature 1..2214: note = Description of Artificial Sequence: Synthetic polynucleotide
  source 1..2214: mol_type = other DNA
atggctgccgatggttatcttccagattggctcgaggacaacctctctgagggcattcgcgagtggtgggcgctgaaacctggagccccgaagcccaaagccaaccagcaaaagcaggacgacggccggggtctggtgcttcctggctacaagtacctcggacccttcaacggactcgacaagggggagcccgtcaacgcggcggacgcagcggccctcgagcacgacaaggcctacgaccagcagctgcaggcgggtgacaatccgtacctgcggtataaccacgccgacgccgagtttcaggagcgtctgcaagaagatacgtcttttgggggcaacctcgggcgagcagtcttccaggccaagaagcgggttctcgaacctctcggtctggttgaggaaggcgctaagacggctcctggaaagaagagaccggtagagccatcaccccagcgttctccagactcctctacgggcatcggcaagaaaggccaacagcccgccagaaaaagactcaattttggtcagactggcgactcagagtcagttccagaccctcaacctctcggagaacctccagcagcgccctctggtgtgggacctaatacaatggctgcaggcggtggcgcaccaatggcagacaataacgaaggcgccgacggagtgggtagttcctcgggaaattggcattgcgattccacatggctgggcgacagagtcatcaccaccagcacccgaacctgggccctgcccacctacaacaaccacctctacaagcaaatctccaacgggacatcgggaggagccaccaacgacaacacctacttcggctacagcaccccctgggggtattttgactttaacagattccactgccacttttcaccacgtgactggcagcgactcatcaacaacaactggggattccggcccaagagactcagcttcaagctcttcaacatccaggtcaaggaggtcacgcagaatgaaggcaccaagaccatcgccaataacctcaccagcaccatccaggtgtttacggactcggagtaccagctgccgtacgttctcggctctgcccaccagggctgcctgcctccgttcccggcggacgtgttcatgattccccagtacggctacctaacactcaacaacggtagtcaggccgtgggacgctcctccttctactgcctggaatactttccttcgcagatgctgagaaccggcaacaacttccagtttacttacaccttcgaggacgtgcctttccacagcagctacgcccacagccagagcttggaccggctgatgaatcctctgattgaccagtacctgtactacttgtctcggactcaaacaacaggaggcacggcaaatacgcagactctgggcttcagccaaggtgggcctaatacaatggccaatcaggcaaagaactggctgccaggaccctgttaccgccaacaacgcgtctcaacgacaaccgggcaaaacaacaatagcaactttgcctggactgctgggaccaaataccatctgaatggaagaaattcattggctaatcctggcatcgctatggcaacacacaaagacgacgaggagcgtttttttcccagtaacgggatcctgatttttggcaaacaaaatgctgccagagacaatgcggattacagcgatgtcatgctcaccagcgaggaagaaatcaaaaccactaaccctgtggctacagaggaatacggtatcgtggcagataacttgagttttagtcgtgcggttctttgtgatggaactgtcaacagccagggggccttacccggtatggtctggcagaaccgggacgtgtacctgcagggtcccatctgggccaagattcctcacacggacggcaacttccacccgtctccgctgatgggcggctttggcctgaaacatcctccgcctcagatcctgatcaagaacacgcctgtacctgcggatcctccgaccaccttcaaccagtcaaagctgaactctttcatcacgcaatacagcaccggacaggtcagcgtggaaattgaatgggagctgcagaaggaaaacagcaagcgctggaaccccgagatccagtacacctccaactactacaaatctacaagtgtggactttgctgttaatacagaaggcgtgtactctgaaccccgccccattggcacccgttacctcacccgtaatctg

SEQ ID NO: 120 - protein, 738 aa, synthetic construct
  REGION 1..738: note = Description of Artificial Sequence: Synthetic polypeptide
MAADGYLPDWLEDNLSEGIREWWALKPGAPKPKANQQKQDDGRGLVLPGYKYLGPFNGLDKGEPVNAADAAALEHDKAYDQQLQAGDNPYLRYNHADAEFQERLQEDTSFGGNLGRAVFQAKKRVLEPLGLVEEGAKTAPGKKRPVEPSPQRSPDSSTGIGKKGQQPARKRLNFGQTGDSESVPDPQPLGEPPAAPSGVGPNTMAAGGGAPMADNNEGADGVGSSSGNWHCDSTWLGDRVITTSTRTWALPTYNNHLYKQISNGTSGGATNDNTYFGYSTPWGYFDFNRFHCHFSPRDWQRLINNNWGFRPKRLSFKLFNIQVKEVTQNEGTKTIANNLTSTIQVFTDSEYQLPYVLGSAHQGCLPPFPADVFMIPQYGYLTLNNGSQAVGRSSFYCLEYFPSQMLRTGNNFQFTYTFEDVPFHSSYAHSQSLDRLMNPLIDQYLYYLSRTQTTGGTANTQTLGFSQGGPNTMANQAKNWLPGPCYRQQRVSTTTGQNNNSNFAWTAGTKYHLNGRNSLANPGIAMATHKDDEERFFPSNGILIFGKQNAARDNADYSDVMLTSEEEIKTTNPVATEEYGIVADNLSFSRAVLCDGTVNSQGALPGMVWQNRDVYLQGPIWAKIPHTDGNFHPSPLMGGFGLKHPPPQILIKNTPVPADPPTTFNQSKLNSFITQYSTGQVSVEIEWELQKENSKRWNPEIQYTSNYYKSTSVDFAVNTEGVYSEPRPIGTRYLTRNL

SEQ ID NO: 121 - DNA, 4385 bp, Adeno-associated virus 9
  source 1..4385: mol_type = genomic DNA
cagagagggagtggccaactccatcactaggggtaatcgcgaagcgcctcccacgctgccgcgtcagcgctgacgtagattacgtcataggggagtggtcctgtattagctgtcacgtgagtgcttttgcgacattttgcgacaccacatggccatttgaggtatatatggccgagtgagcgagcaggatctccattttgaccgcgaaatttgaacgagcagcagccatgccgggcttctacgagattgtgatcaaggtgccgagcgacctggacgagcacctgccgggcatttctgactcttttgtgaactgggtggccgagaaggaatgggagctgcccccggattctgacatggatcggaatctgatcgagcaggcacccctgaccgtggccgagaagctgcagcgcgacttcctggtccaatggcgccgcgtgagtaaggccccggaggccctcttctttgttcagttcgagaagggcgagagctactttcacctgcacgttctggtcgagaccacgggggtcaagtccatggtgctaggccgcttcctgagtcagattcgggagaagctggtccagaccatctaccgcgggatcgagccgaccctgcccaactggttcgcggtgaccaagacgcgtaatggcgccggcggggggaacaaggtggtggacgagtgctacatccccaactacctcctgcccaagactcagcccgagctgcagtgggcgtggactaacatggaggagtatataagcgcgtgcttgaacctggccgagcgcaaacggctcgtggcgcagcacctgacccacgtcagccagacgcaggagcagaacaaggagaatctgaaccccaattctgacgcgcccgtgatcaggtcaaaaacctccgcgcgctacatggagctggtcgggtggctggtggaccggggcatcacctccgagaagcagtggatccaggaggaccaggcctcgtacatctccttcaacgccgcctccaactcgcggtcccagatcaaggccgcgctggacaatgccggcaagatcatggcgctgaccaaatccgcgcccgactacctggtaggcccttcacttccggtggacattacgcagaaccgcatctaccgcatcctgcagctcaacggctacgaccctgcctacgccggctccgtctttctcggctgggcacaaaagaagttcgggaaacgcaacaccatctggctgtttgggccggccaccacgggaaagaccaacatcgcagaagccattgcccacgccgtgcccttctacggctgcgtcaactggaccaatgagaactttcccttcaacgattgcgtcgacaagatggtgatctggtgggaggagggcaagatgacggccaaggtcgtggagtccgccaaggccattctcggcggcagcaaggtgcgcgtggaccaaaagtgcaagtcgtccgcccagatcgaccccactcccgtgatcgtcacctccaacaccaacatgtgcgccgtgattgacgggaacagcaccaccttcgagcaccagcagcctctccaggaccggatgtttaagttcgaactcacccgccgtctggagcacgactttggcaaggtgacaaagcaggaagtcaaagagttcttccgctgggccagtgatcacgtgaccgaggtggcgcatgagttttacgtcagaaagggcggagccagcaaaagacccgcccccgatgacgcggataaaagcgagcccaagcgggcctgcccctcagtcgcggatccatcgacgtcagacgcggaaggagctccggtggactttgccgacaggtaccaaaacaaatgttctcgtcacgcgggcatgcttcagatgctgcttccctgcaaaacgtgcgagagaatgaatcagaatttcaacatttgcttcacacacggggtcagagactgctcagagtgtttccccggcgtgtcagaatctcaaccggtcgtcagaaagaggacgtatcggaaactctgtgcgattcatcatctgctggggcgggctcccgagattgcttgctcggcctgcgatctggtcaacgtggacctggatgactgtgtttctgagcaataaatgacttaaaccaggtatggctgccgatggttatcttccagattggctcgaggacaacctctctgagggcattcgcgagtggtgggcgctgaaacctggagccccgaagcccaaagccaaccagcaaaagcaggacgacggccggggtctggtgcttcctggctacaagtacctcggacccttcaacggactcgacaagggggagcccgtcaacgcggcggacgcagcggccctcgagcacggcaaggcctacgaccagcagctgcaggcgggtgacaatccgtacctgcggtataaccacgccgacgccgagtttcaggagcgtctgcaagaagatacgtcttttgggggcaacctcgggcgagcagtcttccaggccaagaagcgggttctcgaacctctcggtctggttgaggaaggcgctaagacggctcctggaaagaagagaccggtagagccatcaccccagcgttctccagactcctctacgggcatcggcaagaaaggccaacagcccgccagaaaaagactcaattttggtcagactggcgactcagagtcagttccagaccctcaacctctcggagaacctccagcagcgccctctggtgtgggacctaatacaatggctgcaggcggtggcgcaccaatggcagacaataacgaaggcgccgacggagtgggtaattcctcgggaaattggcattgcgattccacatggctgggggacagagtcatcaccaccagcacccgaacctgggcattgcccacctacaacaaccacctctacaagcaaatctccaatggaacatcgggaggaagcaccaacgacaacacctactttggctacagcaccccctgggggtattttgacttcaacagattccactgccacttctcaccacgtgactggcagcgactcatcaacaacaactggggattccggccaaagagactcaacttcaagctgttcaacatccaggtcaaggaggttacgacgaacgaaggcaccaagaccatcgccaataaccttaccagcaccgtccaggtctttacggactcggagtaccagctaccgtacgtcctaggctctgcccaccaaggatgcctgccaccgtttcctgcagacgtcttcatggttcctcagtacggctacctgacgctcaacaatggaagtcaagcgttaggacgttcttctttctactgtctggaatacttcccttctcagatgctgagaaccggcaacaactttcagttcagctacactttcgaggacgtgcctttccacagcagctacgcacacagccagagtctagatcgactgatgaaccccctcatcgaccagtacctatactacctggtcagaacacagacaactggaactgggggaactcaaactttggcattcagccaagcaggccctagctcaatggccaatcaggctagaaactgggtacccgggccttgctaccgtcagcagcgcgtctccacaaccaccaaccaaaataacaacagcaactttgcgtggacgggagctgctaaattcaagctgaacgggagagactcgctaatgaatcctggcgtggctatggcatcgcacaaagacgacgaggaccgcttctttccatcaagtggcgttctcatatttggcaagcaaggagccgggaacgatggagtcgactacagccaggtgctgattacagatgaggaagaaattaaagccaccaaccctgtagccacagaggaatacggagcagtggccatcaacaaccaggccgctaacacgcaggcgcaaactggacttgtgcataaccagggagttattcctggtatggtctggcagaaccgggacgtgtacctgcagggccctatttgggctaaaatacctcacacagatggcaactttcacccgtctcctctgatgggtggatttggactgaaacacccacctccacagattctaattaaaaatacaccagtgccggcagatcctcctcttaccttcaatcaagccaagctgaactctttcatcacgcagtacagcacgggacaagtcagcgtggaaatcgagtgggagctgcagaaagaaaacagcaagcgctggaatccagagatccagtatacttcaaactactacaaatctacaaatgtggactttgctgtcaataccaaaggtgtttactctgagcctcgccccattggtactcgttacctcacccgtaatttgtaattgcctgttaatcaataaaccggttaattcgtttcagttgaactttggtctctgcg

SEQ ID NO: 122 - DNA, 4382 bp, Adeno-associated virus 9
  source 1..4382: mol_type = genomic DNA
cagagagggagtggccaactccatcactaggggtaatcgcgaagcgcctcccacgctgccgcgtcagcgctgacgtagattacgtcataggggagtggtcctgtattagctgtcacgtgagtgcttttgcgacattttgcgacaccacatggccatttgaggtatatatggccgagtgagcgagcaggatctccattttgaccgcgaaatttgaacgagcagcagccatgccgggcttctacgagattgtgatcaaggtgccgagcgacctggacgagcacctgccgggcatttctgactcttttgtgaactgggtggccgagaaggaatgggagctgcccccggattctgacatggatcggaatctgatcgagcaggcacccctgaccgtggccgagaagctgtagcgcgacttcctggtccaatggcgccgcgtgagtaaggccccggaggccctcttctttgttcagttcgagaagggcgagagctactttcacctgcacgttctggtcgagaccacgggggtcaagtccatggtgctaggccgcttcctgagtcagattcgggagaagctggtccagaccatctaccgcgggatcgagccgaccctgcccaactggttcgcggtgaccaagacgcgtaatggcgccggcggggggaacaaggtggtggacgagtgctacatccccaactacctcctgcccaagactcagcccgagctgcagtgggcgtggactaacatggaggagtatataagcgcgtgcttgaacctggccgagcgcaaacggctcgtggcgcagcacctgacccacgtcagccagacgcaggagcagaacaaggagaatctgaaccccaattctgacgcgcccgtgatcaggtcaaaaacctccgcgcgctacatggagctggtcgggtggctggtggaccggggcatcacctccgagaagcagtggatccaggaggaccaggcctcgtacatctccttcaacgccgcctccaactcgcggtcccagatcaaggccgcgctggacaatgccggcaagatcatggcgctgaccaaatccgcgcccgactacctggtaggcccttcacttccggtggacattacgcagaaccgcatctaccgcatcctgcagctcaacggctacgaccctgcctacgccggctccgtctttctcggctgggcacaaaagaagttcgggaaacgcaacaccatctggctgtttgggccggccaccacgggaaagaccaacatcgcagaagccattgcccacgccgtgcccttctacggctgcgtcaactggaccaatgagaactttcccttcaacgattgcgtcgacaagatggtgatctggtgggaggagggcaagatgacggccaaggtcgtggagtccgccaaggccattctcggcggcagcaaggtgcgcgtggaccaaaagtgcaagtcgtccgcccagatcgaccccactcccgtgatcgtcacctccaacaccaacatgtgcgccgtgattgacgggaacagcaccaccttcgagcaccagcagcctctccaggaccggatgtttaagttcgaactcacccgccgtctggagcacgactttggcaaggtgacaaagcaggaagtcaaagagttcttccgctgggccagtgatcacgtgaccgaggtggcgcatgagttttacgtcagaaagggcggagccagcaaaagacccgcccccgatgacgcggataaaagcgagcccaagcgggcctgcccctcagtcgcggatccatcgacgtcagacgcggaaggagctccggtggactttgccgacaggtaccaaaacaaatgttctcgtcacgcgggcatgcttcagatgctgcttccctgcaaaacgtgcgagagaatgaatcagaatttcaacatttgcttcacacacggggtcagagactgctcagagtgtttccccggcgtgtcagaatctcaaccggtcgtcagaaagaggacgtatcggaaactctgtgcgattcatcatctgctggggcgggctcccgagattgcttgctcggcctgcgatctggtcaacgtggacctggatgactgtgtttctgagcaataaatgacttaaaccaggtatggctgccgatggttatcttccagattggctcgaggacaacctctctgagggcattcgcgagtggtgggacctgaaacctggagccccgaaacccaaagccaaccagcaaaagcaggacgacggccggggtctggtgcttcctggctacaagtacctcggacccttcaacggactcgacaagggggagcccgtcaacgcggcggacgcagcggccctcgagcacgacaaggcctacgaccagcagctcaaagcgggtgacaatccgtacctgcggtataaccacgccgacgccgagtttcaggagcgtctgcaagaagatacgtcttttgggggcaacctcgggcgagcagtcttccaggccaagaagcgggttctcgaacctctcggtctggttgaggaaggcgctaagacggctcctggaaagaagagaccggtagagcagtcaccccaagaaccagactcatcctcgggcatcggcaaatcaggccagcagcccgctaaaaagagactcaattttggtcagactggcgactcagagtcagtccccgacccacaacctctcggagaacctccagaagccccctcaggtctgggacctaatacaatggcttcaggcggtggcgctccaatggcagacaataacgaaggcgccgacggagtgggtaattcctcgggaaattggcattgcgattccacatggctgggggacagagtcatcaccaccagcacccgaacctgggcattgcccacctacaacaaccacctctacaagcaaatctccaatggaacatcgggaggaagcaccaacgacaacacctactttggctacagcaccccctgggggtattttgacttcaacagattccactgccacttctcaccacgtgactggcagcgactcatcaacaacaactggggattccggccaaagagactcaacttcaagctgttcaacatccaggtcaaggaggttacgacgaacgaaggcaccaagaccatcgccaataaccttaccagcaccgtccaggtctttacggactcggagtaccagctaccgtacgtcctaggctctgcccaccaaggatgcctgccaccgtttcctgcagacgtcttcatggttcctcagtacggctacctgacgctcaacaatggaagtcaagcgttaggacgttcttctttctactgtctggaatacttcccttctcagatgctgagaaccggcaacaactttcagttcagctacactttcgaggacgtgcctttccacagcagctacgcacacagccagagtctagatcgactgatgaaccccctcatcgaccagtacctatactacctggtcagaacacagacaactggaactgggggaactcaaactttggcattcagccaagcaggccctagctcaatggccaatcaggctagaaactgggtacccgggccttgctaccgtcagcagcgcgtctccacaaccaccaaccaaaataacaacagcaactttgcgtggacgggagctgctaaattcaagctgaacgggagagactcgctaatgaatcctggcgtggctatggcatcgcacaaagacgacgaggaccgcttctttccatcaagtggcgttctcatatttggcaagcaaggagccgggaacgatggagtcgactacagccaggtgctgattacagatgaggaagaaattaaagccaccaaccctgtagccacagaggaatacggagcagtggccatcaacaaccaggccgctaacacgcaggcgcaaactggacttgtgcataaccagggagttattcctggtatggtctggcagaaccgggacgtgtacctgcagggccctatttgggctaaaatacctcacacagatggcaactttcacccgtctcctctgatgggtggatttggactgaaacacccacctccacagattctaattaaaaatacaccagtgccggcagatcctcctcttaccttcaatcaagccaagctgaactctttcatcacgcagtacagcacgggacaagtcagcgtggaaatcgagtgggagctgcagaaagaaaacagcaagcgctggaatccagagatccagtatacttcaaactactacaaatctacaaatgtggactttgctgtcaataccgaaggtgtttactctgagcctcgccccattggtactcgttacctcacccgtaatttgtaattgcctgttaatcaataaaccggttaattcgtttcagttgaactttggtctctgcg

SEQ ID NO: 123 - protein, 736 aa, Adeno-associated virus 9
MAADGYLPDWLEDNLSEGIREWWALKPGAPQPKANQQHQDNARGLVLPGYKYLGPGNGLDKGEPVNAADAAALEHDKAYDQQLKAGDNPYLKYNHADAEFQERLKEDTSFGGNLGRAVFQAKKRLLEPLGLVEEAAKTAPGKKRPVEQSPQEPDSSAGIGKSGAQPAKKRLNFGQTGDTESVPDPQPIGEPPAAPSGVGSLTMASGGGAPVADNNEGADGVGSSSGNWHCDSQWLGDRVITTSTRTWALPTYNNHLYKQISNSTSGGSSNDNAYFGYSTPWGYFDFNRFHCHFSPRDWQRLINNNWGFRPKRLNFKLFNIQVKEVTDNNGVKTIANNLTSTVQVFTDSDYQLPYVLGSAHEGCLPPFPADVFMIPQYGYLTLNDGSQAVGRSSFYCLEYFPSQMLRTGNNFQFSYEFENVPFHSSYAHSQSLDRLMNPLIDQYLYYLSKTINGSGQNQQTLKFSVAGPSNMAVQGRNYIPGPSYRQQRVSTTVTQNNNSEFAWPGASSWALNGRNSLMNPGPAMASHKEGEDRFFPLSGSLIFGKQGTGRDNVDADKVMITNEEEIKTTNPVATESYGQVATNHQSAQAQAQTGWVQNQGILPGMVWQDRDVYLQGPIWAKIPHTDGNFHPSPLMGGFGMKHPPPQILIKNTPVPADPPTAFNKDKLNSFITQYSTGQVSVEIEWELQKENSKRWNPEIQYTSNYYKSNNVEFAVNTEGVYSEPRPIGTRYLTRNL

SEQ ID NO: 124 - protein, 736 aa, synthetic construct
  REGION 1..736: note = Description of Artificial Sequence: Synthetic polypeptide
MAADGYLPDWLEDNLSEGIREWWDLKPGAPKPKANQQKQDDGRGLVLPGYKYLGPFNGLDKGEPVNAADAAALEHDKAYDQQLKAGDNPYLRYNHADAEFQERLQEDTSFGGNLGRAVFQAKKRVLEPLGLVEEGAKTAPGKKRPVEQSPQEPDSSSGIGKSGQQPAKKRLNFGQTGDSESVPDPQPLGEPPEAPSGLGPNTMASGGGAPMADNNEGADGVGNSSGNWHCDSTWLGDRVITTSTRTWALPTYNNHLYKQISNGTSGGSTNDNTYFGYSTPWGYFDFNRFHCHFSPRDWQRLINNNWGFRPKRLNFKLFNIQVKEVTTNEGTKTIANNLTSTVQVFTDSEYQLPYVLGSAHQGCLPPFPADVFMVPQYGYLTLNNGSQALGRSSFYCLEYFPSQMLRTGNNFQFSYTFEDVPFHSSYAHSQSLDRLMNPLIDQYLYYLVRTQTTGTGGTQTLAFSQAGPSSMANQARNWVPGPCYRQQRVSTTTNQNNNSNFAWTGAAKFKLNGRDSLMNPGVAMASHKDDEDRFFPSSGVLIFGKQGAGNDGVDYSQVLITDEEEIKATNPVATEEYGAVAINNQAANTQAQTGLVHNQGVIPGMVWQNRDVYLQGPIWAKIPHTDGNFHPSPLMGGFGLKHPPPQILIKNTPVPADPPLTFNQAKLNSFITQYSTGQVSVEIEWELQKENSKRWNPEIQYTSNYYKSTNVDFAVNTEGVYSEPRPIGTRYLTRNL

SEQ ID NO: 125 - protein, 623 aa, synthetic construct
  REGION 1..623: note = Description of Artificial Sequence: Synthetic polypeptide
MPGFYEIVIKVPSDLDEHLPGISDSFVNWVAEKEWELPPDSDMDRNLIEQAPLTVAEKLQRDFLVQWRRVSKAPEALFFVQFEKGESYFHLHVLVETTGVKSMVLGRFLSQIREKLVQTIYRGIEPTLPNWFAVTKTRNGAGGGNKVVDECYIPNYLLPKTQPELQWAWTNMEEYISACLNLAERKRLVAQHLTHVSQTQEQNKENLNPNSDAPVIRSKTSARYMELVGWLVDRGITSEKQWIQEDQASYISFNAASNSRSQIKAALDNAGKIMALTKSAPDYLVGPSLPVDITQNRIYRILQLNGYDPAYAGSVFLGWAQKKFGKRNTIWLFGPATTGKTNIAEAIAHAVPFYGCVNWTNENFPFNDCVDKMVIWWEEGKMTAKVVESAKAILGGSKVRVDQKCKSSAQIDPTPVIVTSNTNMCAVIDGNSTTFEHQQPLQDRMFKFELTRRLEHDFGKVTKQEVKEFFRWASDHVTEVAHEFYVRKGGASKRPAPDDADKSEPKRACPSVADPSTSDAEGAPVDFADRYQNKCSRHAGMLQMLLPCKTCERMNQNFNICFTHGVRDCSECFPGVSESQPVVRKRTYRKLCAIHHLLGRAPEIACSACDLVNVDLDDCVSEQ

SEQ ID NO: 126 - DNA, 2211 bp, Adeno-associated virus
  source 1..2211: mol_type = genomic DNA
atggctgccgatggttatcttccagattggctcgaggacaaccttagtgaaggaattcgcgagtggtgggctttgaaacctggagcccctcaacccaaggcaaatcaacaacatcaagacaacgctcgaggtcttgtgcttccgggttacaaataccttggacccggcaacggactcgacaagggggagccggtcaacgcagcagacgcggcggccctcgagcacgacaaggcctacgaccagcagctcaaggccggagacaacccgtacctcaagtacaaccacgccgacgccgagttccaggagcggctcaaagaagatacgtcttttgggggcaacctcgggcgagcagtcttccaggccaaaaagaggcttcttgaacctcttggtctggttgaggaagcggctaagacggctcctggaaagaagaggcctgtagagcagtctcctcaggaaccggactcctccgcgggtattggcaaatcgggtgcacagcccgctaaaaagagactcaatttcggtcagactggcgacacagagtcagtcccagaccctcaaccaatcggagaacctcccgcagccccctcaggtgtgggatctcttacaatggcttcaggtggtggcgcaccagtggcagacaataacgaaggtgccgatggagtgggtagttcctcgggaaattggcattgcgattcccaatggctgggggacagagtcatcaccaccagcacccgaacctgggccctgcccacctacaacaatcacctctacaagcaaatctccaacagcacatctggaggatcttcaaatgacaacgcctacttcggctacagcaccccctgggggtattttgacttcaacagattccactgccacttctcaccacgtgactggcagcgactcatcaacaacaactggggattccggcctaagcgactcaacttcaagctcttcaacattcaggtcaaagaggttacggacaacaatggagtcaagaccatcgccaataaccttaccagcacggtccaggtcttcacggactcagactatcagctcccgtacgtgctcgggtcggctcacgagggctgcctcccgccgttcccagcggacgttttcatgattcctcagtacgggtatctgacgcttaatgatggaagccaggccgtgggtcgttcgtccttttactgcctggaatatttcccgtcgcaaatgctaagaacgggtaacaacttccagttcagctacgagtttgagaacgtacctttccatagcagctacgctcacagccaaagcctggaccgactaatgaatccactcatcgaccaatacttgtactatctctcaaagactattaacggttctggacagaatcaacaaacgctaaaattcagtgtggccggacccagcaacatggctgtccagggaagaaactacatacctggacccagctaccgacaacaacgtgtctcaaccactgtgactcaaaacaacaacagcgaatttgcttggcctggagcttcttcttgggctctcaatggacgtaatagcttgatgaatcctggacctgctatggccagccacaaagaaggagaggaccgtttctttcctttgtctggatctttaatttttggcaaacaaggaactggaagagacaacgtggatgcggacaaagtcatgataaccaacgaagaagaaattaaaactactaacccggtagcaacggagtcctatggacaagtggccacaaaccaccagagtgcccaagcacaggcgcagaccggctgggttcaaaaccaaggaatacttccgggtatggtttggcaggacagagatgtgtacctgcaaggacccatttgggccaaaattcctcacacggacggcaactttcacccttctccgctgatgggagggtttggaatgaagcacccgcctcctcagatcctcatcaaaaacacacctgtacctgcggatcctccaacggccttcaacaaggacaagctgaactctttcatcacccagtattctactggccaagtcagcgtggagatcgagtgggagctgcagaaggaaaacagcaagcgctggaacccggagatccagtacacttccaactattacaagtctaataatgttgaatttgctgttaatactgaaggtgtatatagtgaaccccgccccattggcaccagatacctgactcgtaatctgtaa

SEQ ID NO: 127 - protein, 736 aa, Adeno-associated virus; identical to SEQ ID NO: 123

SEQ ID NO: 128 - DNA, 2460 bp, Adeno-associated virus
  source 1..2460: mol_type = genomic DNA
ggtaattcctccggaaattggcattgcgattccacatggctgggcgaccgagtcattaccaccagcacccggacttgggccctgcccacctacaacaaccacctctacaagcaaatctccagccaatcgggtgccaccaacgacaaccactacttcggctacagcaccccttgggggtattttgatttcaacagattccactgccatttctcaccacgtgactggcagcgactcatcaacaacaactggggattcatggctgccgatggttatcttccagattggctcgaggacactctctctgaaggaatcagacagtggtggaagctcaaacctggcccaccaccgccgaaacctaaccaacaacaccgggacgacagtaggggtcttgtgcttcctgggtacaagtacctcggacccttcaacggactcgacaaaggagagccggtcaacgaggcagacgccgcggccctcgagcacgacaaagcctacgaccaccagctcaagcaaggggacaacccgtacctcaaatacaaccacgcggacgctgaatttcaggagcgtcttcaagaagatacgtctttcgggggcaacctcgggcgagcagtcttccaggccaaaaagagggtactcgagcctcttggtctggttgaggaagctgttaagacggctcctggaaaaaagagacctatagagcagtctcctgcagaaccggactcttcctcgggcatcggcaaatcaggccagcagcccgctaagaaaagactcaattttggtcagactggcgacacagagtcagtcccagaccctcaaccaatcggagaaccccccgcagccccctctggtgtgggatctaatacaatggcttcaggcggtggggcaccaatggcagacaataacgaaggcgccgacggagtgggtaattcctcgggaaattggcattgcgattccacatggatgggcgacagagttatcaccaccagcacaagaacctgggccctccccacctacaataatcacctctacaagcaaatctccagcgaatcgggagccaccaacgacaaccactacttcggctacagcaccccctgggggtattttgactttaacagattccactgtcacttctcaccacgtgactggcagcgactcatcaacaacaactggggatttagacccaagaaactcaatttcaagctcttcaacatccaagtcaaggaggtcacgcagaatgatggaaccacgaccatcgccaataaccttaccagcacggtgcaggtcttcacagactctgagtaccagctgccctacgtcctcggttcggctcaccagggctgccttccgccgttcccagcagacgtcttcatgattcctcagtacggctacttgactctgaacaatggcagccaagcggtaggacgttcttcattctactgtctagagtattttccctctcagatgctgaggacgggaaacaacttcaccttcagctacacttttgaagacgtgcctttccacagcagctacgcgcacagccagagtctggatcggctgatgaatcctctcattgaccagtacctgtattacctgagcaaaactcagggtacaagtggaacaacgcagcaatcgagactgcagttcagccaagctgggcctagctccatggctcagcaggccaaaaactggctaccgggacccagctaccgacagcagcgaatgtctaagacggctaatgacaacaacaacagtgaatttgcttggactgcagccaccaaatattacctgaatggaagaaattctctggtcaatcccgggcccccaatggccagtcacaaggacgatgaggaaaagtatttccccatgcacggaaatctcatctttggaaaacaaggcacaggaactaccaatgtggacattgaatcagtgcttattacagacgaagaagaaatcagaacaactaatcctgtggctacagaacaatacggacaggttgccaccaaccatcagagtcagaacaccacagcttcctatggaagtgtggacagccagggaatcttacctggaatggtgtggcaggaccgcgatgtctatcttcaaggtcccatttgggccaaaactcctcacacggacggacactttcatccttctccgctcatgggaggctttggactgaaacaccctcctccccagatcctgatcaaaaacacacctgtgccagcgaatcccgcgaccactttcactcctggaaagtttgcttcgttcattacccagtattccaccggacaggtcagcgtggaaatagagtgggagctgcagaaagaaaacagcaaacgctggaacccagaaattcagtacacctccaactacaacaagtcggtgaatgtggagtttaccgtggacgcaaacggtgtttattctgaaccccgccctattggcactcgttaccttacccggaacttg

SEQ ID NO: 129 - DNA, 3123 bp, Adeno-associated virus
  source 1..3123: mol_type = genomic DNA
gaattcgccctttctacggctgcgtcaactggaccaatgaaaactttcccttcaacgattgcgtcgacaagatggtgatctggtgggaggagggaaagatgaccgccaaggtcgtggaatctgccaaagccattctgggtggaggcaaggttcgtgtggaccagaaatgcaagtcttcggcccagatcgacccgactccggtgattgtcacctctaacaccaacatgtgcgccgtgattgacggaaactcgaccaccttcgagcaccagcagccgttgcaagaccggatgttcaaatttgaacttacccgccgtttggatcatgactttgggaaggtcaccaagcaggaagtcaaagactttttccggtgggctcaagatcacgtgactgaggtggagcatgagttctacgtcaaaaagggtggagccaagaaaaggcccgcccccgatgatgtatatataaatgagcccaagcgggcgcgcgagtcagttgcgcagccatcgacgtcagacgcggaagcttcgataaactacgcggacaggtaccaaaacaaatgttctcgtcacgtgggcatgaatctgatgctgtttccctgtcgacaatgcgaaagaatgaatcagaattcaaatatctgcttcacacacgggcaaaaagactgtttggaatgctttcccgtgtcagaatctcaacccgtttctgtcgtcagaaaaacgtatcagaaactttgttacattcatcatatcatgggaaaagtaccagacgcctgcactgcctgcgacctggtaaatgtggacttggatgactgtatttctgagcaataaatgacttaaatcaggtatggctgctgacggttatcttccagattggctcgaggacactctctctgaaggaatcagacagtggtggaagctcaaacctggcccaccaccgccgaaacctaaccaacaacaccgggacgacagtaggggtcttgtgcttcctgggtacaagtacctcggacccttcaacggactcgacaaaggagagccggtcaacgaggcagacgccgcggccctcgagcacgacaaagcctacgaccaccagctcaagcaaggggacaacccgtacctcaaatacaaccacgcggacgctgaatttcaggagcgtcttcaagaagatacgtctttcgggggcaacctcgggcgagcagtcttccaggccaaaaagagggtactcgagcctcttggtctggttgaggaagctgttaagacggctcctggaaaaaagagacctatagagcagtctcctgcagaaccggactcttcctcgggcatcggcaaatcaggccagcagcccgctaagaaaagactcaattttggtcagactggcgacacagagtcagtcccaggccctcaaccaatcggagaaccccccgcagccccctctggtgtgggatctaatacaatggcttcaggcggtggggcaccaatggcagacaataacgaaggcgccgacggagtgggtaattcctcgggaaattggcattgcgattccacatggatgggcgacagagttatcaccaccagcacaagaacctgggccctccccacctacaataatcacctctacaagcaaatctccagcgaatcgggagccaccaacgacaaccactacttcggctacagcaccccctgggggtattttgactttaacagattccactgtcacttctcaccacgtgactggcagcgactcatcaacaacaactggggatttagacccaagaaactcaatttcaagctcttcaacatccaagtcaaggaggtcacgcagaatgatggaaccacgaccatcgccaataaccttaccagcgcggtgcaggtcttcacagactctgagtaccagctgccctacgtcctcggttcggctcaccagggctgccttccgccgttcccagcagacgtcttcatgattcctcagtacggctacttgactctgaacaatggcagccaagcggtaggacgttcttcattctactgtctagagtattttccctctcagatgctgaggacgggaaacaacttcaccttcagctacacttttgaagacgtgcctttccacagcagctacgcgcacagccagagtctggatcggctgatgaatcctctcattgaccagtacctgtattacctgagcaaaactcagggtacaagtggaacaacgcagcaatcgagactgcagttcagccaagctgggcctagctccatggctcagcaggccaaaaactggctaccgggacccagctaccgacagcagcgaatgtctaagacggctaatgacaacaacaacagtgaatttgcttggactgcagccaccaaatattacctgaatggaagaaattctctggtcaatcccgggcccccagtggccagtcacaaggacgatgaggaaaagtatttccccatgcacggaaatctcatctttggaaaacaaggcacaggaactaccaatgtggacattgaatcagtgcttattacagacgaagaagaaatcagaacaactaatcctgtggctacagaacaatacggacaggttgccaccaaccatcagagtcagaacaccacagcttcctatggaagtgtggacagccagggaatcttacctggaatggtgtggcaggaccgcgatgtctatcttcaaggtcccatttgggccaaaactcctcacacggacggacactttcatccttctccgctcatgggaggctttggactgaaacaccctcctccccagatcctgatcaaaaacacacctgtgccagcgaatcccgcgaccactttcactcctggaaagtttgcttcgttcattacccagtattccacctgacaggtcagcgtggaaatagagtgggagctgcagaaagaaaacagcaaacgctggaacccagaaattcagtacacctccaactacaacaagtcggtgaatgtggagtttaccgtggacgcaaacggtgtttattctgaaccccgccctattggcactcgttaccttacccggaacttgtaatttcctgttaatgaataagccgatttatgcgtttcagttgaactttggtctctgcgaagggcgaattcgtttaaacct

SEQ ID NO: 130 - protein, 735 aa, synthetic construct
  REGION 1..735: note = Description of Artificial Sequence: Synthetic polypeptide
MAADGYLPDWLEDTLSEGIRQWWKLKPGPPPPKPNQQHRDDSRGLVLPGYKYLGPFNGLDKGEPVNEADAAALEHDKAYDHQLKQGDNPYLKYNHADAEFQERLQEDTSFGGNLGRAVFQAKKRVLEPLGLVEEAVKTAPGKKRPIEQSPAEPDSSSGIGKSGQQPAKKRLNFGQTGDTESVPGPQPIGEPPAAPSGVGSNTMASGGGAPMADNNEGADGVGNSSGNWHCDSTWMGDRVITTSTRTWALPTYNNHLYKQISSESGATNDNHYFGYSTPWGYFDFNRFHCHFSPRDWQRLINNNWGFRPKKLNFKLFNIQVKEVTQNDGTTTIANNLTSAVQVFTDSEYQLPYVLGSAHQGCLPPFPADVFMIPQYGYLTLNNGSQAVGRSSFYCLEYFPSQMLRTGNNFTFSYTFEDVPFHSSYAHSQSLDRLMNPLIDQYLYYLSKTQGTSGTTQQSRLQFSQAGPSSMAQQAKNWLPGPSYRQQRMSKTANDNNNSEFAWTAATKYYLNGRNSLVNPGPPVASHKDDEEKYFPMHGNLIFGKQGTGTTNVDIESVLITDEEEIRTTNPVATEQYGQVATNHQSQNTTASYGSVDSQGILPGMVWQDRDVYLQGPIWAKTPHTDGHFHPSPLMGGFGLKHPPPQILIKNTPVPANPATTFTPGKFASFITQYSTGQVSVEIEWELQKENSKRWNPEIQYTSNYNKSVNVEFTVDANGVYSEPRPIGTRYLTRNL

SEQ ID NO: 131 - DNA, 3123 bp, Adeno-associated virus
  source 1..3123: mol_type = genomic DNA
gaattcgccctttctacggctgcgtcaactggaccaatgaaaactttcccttcaacgattgcgtcgacaagatggtgatctggtgggaggagggaaagatgaccgccaaggtcgtggaatctgccaaagccattctgggtggaagcaaggttcgtgtggaccagaaatgcaagtcttcggcccagatcgacccgactccggtgattgtcacctctaacaccaacatgtgcgccgtgattgacggaaactcgaccaccttcgagcaccagcagccgttgcaagaccggatgttcaaatttgaacttacccgccgtttggatcatgactttgggaaggtcaccaagcaggaagtcaaagactttttccggtgggctcaagatcacgtgactgaggtggagcatgagttctacgtcaaaaagggtggagccaagaaaaggcccgcccccgatgatgtatatataaatgagcccaagcgggcgcgcgagtcagttgcgcagccatcgacgtcagacgcggaagcttcgataaactacgcgggcaggtaccaaaacaaatgttctcgtcacgtgggcatgaatctgatgctgtttccctgtcgacaatgcgaaagaatgaatcagaattcaaatatctgcttcacacacgggcaaaaagactgtttggaatgctttcccgtgtcagaatctcaacccgtttctgtcgtcagaaaaacgtatcagaaactttgttacattcatcatatcatgggaaaagaaccagacgcctgcactgcctgcgacctggtaaatgtggacttggatgactgtatttctgagcaataaatgacttaaatcaggtatggctgctgacggttatcttccagattggctcgaggacactctctctgaaggaatcagacagtggtggaagctcaaacctggcccaccaccgccgaaacctaaccaacaacaccgggacgacagtaggggtcttgtgcttcctgggtacaagtacctcggacccttcaacggactcgacaaaggagagccggtcaacgaggcagacgccgcggccctcgagcacgacaaagcctacgaccaccagctcaagcaaggggacaacccgtacctcaaatacaaccacgcggacgctgaatttcaggagcgtcttcaagaagatacgtctttcgggggcaacctcgggcgagcagtcttccaggccaaaaagagggtactcgagcctcttggtctggttgaggaagctgttaagacggctcctggaaaaaagagacctatagagcagtctcctgcagaaccggactcttcctcgggcatcggcgaatcaggccagcagcccgctaagaaaagactcaattttggtcagactggcgacacagagtcagtcccagaccctcaaccaatcggagaaccccccgcagccccctctggtgtgggatctaatacaatggcttcaggcggtggggcaccaatggcagacgataacgaaggcgccgacggagtgggtaattcctcgggaaattggcattgcgattccacatggatgggcgacagagttatcaccaccagcacaagaacctgggccctccccacctacaataatcacctctacaagcaaatctccagcgaatcgggagccaccaacgacaaccactacttcggctacagcaccccctgggggtattttgactttaacagattccactgtcacttctcaccacgtgactggcagcgactcatcaacaacaactggggatttagacccaagaaactcaatttcaagctcttcaacatccaagtcaaggaggtcacgcagaatgatggaaccacgaccatcgccaataaccttaccagcacggtgcaggtcttcacagactctgagtaccagctgccctacgtcctcggttcggctcaccagggctgccttccgccgttcccagcagacgtcttcatgattcctcagtacggctacttgactctgaacaatggcagccaagcggtaggacgttcttcattctactgtctagagtattttccctctcagatgctgaggacgggaaacaacttcaccttcagctacacttttgaagacgtgcctttccacagcagctacgcgcacagccagagtctggatcggctgatgaatcctctcattgaccagtacctgtattacctgagcaaaactcagggtacaagtggaacaacgcagcaatcgagactgcagttcagccaagctgggcctagctccatggctcagcaggccaaaaactggctaccgggacccagctaccgacagcagcgaatgtctaagacggctaatgacaacaacaacagtgaatttgcttggactgcagccaccaaatattacctgaatggaagaaattctctggtcaatcccgggcccccaatggccagtcacaaggacgatgaggaaaagtatttccccatgcacggaaatctcatctttggaaaacaaggcacaggaactaccaatgtggacattgaatcagtgcttattacagacgaagaagaaatcagaacaactaatcctgtggctacagaacaatacggacaggttgccaccaaccatcagagtcaggacaccacagcttcctatggaagtgtggacagccagggaatcttacctggaatggtgtggcaggaccgcgatgtctatcttcaaggtcccatttgggccaaaactcctcacacggacggacactttcatccttctccgctcatgggaggctttggactgaaacaccctcctccccagatcctgatcaaaaacacacctgtgccagcgaatcccgcgaccactttcactcctggaaagtttgcttcgttcattacccagtattccaccggacaggtcagcgtggaaatagagtgggagctgcagaaagaaaacagcaaacgctggaacccagaaattcagtacacctccaactacaacaagtcggtgaatgtggagtttaccgtggacgcaaacggtgtttattctgaaccccgccctattggcactcgttaccttacccggaacttgtaatttcctgttaatgaataaaccgatttatgcgtttcagttgaactttggtctctgcgaagggcgaattcgcggccgcta

SEQ ID NO: 132 - protein, 735 aa, synthetic construct
  REGION 1..735: note = Description of Artificial Sequence: Synthetic polypeptide
MAADGYLPDWLEDTLSEGIRQWWKLKPGPPPPKPNQQHRDDSRGLVLPGYKYLGPFNGLDKGEPVNEADAAALEHDKAYDHQLKQGDNPYLKYNHADAEFQERLQEDTSFGGNLGRAVFQAKKRVLEPLGLVEEAVKTAPGKKRPIEQSPAEPDSSSGIGESGQQPAKKRLNFGQTGDTESVPDPQPIGEPPAAPSGVGSNTMASGGGAPMADDNEGADGVGNSSGNWHCDSTWMGDRVITTSTRTWALPTYNNHLYKQISSESGATNDNHYFGYSTPWGYFDFNRFHCHFSPRDWQRLINNNWGFRPKKLNFKLFNIQVKEVTQNDGTTTIANNLTSTVQVFTDSEYQLPYVLGSAHQGCLPPFPADVFMIPQYGYLTLNNGSQAVGRSSFYCLEYFPSQMLRTGNNFTFSYTFEDVPFHSSYAHSQSLDRLMNPLIDQYLYYLSKTQGTSGTTQQSRLQFSQAGPSSMAQQAKNWLPGPSYRQQRMSKTANDNNNSEFAWTAATKYYLNGRNSLVNPGPPMASHKDDEEKYFPMHGNLIFGKQGTGTTNVDIESVLITDEEEIRTTNPVATEQYGQVATNHQSQDTTASYGSVDSQGILPGMVWQDRDVYLQGPIWAKTPHTDGHFHPSPLMGGFGLKHPPPQILIKNTPVPANPATTFTPGKFASFITQYSTGQVSVEIEWELQKENSKRWNPEIQYTSNYNKSVNVEFTVDANGVYSEPRPIGTRYLTRNL

SEQ ID NO: 133 - DNA, 3113 bp, Adeno-associated virus
  source 1..3113: mol_type = genomic DNA
gaattcgccctttctacggctgcgtcaactggaccaatgaaaactttcccttcaacgattgcgtcgacaagatggtgatctggtgggaggagggaaagatgaccgccaaggtcgtggaatctgccaaagccattctgggtggaagcaaggttcgtgtggaccagaaatgcaagtcttcggcccagatcgacccgactccggtgattgtcacctctaacaccaacatgtgcgccgtgattgacggaaactcgaccaccttcgagcaccagcagccgttgcaagaccggatgttcaaatttgaacttacccgccgtttggatcatgactttgggaaggtcaccaagcaggaagtcaaagactttttccggtgggctcaagatcacgtgactgaggtggagcatgagttctacgtcaaaaagggtggagccaagaaaaggcccgcccccgatgatgtatatataaatgagcccaagcgggcgcgcgagtcagttgcgcagccatcgacgtcagacgcggaagcttcgataaactacgcggacaggtaccaaaacaaatgttctcgtcacgtgggcatgaatctgatgctgtttccctgtcgacaatgcgaaagaatgaatcagaattcaaatatctgcttcacacacgggcaaaaagactgtttggaatgctttcccgtgtcagaatctcaacccgttcctgtcgtcagaaaaacgtatcagaaactttgttacattcatcatatcatgggaaaagtaccagacgcctgcactgcctgcgacctggtaaatgtggacttggatgactgtatttctgagcaataaatgacttaaatcaggtatggctgctgacggttatcttccagattggctcgaggacactctctctgaaggaatcagacagtggtggaagctcaaacctggcccaccaccgccgaaacctaaccaacaacaccgggacgacagtaggggtcttgtgcttcctgggtacaagtacctcggacccttcaacggactcgacaaaggagagccggtcaacgaggcagacgccgcggccctcgagcacgacaaagcctacgaccaccagctcaagcaaggggacaacccgtacctcaaatacaaccacgcggacgctgaatttcaggagcgtcttcaagaagatacgtctttcgggggcaacctcgggcgagcagtcttccaggccaaaaagagggtactcgagcctcttggtctggttgaggaagctgttaagacggctcctggaaaaaagagacctatagagcagtctcctgcagaaccggactcttcctcgggcatcggcaaatcaggccagcagcccgctaagaaaagactcaattttggtcagactggcgacacagagtcagtcccagaccctcaaccaatcggagaaccccccgcagccccctctggtgtgggatctaatacaatggcttcaggcggtggggcaccaatggcagacaataacgaaggcgccgacggagtgggtaattcctcgggaaattggcattgcgattccacatggatgggcgacagagttatcaccaccagcacaagaacctgggccctccccacctacaataatcacctctacaagcaaatctccagcgaatcgggagccaccaacgacaaccactacttcggctacagcaccccctgggggtattttgactttaacagattccactgtcacttctcaccacgtgactggcagcgactcatcaataacaactggggatttagacccaagaaactcaatttcaagctcttcaacatccaagtcaaggaggtcacgcagaatgatggaaccacgaccatcgccaataaccttaccagcacggtgcaggtcttcacagactctgagtaccagctgccctacgtcctcggttcggctcaccagggctgccttccgccgttcccagcagacgtcttcatgattcctcagtacggctacttgactctgaacaatggcagccaagcggtaggacgttcttcattctactgtctagagtattttccctctcagatgctgaggacgggaaacaacttcaccttcagctacacttttgaagacgtgcctttccacagcagctacgcgcacagccagagtctggatcggctgatgaatcctctcattgaccagtacctgtattacctgagcaaaactcagggtacaagtggaacaacgcagcaatcgagactgcagttcaaccaagctgggcctagctccatggctcagcaggccaaaaactggctaccgggacccagctaccgacagcagcgaatgtctaagacggctaatgacaacaacaacagtgaatttgcttggactgcagccaccaaatattacccgaatggaagaaattctctggtcaatcccgggcccccaatggccagtcacaaggacgatgaggaaaagtatttccccatgcacggaaatctcatctttggaaaacaaggcacaggaactaccaatgtggacattgaatcagtgcttattacagacgaagaagaaatcagaacgactaatcctgtggctacagaacaatacggacaggttgccaccaaccgtcagagtcagaacaccacagcttcctatggaagtgtggacagccagggaatcttacctggaatggtgtggcaggaccgcgatgtctatcttcaaggtcccatttgggccaaaactcctcacacggacggacactttcatccttctccgctcatgggaggctttggactgaaacaccctcctccccagatcctgatcaaaaacacacctgtgccagcgaatcccgcgaccactttcactcctggaaagtttgcttcgttcattacccagtattccaccggacaggtcagcgtggaaatagagtgggagctgcagaaagaaaacagcaaacgctggaacccggaaattcagtacacctccaactacaacaagtcggtgaatgtggagtttaccgtggacgcaaacggtgtttattctgaaccccgccctattggcactcgttaccttacccggaacttgtaatttcctgttaatgaataaaccgatttatgcgtttcagttgaactttggtctctgcgaagggcgaattc

SEQ ID NO: 134 - protein, 735 aa, synthetic construct
  REGION 1..735: note = Description of Artificial Sequence: Synthetic polypeptide
MAADGYLPDWLEDTLSEGIRQWWKLKPGPPPPKPNQQHRDDSRGLVLPGYKYLGPFNGLDKGEPVNEADAAALEHDKAYDHQLKQGDNPYLKYNHADAEFQERLQEDTSFGGNLGRAVFQAKKRVLEPLGLVEEAVKTAPGKKRPIEQSPAEPDSSSGIGKSGQQPAKKRLNFGQTGDTESVPDPQPIGEPPAAPSGVGSNTMASGGGAPMADNNEGADGVGNSSGNWHCDSTWMGDRVITTSTRTWALPTYNNHLYKQISSESGATNDNHYFGYSTPWGYFDFNRFHCHFSPRDWQRLINNNWGFRPKKLNFKLFNIQVKEVTQNDGTTTIANNLTSTVQVFTDSEYQLPYVLGSAHQGCLPPFPADVFMIPQYGYLTLNNGSQAVGRSSFYCLEYFPSQMLRTGNNFTFSYTFEDVPFHSSYAHSQSLDRLMNPLIDQYLYYLSKTQGTSGTTQQSRLQFNQAGPSSMAQQAKNWLPGPSYRQQRMSKTANDNNNSEFAWTAATKYYPNGRNSLVNPGPPMASHKDDEEKYFPMHGNLIFGKQGTGTTNVDIESVLITDEEEIRTTNPVATEQYGQVATNRQSQNTTASYGSVDSQGILPGMVWQDRDVYLQGPIWAKTPHTDGHFHPSPLMGGFGLKHPPPQILIKNTPVPANPATTFTPGKFASFITQYSTGQVSVEIEWELQKENSKRWNPEIQYTSNYNKSVNVEFTVDANGVYSEPRPIGTRYLTRNL

SEQ ID NO: 135 - DNA, 3122 bp, Adeno-associated virus
  source 1..3122: mol_type = genomic DNA
agcggccgcgaattcgccctttctacggctgcgtcaactggaccaatgaaaactttcccttcaacgattgcgtcgacaagatggtgatctggtgggaggagggaaagatgaccgccaaggtcgtggaatctgccaaagccattctgggtggaagcaaggttcgtgtggaccagaaatgcaggtcttcggcccagatcgacccgactccggtgattgtcacctctaacaccaacatgtgcgccgtgattgacggaaactcgaccaccttcgagcaccagcagccgttgcaagaccggatgttcaaatttgaacttacccgccgtttggatcatgactttgggaaggtcaccaagcaggaagtcaaagactttttccggtgggctcaagatcacgtgactgaggtggagcatgagttctacgtcaaaaagggtggagccaagaaaaggcccgcccccgatgatgtatatataaatgagcccaagcgggcgcgcgagtcagttgcgcagccatcgacgtcagacgcggaagcttcgataaactacgcggacaggtaccaaaacaaatgttctcgtcacgtgggcatgaatctgatgctgtttccctgtcgacaatgcgaaagaatgaatcagaattcaaatatctgcttcacacacgggcaaaaagactgtttggaatgctttcccgtgtcagaatctcaacccgtttctgtcgtcagaaaaacgtatcagaaactttgttacattcatcatatcatgggaaaagtaccagacgcctgcactgcctgcgacctggtaaatgtggacttggatgactgtatttctgagcaataaatgacttaaatcaggtatggctgctgacggttatcttccagattggctcgaggacactctctctgaaggaatcagacagtggtggaagctcaaacctggcccaccaccgccgaaacctaaccaacaacaccgggacgacagtaggggtcttgtgcttcctgggtacaagtacctcggacccttcaacggactcgacaaaggagagccggtcaacgaggcagacgccgcggccctcgagcacgacaaagcctacgaccaccagctcaagcaaggggacaacccgtacctcaaatacaaccacgcggacgctgaatttcaggagcgtcttcaagaagatacgtctttcgggggcaacctcgggcgagcagtcttccaggccaaaaagagggtactcgagcctcttggtctggttgaggaagctgttaagacggctcctggaaaaaagagacctatagagcagtctcctgcagaaccggactcttcctcgggcatcggcaaatcaggccagcagcccgctaagaaaagactcaattttggtcagactggcgacacagagtcagtcccagaccctcaaccaatcggagaaccccccgcagccccctctggtgtgggatctaatacaatggcttcaggcggtggggcaccaatggcagacaataacgaaggcgccgacggagtgggtaattcctcgggaaattggcattgcgattccacatggatgggcgacagagttatcaccaccagcacaagaacctgggccctccccacctacaataatcgcctctacaagcaaatctccagcgaatcgggagccaccaacgacaaccactacttcggctacagcaccccctgggggtattttgactttaacagattccactgtcacttctcaccacgtgactggcagcgactcatcaacaacaactggggatttagacccaagaaactcaatttcaagctcttcaacatccaagtcaaggaggtcacgcagaatgatggaaccacgaccatcgccaataaccttaccagcacggtgcaggtcttcacagactctgagtaccagctgccctacgtcctcggttcggctcaccagggctgccttccgccgttcccagcagacgtcttcatgattcctcagtacggctacttgactctgaacaatggcagccaagcggtaggacgttcttcattctactgtctagagtattttccctctcagatgctgaggacgggaaacaacttcaccttcagctacacttttgaagacgtgcctttccacagcagctacgcgcacagccagagtctggatcggctgatgaatcctctcattgaccagtacctgtattacctgagcaaaactcagggtacaagtggaacaacgcagcaatcgagactgcagttcagccaagctgggcctagctccatggctcagcaggccaaaaactggctaccgggacccagctaccgacagcagcgaatgtctaagacggctaatgacaacaacaacagtgaatttgcttggactgcagccaccaaatattacctgaatggaagaaattctctggtcaatcccgggcccccaatggccagtcacaaggacgatgaggaaaagtatttccccatgcacggaaatctcatctttggaaaacaaggcacaggaactaccaatgtggacattgaatcagtgcttattacagacgaagaagaaatcagaacaactaatcctgtggctacagaacaatacggacaggttgccaccaaccatcagagtcagaacaccacagcttcctatggaagtgtggacagccagggaatcttacctggaatggtgtggcaggaccgcgatgtctatcttcaaggtcccatttgggccaaaactcctcacacggacggacactttcatccttctccgctcatgggaggctttggactgaaacaccctcctccccagatcctgatcaaaaacacacctgtgccagcgaatcccgcgaccactttcactcctggaaagtttgcttcgttcattacccagtattccaccggacaggtcagcgtggaaatagagtgggagctgcagaaagaaaacagcaaacgctggaacccagaaattcagtacacctccaactacaacaagtcggtgaatgtggagtttaccgtggacgcaaacggtgtttattctgaaccccgccctattggcactcgttaccttacccggaacttgtaatttcctgttaatgaataaaccgatttatgcgtttcagttgaactttggtctctgcgaagggcgaattc

SEQ ID NO: 136 - protein, 735 aa, synthetic construct
  REGION 1..735: note = Description of Artificial Sequence: Synthetic polypeptide
MAADGYLPDWLEDTLSEGIRQWWKLKPGPPPPKPNQQHRDDSRGLVLPGYKYLGPFNGLDKGEPVNEADAAALEHDKAYDHQLKQGDNPYLKYNHADAEFQERLQEDTSFGGNLGRAVFQAKKRVLEPLGLVEEAVKTAPGKKRPIEQSPAEPDSSSGIGKSGQQPAKKRLNFGQTGDTESVPDPQPIGEPPAAPSGVGSNTMASGGGAPMADNNEGADGVGNSSGNWHCDSTWMGDRVITTSTRTWALPTYNNRLYKQISSESGATNDNHYFGYSTPWGYFDFNRFHCHFSPRDWQRLINNNWGFRPKKLNFKLFNIQVKEVTQNDGTTTIANNLTSTVQVFTDSEYQLPYVLGSAHQGCLPPFPADVFMIPQYGYLTLNNGSQAVGRSSFYCLEYFPSQMLRTGNNFTFSYTFEDVPFHSSYAHSQSLDRLMNPLIDQYLYYLSKTQGTSGTTQQSRLQFSQAGPSSMAQQAKNWLPGPSYRQQRMSKTANDNNNSEFAWTAATKYYLNGRNSLVNPGPPMASHKDDEEKYFPMHGNLIFGKQGTGTTNVDIESVLITDEEEIRTTNPVATEQYGQVATNHQSQNTTASYGSVDSQGILPGMVWQDRDVYLQGPIWAKTPHTDGHFHPSPLMGGFGLKHPPPQILIKNTPVPANPATTFTPGKFASFITQYSTGQVSVEIEWELQKENSKRWNPEIQYTSNYNKSVNVEFTVDANGVYSEPRPIGTRYLTRNL

SEQ ID NO: 137 - DNA, 3121 bp, Adeno-associated virus
  source 1..3121: mol_type = genomic DNA
gaattcgcccttcgcagagaccaaagttcaactgaaacgaatcaaccggtttattgattaacaagcaattacagattacgggtgaggtaacgggtgccgatggggcgaggctcagaataagtgccatctgtgttaacagcaaagtccacatttgtagatttgtagtagttggaagtgtattgaatctctgggttccagcgtttgctgttttctttctgcagctcccattcaatttccacgctgacctgtccggtgctgtactgcgtgatgaacgacgccagcttagcttgactgaaggtagttggaggatccgcgggaacaggtgtattcttaatcaggatctgaggaggcgggtgtttcagtccaaagccccccatcagcggcgagggatgaaagtttccgtccgtgtgaggaatcttggcccagataggaccctgcaggtacacgtcccggttctgccagaccatgccaggtaaggctccttgactgttgacggcccctacaataggagcggcgttttgctgttgcaggttatcggccaccacgccgtactgttctgtggccactgggttggtggttttaatttcttcctcactggttagcataacgctgctatagtccacgttgccttttccagctccctgtttcccaaacattaagactccgctggacggaaaaaatcgctcttcgtcgtccttgtgggttgccatagcgacaccgggatttaccagagagtctctgccattcagatgatacttggtggcaccggtccaggcaaagttgctgttgttattttgcgacagtgtcgtggagacgcgttgctgccggtagcagggcccgggtagccagtttttggcctgagccgacatgttattaggcccggcctgagaaaatagcaactgctgagttcctgcggtacctcccgtggactgagtccgagacaggtagtacaggtactggtcgatgagggggttcatcagccggtccaggctttggctgtgcgcgtagctgctgtgaaaaggcacgtcctcaaactggtagctgaactcaaagttgttgcccgttctcagcatttgagaaggaaagtactccaggcagtagaaggaggaacggcccacggcctgactgccattgttcagagtcaggtacccgtactgaggaatcatgaagacgtccgccgggaacggaggcaggcagccctggcgcgcagagccgaggacgtacgggagctggtattccgagtccgtaaagacctgaatcgtgctggtaaggttattggcgatggtcttggtgccttcattctgcgtgacctccttgacctggatgttgaagagcttgaagttgagtctcttgggccggaatccccagttgttgttgatgagtcgctgccagtcacgtggtgagaagtggcagtggaatctgttaaagtcaaaatacccccagggggtgctgtagccgaagtaggtgttgtcgttggtgcttcctcccgaagtcccgttggagatttgcttgtagaggtggttgttgtaggtggggagggcccaggttcgggtgctggtggtgatgactctgtcgcccagccatgtggaatcgcaatgccaatttcctgaggaactacccactccgtcggcgccttcgttattgtctgccattggagcgccaccgcctgcagccattgtaccagatcccagaccagaggggcctgcggggggttctccgattggttgagggtcgggcactgactctgagtcgccagtctgcccaaagttgagtctctttttcgcgggctgctggcctttcttgccgatgcccgtagtggagtctggagaacgctggggtgatggctctaccggtctcttctttccaggagccgtcttagcgccttcctcaaccagaccgagaggttcgagaacccgcttcttggcctggaagactgctcgtccgaggttgcccccaaaagacgtatcttcttgcagacgctcctgaaactcggcgtcggcgtggttataccgcaggtacggattgtcacccgctttgagctgctggtcgtaggccttgtcgtgctcgagggccgctgcgtccgccgcgttgacgggctcccccttgtcgagtccgttgaagggtccgaggtacttgtagccaggaagcaccagaccccggccgtcgtcctgcttttgctggttggctttgggcttcggggctccaggtttcagcgcccaccactcgcgaatgccctcagagaggttgtcctcgagccaatctggaagataaccatcggcagccatacctgatctaaatcatttattgttcaaagatgcagtcatccaaatccacattgaccagatcgcaggcagtgcaagcgtctggcacctttcccatgatatgatgaatgtagcacagtttctgatacgcctttttgacgacagaaacgggttgagattctgacacgggaaagcactctaaacagtctttctgtccgtgagtgaagcagatatttgaattctgattcattctctcgcattgtctgcagggaaacagcatcagattcatgcccacgtgacgagaacatttgttttggtacctgtccgcgtagttgatcgaagcttccgcgtctgacgtcgatggctgcgcaactgactcgcgcacccgtttgggctcacttatatctgcgtcactgggggcgggtcttttcttggctccaccctttttgacgtagaattcatgctccacctcaaccacgtgatcctttgcccaccggaaaaagtctttgacttcctgcttggtgaccttcccaaagtcatgatccagacggcgggtgagttcaaatttgaacatccggtcttgcaacggctgctggtgttcgaaggtcgttgagttcccgtcaatcacggcgcacatgttggtgttggaggtgacgatcacgggagtcgggtctatctgggccgaggacttgcatttctggtccacgcgcaccttgcttcctccgagaatggctttggccgactccacgaccttggcggtcatcttcccctcctcccaccagatcaccatcttgtcgacacagtcgttgaagggaaagttctcattggtccagttgacgcagccgtagaagggcgaattc

SEQ ID NO: 138 - protein, 733 aa, synthetic construct
  REGION 1..733: note = Description of Artificial Sequence: Synthetic polypeptide
MAADGYLPDWLEDNLSEGIREWWDLKPGAPKLKANQQKQDDGRGLVLPGYKYLGPFHGLDKGEPVNAADAAALEHDKAYDQQLKAGDNPYLRYNHADAEFQERLQEDTSFGGNLGRAVFQAKKRVLEPLGLVEEGAKTAPGKKRPLESPQEPDSSSGIGKKGKQPAKKRLNFEEDTGAGDGPPEGSDTSAMSSDIEMRAAPGGNAVDAGQGSDGVGNASGDWHCDSTWSEGKVTTTSTRTWVLPTYNNHLYLRLGTTSNSNTYNGFSTPWGYFDFNRFHCHFSPRDWQRLINNNWGLRPKAMRVKIFNIQVKEVTTSNGETTVANNLTSTVQIFADSSYELPYVMDAGQEGSLPPFPNDVFMVPQYGYCGIVTGENQNQTDRNAFYCLEYFPSQMLRTGNNFEMAYNFEKVPFHSMYAHSQSLDRLMNPLLDQYLWHLQSTTSGETLNQGNAATTFGKIRSGDFAFYRKNWLPGPCVKQQRFSKTASQNYKIPASGGNALLKYDTHYTLNNRWSNIAPGPPMATAGPSDGDFSNAQLIFPGPSVTGNTTTSANNLLFTSEGEIAATNPRDTDMFGQIADNNQNATTAPITGNVTAMGVLPGMVWQNRDIYYQGPIWAKIPHADGHFHPSPLIGGFGLKHPPPQIFIKNTPVPANPATTFTAARVDSFITQYSTGQVAVQIEWEIEKERSKRRNPEVQFTSNYGNQSSMLWAPDTTGKYTEPRVIGSRYLTNHL

SEQ ID NO: 139 - protein, 735 aa, Adeno-associated virus
MAADGYLPDWLEDTLSEGIRQWWKLKPGPPPPKPNQQHRDDSRGLVLPGYKYLGPFNGLDKGEPVNEADAAALEHDKAYDHQLKQGDNPYLKYNHADAEFQERLQEDTSFGGNLGRAVFQAKKRVLEPLGLVEEAVKTAPGKKRPIEQSPAEPDSSSGIGKSGQQPAKKRLNFGQTGDTESVPDPQPIGEPPAAPSGVGSNTMASGGGAPMADNNEGADGVGNSSGNWHCDSTWMGDRVITTSTRTWALPTYNNHLYKQISSESGATNDNHYFGYSTPWGYFDFNRFHCHFSPRDWQRLINNNWGFRPKKLNFKLFNIQVKEVTQNDGTTTIANNLTSTVQVFTDSEYQLPYVLGSAHQGCLPPFPADVFMIPQYGYLTLNNGSQAVGRSSFYCLEYFPSQMLRTGNNFTFSYTFEDVPFHSSYAHSQSLDRLMNPLIDQYLYYLSKTQGTSGTTQQSRLQFSQAGPSSMAQQAKNWLPGPSYRQQRMSKTANDNNNSEFAWTAATKYYLNGRNSLVNPGPPMASHKDDEEKYFPMHGNLIFGKQGTGTTNVDIESVLITDEEEIRTTNPVATEQYGQVATNHQSQNTTASYGSVDSQGILPGMVWQDRDVYLQGPIWAKIPHTDGHFHPSPLMGGFGLKHPPPQILIKNTPVPANPATTFTPGKFASFITQYSTGQVSVEIEWELQKENSKRWNPEIQYTSNYNKSVNVEFTVDANGVYSEPRPIGTRYLTRNL

SEQ ID NO: 140 - DNA, 3127 bp, Adeno-associated virus
  source 1..3127: mol_type = genomic DNA
gcggccgcgaattcgcccttcgcagagaccaaagttcaactgaaacgaatcaaccggtttattgattaacatgcaattacagattacgggtgaggtaacgagtgccaatagggcgaggctcagagtaaacaccctggctgtcaacggcaaagtccacaccagtctgcttttcaaagttggaggtgtactgaatctccgggtcccagcgcttgctgttttccttctgcagctcccactcgatttccacgctgacttgtccggtgctgtactgtgtgatgaacgaagcaaacttggcaggagtaaacacctccggaggattagcgggaacgggagtgttcttgatcaggatctgaggaggcggatgtttaagtccaaagccgcccatcaaaggagacgggtgaaagttgccatccgtgtgaggaatcttggcccagatgggaccctgcaggtacacgtcccggttctgccagaccatgccaggtaaggctccctggttgttgacaacttgtgtctgggctgcagtattagccgcttgtaagttgctgctgactatcccgtattcttccgtggctacaggattagtaggacgaatttcttcttcatttgtcattaacacattttccaatgtagttttgttagttgctccagtttttccaaaaatcaggactccgctggatgggaaaaagcggtcctcgtcgtccttgtgagttgccatggcgacgccgggattaaccaacgagtttctgccgttcaggtgatatttggtggcaccagtccaagcaaagttgctgttgttgttttgatccagcgttttggagaccctttgttgccggaagcagggtccaggtaaccaattcttggcttgttcggccatagttgaaggcccgccctggtaaaactgcagttcccgattgccagctgtgcctcctgggtcactctgtgttctggccaggtagtacaagtactggtcgatgaggggattcatcagccggtccaggctctggctgtgtgcgtagctgctgtggaaaggcacgtcctcgaagctgtagctgaactcaaagttgttgcccgttctcagcatctgagaggggaagtactccaggcagtagaaggaggaacgtcccacagactgactgccattgttgagagtcaggtagccgtactgaggaatcatgaagacgtccgccgggaacggaggcaggcagccctggtgcgcagagccgaggacgtacggcagctggtattccgagtccgagaatacctgaatcgtgctggtaaggttattagcgatggtcgtaacgccgtcattcgtcgtgacctccttgacctggatgttgaagagcttgaaccgcagcttcttgggccggaatccccagttgttgttgatgagtcgctgccagtcacgtggtgagaagtggcagtggaatctgttaaagtcaaaatacccccagggggtgctgtagccgaagtaggtgttgtcgttggtactacctgcagtttcactggagatttgctcgtagaggtggttgttgtaggtgggcagggcccaggttcgggtgctggtggtaatgactctgtcgcccagccatgtggaatcgcaatgccaatttcctgaggcattacccactccgtcggcaccttcgttattgtctgccattggtgcgccaccgcctgcagccactgtaccagatcccacactagagggcgctgctggaggttctccgagaggttgagggtcggggactgactctgagtcgccagtctgaccgaaattgagtctctttctggcgggctgctggcccttcttgccgatgcccgtggaggagtcgggggaacgctgaggtgacggctctaccggtctcttctttgcaggagccgtcttagcgccttcctcaaccagaccgagaggttcgagaacccgcttcttggcctggaagactgctcgcccgaggttgcccccaaatgacgtatcttcttgcagacgctcctgaaactcggcgtcggcgtggttataccgcaggtacgggttgtcacccgcattgagctgctggtcgtaggccttgtcgtgctcgagggccgctgcgtccgccgcgttgacgggctcccccttgtcgagtccgttgaagggtccgaggtacttgtagccaggaagcaccagaccccggccgttgtcctgcttttgctggttggctttgggtttcggggctccaggtttcaggtcccaccactcgcgaatgccctcagagaggttgtcctcgagccaatctggaagataaccatcggcagccatacctgatttaaatcatttattgttcaaagatgcagtcatccaaatccacattgaccagatcgcaggcagtgcaagcgtctggcacctttcccatgatatgatgaatgtagcacagtttctgatacgcctttttgacgacagaaacgggtttagattctgacacgggaaagcactctaaacagtctttctgtccgtgagtgaagcagatatttgaattctgattcattctctcgcattgtctgcagggaaacagcatcagattcatgcccacgtgacgagaacatttgttttggtacctgtctgcgtagttgatcgaagcttccgcgtctgacgtcgatggctgcgcaactgactcgcgcacccgtttgggctcacttatatctgcgtcactgggggcgggtcttttcttggctccaccctttttgacgtagaattcatgctccacctcaaccacgtaatcctttgcccaccggaaaaagtctttgacttcctgcttggtgaccttcccaaagtcatgatccagacggcgggtgagttcaaatttgaacatccggtcttgcaacggctgctggtgttcgaaggtcgttgagttcccgtcgatcacggcgcacatgttggtgttggagatgacgatcgcgggagtcgggtctatctgggccgaggacttgcatttctggtccacgcgcaccttgcttcctccgagaatggctttggccgactccacgaccttggcggtcatcttcccctcctcccaccagatcaccatcttgtcgacacagtcgttgaagggaaagttctcattggtccagttgacgcagccgtagaaagggcgaattc

SEQ ID NO: 141 - protein, 728 aa, synthetic construct
  REGION 1..728: note = Description of Artificial Sequence: Synthetic polypeptide
MAADGYLPDWLEDNLSEGIREWWDLKPGAPKPKANQQKQDDGRGLVLPGYKYLRPFNGLDKGEPVNEADAAALEHDKAYDKQLEQGDNPYLKYNHADAEFQERLQEDTSFGGNLGRAVFQAKKRVLEPLGLVEEVAKTAPGKKRPIESPDSSTGIGKKGQQPAKKKLNFGQTGDSESVPDPQPLGEPPAAPSGLGSGTMAAGGGAPMADNNEGADGVGNASGNWHCDSTWLGDRVITTSTRTWALPTYNNHLYKQISSQSGATNDNHFFSYSTPWGYFDFNRFHCHFSPRDWQRLINNNWGFRPRKLRFKLFNIQVKEVTTNDGVTTIANNLTSTIQVFSDSEYQLPYVLGSAHQGCLPPFPADVFMIPQYGYLTLNNGSQSVGRSSFYCLEYFPSQMLRTGNNFEFSYTFEEVPFHSSYVHSQSLDRLMNPLIDQYLYYLARTQSTTGSTRELQFHQAGPNTMAEQSKNWLPGPCYRQQRLSKNIDSNNNSNFAWTGATKYHLNGRNSLTNPGVAMATNKDDEDQFFPINGVLVFGKTGAANKTTLENVLMTSEEEIKTTNPVATEEYGVVSSNLQSSTAGPQTQTVNSQGALPGMVWQNRDVCLQGPIWAKIPHTDGNFHPSPLMGGFGLKHPPPQILIKNTPVPANPPEVFTPAKFASFITQYSTGQVSVEIEWELQKENSKRWNPEIQYTSNYAKSNNVEFAVNNEGVYTEPRPIGTRYLTRNL

SEQ ID NO: 142 - DNA, 3106 bp, Adeno-associated virus
  source 1..3106: mol_type = genomic DNA
gcggccgcgaattcgcccttcgcagagaccaaagttcaactgaaacgaatcaaccggtttattgattaacaagtaattacaggttacgggtgaggtaacgggtgccaatggggcgaggctcagtataaaccccttcgttgttgacagcaaattccacattattagacttggcataatttgaggtgtactgaatctctggattccagcgtttgctgttttctttctgcagttcccactcgatctccacgctgacctggccggtgctgtactgcgtgataaatgaggcaaacttggcaggagtaaacacctctggaggattagcaggtaccggggtgtttttgatgagaatttgaggaggcgggtgtttgagtccaaatccgcccatcaggggagacgggtgaaagttgccgtccgtgtgaggaattttggcccagatgggaccctgcaggcacacgtcccggttctgccagaccatgccgggcagagccccctggctgttgacagtctgtgtctggggtccggccgtagacgattgcaggttgctggagaccacaccgtattcttctgtagccacgggattggtggttttgatctcctcctcgctggtcattagcacgttttccagcgttgtcttgttggcagcccccgttttgccaaaaaccagcactccgttgatgggaaagaactggtcctcgtcgtccttgttggtggccatggctacgcccgggttggttaatgaatttctaccattcagatggtatttagtggccccggtccaggcaaagttactgttgttgttgctgtctatgttttttgacagtctctgctgccgataacagggtccgggcagccagttctttgattgctcggccatggtgttgggcccagcctgatggaactgcagctcccttgtggaccccgtagtgctctgggtccgggccaggtagtacaggtactggtcgatgaggggattcatcagccggtctaggctctggctgtgcacatagctgctgtggaaaggcacttcctcaaaggtgtagctgaattcaaagttattgcccgttctcagcatctgagaaggaaagtactccaggcagtagaaggaggaacgtcccacagactgactgccgttgtttagagtcagatatccgtactgaggaatcatgaacacgtccgcagggaacggagggaggcagccctggtgcgcagagccgaggacgtacggcagttggtactccgagtccgagaagacctgaatcgtgctggtaaggttattagcgatggtcgtaacgccgtcgttcgtcgtgacctccttgacctggatgttgaacaacttgaaccgcagctttctgggccggaatccccagttgttgttgatgagtcgctgccagtcacgtggtgagaagtggcagtggaatctgttgaagtcaaaatagccccagggggtgctgtagctgaagaagtggttgtcgttggtagccccgctctgacttgatatctgcttgtagaggtggttgttgtaggtgggcagggcccaggtgcgggtgctggtggtgatgactctgtcgcccagccatgtggaatcgcaatgccaatttccggaggcattacccactccgtcggcgccttcgttattgtctgccattggtgcgccaccgcctgcagccattgtaccagatcccagacctgagggcgcggcgggaggttctccgagaggttgggggtcgggcactgactctgagtcgccagtctgcccaaagttgagcttctttttagcgggctgctggcctttcttgccgatgcccgtggaggagtcgggggattctatgggtctcttctttccaggagccgtcttagcgacttcctcaaccagaccgagaggttcgagaacccgcttcttggcctggaagactgctcgcccgaggttgcccccaaaagacgtatcttcttgaagacgctcctgaaactcggcgtcggcgtggttgtacttgaggtacgggttgtccccctgctcgagctgcttgtcgtaggccttgtcgtgctcgagggccgcggcgtctgcctcgttgaccggctctcccttgtcgagtccgttgaagggtctgaggtacttgtagccaggaagcaccagaccccggccgtcgtcctgcttttgctggttggctttgggtttcggggctccaggtttcaagtcccaccactcgcgaatgccctcagagaggttgtcctcgagccaatctggaagataaccatcggcagccatacctggtttaagtcatttattgctcagaaacacagtcatccaggtccacgttgaccagatcgcaggccgagcaagcaatctcgggagcccgccccagcagatgatgaatggcacagagtttccgatacgtcctctttctgacgaccggttgagattctgacacgccggggaaacattctgaacagtctctggtcccgtgcgtgaagcaaatgttgaaattctgattcactctctcgcatgtcttgcagggaaacagcatctgaagcatgcccgcgtgacgagaacatttgttttggtacctgtcggcaaagtccaccggagctccttccgcgtctgacgtcgatggattcgcgactgaggggcaggcccgcttgggctcgcttttatccgcgtcatcgggggcgggtctcttgttggccccaccctttctgacgtagaacccatgcgccacctcggtcacgtgatcctgcgcccagcggaagaaccttttgacttcctgctttgtcaccttgccaaagttatgctccagacggcgggtgggttcaaatttgaacatccggtcctgcaacggctgctggtgctcgaaggtggcgctgttcccgtcaatcacggcgcacatgttggtgttggaggtgacggtcacgggggtggggtcgatctgggcggacgacttgcacttttggtccacgcgcaccttgctgccgccgagaatggccttggcggactccacgaccttggccgtcatcttgccctcctcccaccagatcaccatcttgtcggcgcaatcgttgaagggaaagttctcattggtccagttgacgcagccgtagaaagggcgaattc

SEQ ID NO: 143 - protein, 728 aa, synthetic construct
  REGION 1..728: note = Description of Artificial Sequence: Synthetic polypeptide
MAADGYLPDWLEDNLSEGIREWWDLKPGAPKPKANQQKQDDGRGLVLPGYKYLGPFNGLDKGEPVNEADAAALEHDKAYDKQLEQGDNPYLKYNHADAEFQERLQEDTSFGGNLGRAVFQAKKRVLEPLGLVEEGAKTASGKKRPIESPDSSTGIGKKGQQPAKKKLNFGQTGDSESVPDPQPLGEPPAAPSGLGSGTMAAGGGAPMADNNEGADGVGNASGNWHCDSTWLGDRVITTSTRTWALPTYNNHLYKQISSQSGATNDNHFFGYSTPWGYFDFNRFHCHFSPRDWQRLINNNWGFRPRKLRFKLFNIQVKEVTTNDGVTTIANNLTSTIQVFSDSEYQLPYVLGSAHQGCLPPFPADVFMIPQYGYLTLNNGSQSVGRSSFCCLEYFPSQMLRTGNNFEFSYTFEEVPFHSSYAHSQSLDRLMNPLIDQYLYYLARTQSTTGSTRELQFHQAGPNTVAEQSKNWLPGPCYRQQRLSKNIDSNNNSNFAWTGATKYHLNGRNSLTNPGVAMATNKDDEDQFLPINGVLVFGKTGAANKTTLENVLMTSEEEIKTTNPVATEEYGVVSSNLQSSTAGPRTQTVNSQGALPGMVWQNRDVYLQGPIWAEIPHTDGNFHPSPLMGGFGLKHPPPQILIKNTPVPANPPEVFTPAKFASFITQYSTGQVSVEIEWELQKENSKRWNPEIQYTSNYAKSNNVEFAVNNEGVYTEPRPIGTRYLTRNL

SEQ ID NO: 144 - DNA, 3102 bp, Adeno-associated virus
  source 1..3102: mol_type = genomic DNA
gcggccgcgaattcgcccttcgcagagaccaaagttcaactgaaacgaatcaaccggtttattgattaacaagtaattacaggttacgggtgaggtaacgggtgccaatggggcgaggctcagtataaaccccttcgttgttgacagcaaattccacattattagacttggcataatttgaggtgtactgaatctctggattccagcgtttgctgttttctttctgcagttcccactcgatctccacgctgacctggccggtgctgtactgcgtgataaatgaggcaaacttggcaggagtaaacacctctggaggattagcaggtaccggggtgtttttgatgagaatttgaggaggcgggtgtttgagtccaaatccgcccatcaggggagacgggtgaaagttgccgtccgtgtgaggaatttcggcccagatgggaccctgcaggtacacgtcccggttctgccagaccatgccgggcagagccccctggctgttgacagtctgtgtccggggtccggccgtagacgattgcaggttgctggagaccacaccgtattcttctgtagccacgggattggtggttttgatctcctcctcgctggtcattagcacgttttccagcgttgtcttgttggcagcccccgttttgccaaaaaccagcactccgttgatgggaaggaactggtcctcgtcgtccttgttggtggccatggctacgcccgggttggttaatgaatttctaccattcagatggtatttagtggccccggtccaggcaaagttactgttgttgttgctgtctatgttttttgacagtctctgctgccgataacagggtccgggcagccagttctttgattgctcggccacggtgttgggcccagcctgatggaactgcagctcccttgtggaccccgtagtgctctgggtccgggccaggtagtacaggtactggtcgatgaggggattcatcagccggtccaggctctggctgtgcgcatagctgctgtggaaaggcacttcctcaaaggtgtagctgaattcaaagttattgcccgttctcagcatctgagaaggaaagtactccaggcagcagaaggaggaacgtcccacagactgactgccgttgtttagagtcagatatccgtactgaggaatcatgaacacgtccgcagggaacggagggaggcagccctggtgcgcagagccgaggacgtacggcagttggtactccgagtccgagaagacctgaatcgtgctggtaaggttattagcgatggtcgtaacgccgtcgttcgtcgtgacctccttgacctggatgttgaacaacttgaaccgcagctttctgggccggaatccccagttgttgttgatgagtcgctgccagtcacgtggtgagaagtggcagtggaatctgttgaagtcaaaatagccccagggggtgctgtagccgaagaagtggttgtcgttggtagccccgctctgacttgatatctgcttgtagaggtggttgttgtaggtgggcagggcccaggtgcgggtgctggtggtgatgactctgtcgcccagccatgtggaatcgcaatgccaatttccggaggcattacccactccgtcggcgccttcgttattgtctgccattggtgcgccaccgcctgcagccattgtaccagatcccagacctgagggcgcggcgggaggttctccgagaggttgggggtcgggcactgactctgagtcgccagtctgcccaaagttgagcttctttttagcgggctgctggcctttcttgccgatgcccgtggaggagtcgggggattctatgggtctcttctttccggaagccgtcttagcgccttcctcaaccagaccgagaggttcgagaacccgcttcttggcctggaagactgctcgcccgaggttgcccccaaaagacgtatcttcttgaagacgctcctgaaactcggcgtcggcgtggttgtacttgaggtacgggttgtccccctgctcgagctgcttgtcgtaggccttgtcgtgctcgagggccgcggcgtctgcctcgttgaccggctctcccttgtcgagtccgttgaagggtccgaggtacttgtagccaggaagcaccagaccccggccgtcgtcctgcttttgctggttggctttgggtttcggggctccaggtttcaagtcccaccactcgcgaatgccctcagagaggttgtcctcgagccaatctggaagataaccatcggcagccatacctggtttaagtcatttattgctcagaaacacagtcatccaggtccacgttgaccagatcgcaggccgagcaagcaatctcgggagcccgccccagcagatgatgaatggcacagagtttccgatacgtcctctttctgacgaccggttgagattctgacacgccggggaaacattctgaacagtctctggtcccgtgcgtgaagcaaatgttgaaattctgattcattctctcgcatgtcttgcagggaaacagcatctgaagcatgcccgcgtgacgagaacatttgttttggtacctgtcggcaaagtccaccggagctccttccgcgtctgacgtcgatggatccgcgactgaggggcaagcccgcttgggctcgcttttatccgcgtcatcgggggcgggtctcttgttggctccaccctttctgacgtagaactcatgcgccacctcggtcacgtgatcctgcgcccagcggaagaactctttgacttcctgctttgtcaccttgccaaagtcatgctccagacggcgggtgagttcaaatttgaacatccggtcttgtaacggctgctggtgctcgaaggtggtgctgttcccgtcaatcacggcgcacatgttggtgttggaagtgacgatcacgggggtgggatcgatctgggcggacgacttgcacttttggtccacgcgcaccttgctgccgccgagaatggccttggcggactccacgaccttggccgtcatcttgccctcctcccaccagatcaccatcttgtcgacgcaatcgttgaagggaaagttctcattggtccagttgacgcagccgaagggcgaattc

SEQ ID NO: 145 - protein, 728 aa, Adeno-associated virus
MAADGYLPDWLEDNLSEGIREWWDLKPGAPKPKANQQKQDDGRGLVLPGYRYLGPFNGLDKGEPVNEADAAALEHDKAYDKQLEQGDNPYLKYNHADAEFQERLQEDTSFGGNLGRAVFQAKKRVLEPLGLVEEGAKTAPGKKRPIESPDSSTGIGKNGQPPAKKKLNFGQTGDSESVPDPQPLGEPPAAPSGLGSGTMAAGGGAPMADNNEGADGVGNASGNWHCDSTWLGDRVITTSTRTWALPTYNNHLYKQISSQSGATNDNHFFGYSTPWGYFDFNRFHCHFSPRDWQRLINNNWGFRPRKLRFKLFNIQVKEVTTNDGVTTIANNLTSTIQVFSDSEYQLPYVLGSAHQGCLPPFPADVFMIPQYGYLTLNNGSQSVGRSSFYCLEYFPSQMLRTGNNFEFSYTFEEVPFHSSYAHSQSLDRLMNPLIDQYLYYLARTQSTTGSTRELQFHQAGPNTMAEQSKNWLPGPCYRQQRLSKNIDSNNNSNFAWTGATKYHLNGRNSLTNPGVAMATNKDDEDQFFPINGVLVFGKTGAANKTTLENVLMTSEEEIKTTNPVATEEYGVVSSNLQSSTAGPQTQTVNSQGALPGMVWQNRDVYLQGPIWAKIPHTDGNFHPSPLMGGFGLKHPPPQILIKNTPVPANPPEVFTPAKFASFITQYSTGQVSVEIEWELQKENSKRWNPEIQYTSNYAKSNNVEFAVNNEGVYTEPRPIGTRYLTRNL

SEQ ID NO: 146 - protein, 728 aa, synthetic construct
  REGION 1..728: note = Description of Artificial Sequence: Synthetic polypeptide
MAADGYLPDWLEGNLSEGIREWWDLKPGAPKPKANQQKQDDGRGLVLPGYRYLGPFNGLDKGEPVNEADAAALEHDKAYDKQLEQGDNPYLKYNHADAEFQERLQEDTSFGGNLGRAVFQAKKRVLEPLGLVEEGAKTAPGKKRPIESPDSSTGIGKNGQPPAKKKLNFGQTGDSESVPDPQPLGEPPAAPSGLGSGTMAAGGGAPMADNNEGADGVGNASGNWHCDSTWLGDRVITTSTRTWALPTYNNHLYKQISSQSGATNDNHFFGYSTPWGYFDFNRFHCHFSPRDWQRLINNNWGFRPRKLRFKLFNIQVKEVTTNDGVTTIANNLTSTIQVFSDSEYQLPYVLGSAHQGCLPPFPADVFMIPQYGYLTLNNGSQSVGRSSFYCLEYFPSQMLRTGDNFEFSYTFEEVPFHSSYAHSQSLDRLMNPLIDQYLYYLARTQSTTGSTRELQFHQAGPNTMAEQSKNWLPGPCYRQQRLSKNIDSNNNSNFAWTGATKYHLNGRNSLTNPGVAMATNKDDEDQFFPINGVLVFGKTGAANKTTLENVLMTSEEEIKTTNPVATEEYGVVSSNLQSSTAGPQTQTVNSQGALPGMVWQNRDVYLQGPIWAKIPHTDGNFHPSPLMGGFGLKHPPPQILIKNTPVPANPPEVFTPAKFASFITQYSTGQVSVEIEWELQKENSKRWNPEIQYTSNYAKSNNVEFAVNNEGVYTEPRPIGTRYLTRNL

SEQ ID NO: 147 - DNA, 3106 bp, Adeno-associated virus
  source 1..3106: mol_type = genomic DNA
gcggccgcgaattcgcccttcgcagagaccaaagttcaactgaaacgaatcagccggtttattgattaacaagtaattacaggttacgggtgaggtaacgggtgccaatggggcgaggctcagtataaaccccttcgttgttgacagcaaattccacattattagacttggcataatttgaggtgtactgaatctctggattccagcgtttgctgttttctttctgcagttcccactcgatctccacgctgacctggccggtgctgtactgcgtgataaatgaggcaaacttggcaggagtaaacacctctggaggattagcaggtaccggggtgtttttgatgagaatttgaggaggcgggtgtttgagtccaaatccgcccatcaggggagacgggtgaaagttgccgtccgtgtgaggaattttggcccagatgggaccctgcaggtacacgtcccggttctgccagaccatgccgggcagagccccctggctgttgacagtctgtgtctggggtccggccgtagacgattgcaggttgctggagaccacaccgtattcttctgtagccacgggattggtggttttgatctcctcctcgctggtcattagcacgttttccagcgttgtcttgttggcagcccccgttttgccaaaaaccagcactccgttgatgggaaagaactggtcctcgtcgtccttgttggtggccatggctacgcccgggttggttaatgaatttctaccattcagatggtatttagtggccccggtccaggcaaagttactgttgttgttgctgtctatgttttttgacagtctctgctgccgataacagggtccgggcagccagttctttgattgctcggccatggtgttgggcccagcctgatggaactgcagctcccttgtggaccccgtagtgctctgggtccgggccaggtagtacaggtactggtcgatgaggggattcatcagccggtccaggctctggctgtgcgcatagctgctgtggaaaggcacttcctcaaaggtgtagctgaattcaaagttatcgcccgttctcagcatctgagaaggaaagtactccaggcagtagaaggaggaacgtcccacagactgactgccgttgtttagagtcagatatccgtactgaggaatcatgaacacgtccgcagggaacggagggaggcagccctggtgcgcagagccgaggacgtacggcagttggtactccgagtccgagaagacctgaatcgtgctggtaaggttattagcgatggtcgtaacgccgtcgttcgtcgtgacctccttgacctggatgttgaacaacttgaaccgcagctttctgggccggaatccccagttgttgttgatgagtcgctgccagtcacgtggtgagaagtggcagtggaatctgttgaagtcaaaatagccccagggggtgctgtagccgaagaagtggttgtcgttggtagccccgctctgacttgatatctgcttgtagaggtggttgttgtaggtgggcagggcccaggtgcgggtgctggtggtgatgactctgtcgcccagccatgtggaatcgcaatgccaatttccggaggcattacccactccgtcggcgccttcgttattgtctgccattggtgcgccaccgcctgcagccattgtaccagatcccagacctgagggcgcggcgggaggttctccgagaggttgggggtcgggcactgactctgagtcgccagtctgcccaaagttgagcttctttttagcgggcggctggccgttcttgccgatgcccgtggaggagtcgggggattctatgggtctcttctttccaggagccgtcttagcgccttcctcaaccagaccgagaggttcgagaacccgcttcttggcctggaagactgctcgcccgaggttgcccccaaaagacgtatcttcttgaagacgctcctgaaactcggcgtcggcgtggttgtacttgaggtacgggttgtccccctgctcgagctgcttgtcgtaggccttgtcgtgctcgagggccgcggcgtctgcctcgttgaccggctctcccttgtcgagtccgttgaagggtccgaggtacctgtagccaggaagcaccagaccccggccgtcgtcctgcttttgctggttggctttgggtttcggggctccaggtttcaagtcccaccactcgcgaatgccctcagagaggttgccctcgagccaatctggaagataaccatcggcagccatacctggtttaagtcatttattgctcagaaacacagtcatccaggtccacgttggccagatcgcaggccgagcaagcaatctcgggagcccgccccagcagatgatgaatggcacagagtttccgatacgtcctctttctgacgaccggttgagattctgacacgccggggaaacattctgaacagtctctggtcccgtgcgtgaagcaaatgttgaaattctgattcattctctcgcatgtcttgcaggggaacagcatctgaagcatgcccgcgtgacgagaacatttgttttggtacctgtcggcaaagtccaccggagctccttccgcgtctgacgtcgatggatccgcgactgaggggcaggcccgcttgggctcgcttttatccgcgtcatcgggggcgggtctcttgttggctccaccctttctgacgtagaactcatacgccacctcggtcacgtgatcctgcgcccagcggaagaactctttgacttcctgctttgtcaccttgccaaagtcatgctccagacggcgggtgagttcaaatttgaacatccggtcttgtaacggctgctggtgctcgaaggtggtgctgttcccgtcaatcacggcgcacatgttggtgttggaagtgacgatcacgggggtgggatcgatctgggcggacgacttgcacttttggtccacgcgcaccttgctgccgccgagaatggccttggcggactccacgaccttggccgtcatcctgccctcctcccaccagatcaccatcttgtcgacgcaatcgttgaagggaaagttctcattggtccagttgacgcagccgtagaaagggcgaattc

SEQ ID NO: 148 - protein, 728 aa, synthetic construct
  REGION 1..728: note = Description of Artificial Sequence: Synthetic polypeptide
MAADGYLPDWLEDNLSEGIREWWDLKPGAPKPKANQQKQDDGRGLVLPGYKYLGPFNGLDKGEPVNEADAAALEHDKAYDKQLEQGDNPYLKYNHADAEFQERLQEDTSFGGNLGRAVFQAKKRVLEPLGLVEEGAKTAPGKKRPIESPDSSTGIGKKGQQPAKKKLNFGQTGDSESVPDPQPLGEPPAAPSGLGSGTMAAGGGAPMADNNEGADGVGNASGNWHCDSTWLGDRVITTSTRTWALPTYNNHLYKQISSQSGATNDNHFFGYSTPWGYFDFNRFHCHFSPRDWQRLINNNWGFRPRKLRFKLFNIQVKEVTTNDGVTTIANNLTSTIQVFSDSEYQLPYVLGSAHQGCLPPFPADVFMIPQYGYLTLNNGSQSMGRSSFYCLEYFPSQMLRTGNNFEFSYTFEEVPFHSSYAHSQSLDRLMNPLIDQYLYYLARTQSTTGSTRELQFHQAGPNTMAEQSKNWLPGPCYRQQRLSKNIDSNNNSNFAWTGATKYHLNGRNSLTNPGVAMATNKDDEGQFFPINGVLVFGKTGAANKTTLENVLMTSEEEIKTTNPVATEEYGVVSSNLQSSTAGPQTQTVNSQGALPGMVWQNRDVYLQGPIWAKIPHTDGNFHPSPLMGGFGLKHPPPQILIKNTPVPANPPGVFTPALFASFITQYSTGQVSVEIEWELQKENSKRWNPEIQYTSNYAKSNNVEFAVNNEGVYTEPRPIGTRYLTRNL

SEQ ID NO: 149 - DNA, 3098 bp, Adeno-associated virus
  source 1..3098: mol_type = genomic DNA
gaattcgcccttcgcagagaccaaagttcaactgaaacgaatcaaccggtttattgattaacaagtaattacaggttacgggtgaggtaacgggtgccaatggggcgaggctcagtataaaccccttcgttgttgacagcaaattccacattattagacttggcataatttgaggtgtactgaatctctggattccagcgtttgctgttttctttctgcagttcccactcgatctccacgctgacctggccggtgctgtactgcgtgataaatgaggcaaactaggcaggagtaaacacccctggaggattagcaggtaccggggtgtttttgatgagaatttgaggaggcgggtgtttgagtccaaatccgcccatcaggggagacgggtgaaagttgccgtccgtgtgaggaattttggcccagatgggaccctgcaggtacacgtcccggttctgccagaccatgccgggcagagccccctggctgttgacagtctgtgtctggggtccggccgtagacgattgcaggttgctggagaccacaccgtattcttctgtagccacgggattggtggttttgatctcctcctcgctggtcattagcacgttttccagcgttgtcttgttggcagcccccgttttgccaaaaaccagcactccgttgatgggaaagaactggccctcgtcgtccttgttggtggccatggctacgcccgggttggttaatgaatttctaccattcagatggtatttagtggccccggtccaggcaaagttactgttgttgttgctgtctatgttttttgacagtctctgctgccgataacagggtccgggcagccagttctttgattgctcggccatggtgttgggcccagcctgatggaactgcagctcccttgtggaccccgtagtgctctgggtccgggccaggtagtacaggtactggtcgatgaggggattcatcagccggtccaggctctggctgtgcgcatagctgctgtggaaaggcacttcctcaaaggtgtagctgaattcaaagttattgcccgttctcagcatctgagaaggaaagtactccaggcagtagaaggaggaacgtcccatagactgactgccgttgtttagagtcagatatccgtactgaggaatcatgaacacgtccgcagggaacggagggaggcagccctggtgcgcagagccgaggacgtacggcagttggtactccgagtccgagaagacctgaatcgtgctggtaaggttattagcgatggtcgtaacgccgtcgttcgtcgtgacctccttgacctggatgttgaacaacttgaaccgcagctttctgggccggaatccccagttgttgttgatgagtcgctgccagtcacgtggtgagaagtggcagtggaatctgttgaagtcaaaatagccccagggggtgctgtagccgaagaagtggttgtcgttggtagccccgctctgacttgatatctgcttgtagaggtggttgttgtaggtgggcagggcccaggtgcgggtgctggtggtgatgactctgtcgcccagccatgtggaatcgcaatgccaatttccggaggcattacccactccgtcggcgccttcgttattgtctgccattggtgcgccaccgcctgcagccattgtaccagatcccagacctgagggcgcggcgggaggttctccgagaggttgggggtcgggcactgactctgagtcgccagtctgcccaaagttgagcttctttttagcgggctgctggcctttcttgccgatgcccgtggaggagtcgggggattctatgggtctcttctttccaggagccgtcttagcgccttcctcaaccagaccgagaggttcgagaacccgcttcttggcctggaagactgctcgcccgaggttgcccccaaaagacgtatcttcttgaagacgctcctgaaactcagcgtcggcgtggttgtacttgaggtacgggttgtccccctgctcgagctgcttgtcgtaggccttgtcgtgctcgagggccgcggcgtctgcctcgttgaccggctctcccttgtcgagtccgttgaagggtccgaggtacttgtagccaggaagcaccagaccccggccgtcgtcctgcttttgctggttggctttgggtttcggggctccaggtttcaagtcccaccactcgcgaatgccctcagagaggttgtcctcgagccaatctggaagataaccatcggcagccatacctggtttaagtcatttattgctcagaaacacagtcatccaggtccacgttgaccagatcgcaggccgagcaagcaatctcgggagcccgccccagcagatgatgaatggcacagagtttccgatacgtcctctttctgacgaccggttgagattctgacacgccggggaaacattctgaacagtctctggtcccgtgcgtgaagcaaatgttgaaattctgattcattctctcgcatgtcttgcagggaaacagcatctgaagcatgcccgcgtgacgagaacatttgttttggtacctgtcggcaaagtccaccggagctccttccgcgtctgacgtcgatggatccgcgactgaggggcaggcccgcttgggctcgcttttatccgcgtcatcgggggcgggcctcttgttggctccaccctttctgacgtagaactcatgcgccacctcggtcacgtgatcctgcgcccagcggaagaactctttgacttcctgctttgtcaccttgccaaagtcctgctccagacggcgggtgagttcaaatttgaacatccggtcttgtaacggctgctggtgctcgaaggtggtgctgttcccgtcaatcacggcgcacatgttggtgttggaagtgacgatcacgggggtgggatcgatctgggcggacgacttgcacttttggtccacgcgcaccttgctgccgccgagaatggccttggcggactccacgaccttggccgtcatcttgccctcctcccaccagatcaccatcttgtcgacgcaatcgttgaagggaaagttctcattggtccagttgacgcagccgtagaaagggcgaattc

SEQ ID NO: 150 - DNA, 2187 bp, Adeno-associated virus
  source 1..2187: mol_type = genomic DNA
atggctgccgatggttatcttccagattggctcgagggcaacctctctgagggcattcgcgagtggtgggacttgaaacctggagccccgaaacccaaagccaaccagcaaaagcaggacgacggccggggtctggtgcttcctggctacaggtacctcggacccttcaacggactcgacaagggagagccggtcaacgaggcagacgccgcggccctcgagcacgacaaggcctacgacaagcagctcgagcagggggacaacccgtacctcaagtacaaccacgccgacgccgagtttcaggagcgtcttcaagaagatacgtcttttgggggcaacctcgggcgagcagtcttccaggccaagaagcgggttctcgaacctctcggtctggttgaggaaggcgctaagacggctcctggaaagaagagacccatagaatcccccgactcctccacgggcatcggcaagaacggccagccgcccgctaaaaagaagctcaactttgggcagactggcgactcagagtcagtgcccgacccccaacctctcggagaacctcccgccgcgccctcaggtctgggatctggtacaatggctgcaggcggtggcgcaccaatggcagacaataacgaaggcgccgacggagtgggtaatgcctccggaaattggcattgcgattccacatggctgggcgacagagtcatcaccaccagcacccgcacctgggccctgcccacctacaacaaccacctctacaagcagatatcaagtcagagcggggctaccaacgacaaccacttcttcggctacagcaccccctggggctattttgacttcaacagattccactgccacttctcaccacgtgactggcagcgactcatcaacaacaactggggattccggcccagaaagctgcggttcaagttgttcaacatccaggtcaaggaggtcacgacgaacgacggcgttacgaccatcgctaataaccttaccagcacgattcaggtcttctcggactcggagtaccaactgccgtacgtcctcggctctgcgcaccagggctgcctccctccgttccctgcggacgtgttcatgattcctcagtacggatatctgactctaaacaacggcagtcagtctgtgggacgttcctccttctactgcctggagtactttccttctcagatgctgagaacgggcgataactttgaattcagctacacctttgaggaagtgcctttccacagcagctatgcgcacagccagagcctggaccggctgatgaatcccctcatcgaccagtacctgtactacctggcccggacccagagcactacggggtccacaagggagctgcagttccatcaggctgggcccaacaccatggccgagcaatcaaagaactggctgcccggaccctgttatcggcagcagagactgtcaaaaaacatagacagcaacaacaacagtaactttgcctggaccggggccactaaataccatctgaatggtagaaattcattaaccaacccgggcgtagccatggccaccaacaaggacgacgaggaccagttctttcccatcaacggagtgctggtttttggcaaaacgggggctgccaacaagacaacgctggaaaacgtgctaatgaccagcgaggaggagatcaaaaccaccaatcccgtggctacagaagaatacggtgtggtctccagcaacctgcaatcgtctacggccggaccccagacacagactgtcaacagccagggggctctgcccggcatggtctggcagaaccgggacgtgtacctgcagggtcccatctgggccaaaattcctcacacggacggcaactttcacccgtctcccctgatgggcggatttggactcaaacacccgcctcctcaaattctcatcaaaaacaccccggtacctgctaatcctccagaggtgtttactcctgccaagtttgcctcatttatcacgcagtacagcaccggccaggtcagcgtggagatcgagtgggaactgcagaaagaaaacagcaaacgctggaatccagagattcagtacacctcaaattatgccaagtctaataatgtggaatttgctgtcaacaacgaaggggtttatactgagcctcgccccattggcacccgttacctcacccgtaacctgtaa

SEQ ID NO: 151 - protein, 728 aa, Adeno-associated virus; identical to SEQ ID NO: 146

SEQ ID NO: 152 - protein, 728 aa, Adeno-associated virus
MAADGYLPDWLEDNLSEGIREWWDLKPGAPKPKANQQKQDDGRGLVLPGYRYLGPFNGLDKGEPVNEADAAALEHDKAYDKQLEQGDNPYLKYNHADAEFQERLQEDTSFGGNLGRAVFQAKKRVLEPLGLVEEGAKTAPGKKRPIESPDSSTGIGKNGQPPAKKKLNFGQTGDSESVPDPQPLGEPPAAPSGLGSGTMAAGGGAPMADNNEGADGVGNASGNWHCDSTWLGDRVITTSTRTWALPTYNNHLYKQISSQSGATNDNHFFGYSTPWGYFDFNRFHCHFSPRDWQRLINNNWGFRPRKLRFKLFNIQVKEVTTNDGVTTIANNLTSTIQVFSDSEYQLPYVLGSAHQGCLPPFPADVFMIPQYGYLTLNNGSQSVGRSSFYCLEYFPSQMLRTGDNFEFSYTFEEVPFHSSYAHSQSLDRLMNPLIDQYLYYLARTQSTTGSTRELQFHQAGPNTMAEQSKNWLPGPCYRQQRLSKNIDSNNNSNFAWTGATKYHLNGRNSLTNPGVAMATNKDDEDQFFPINGVLVFGKTGAANKTTLENVLMTSEEEIKTTNPVATEEYGVVSSNLQSSTAGPQTQTVNSQGALPGMVWQNRDVYLQGPIWAKIPHTDGNFHPSPLMGGFGLKHPPPQILIKNTPVPANPPEVFTPAKFASFITQYSTGQVSVEIEWELQKENSKRWNPEIQYTSNYAKSNNVEFAVNNEGVYTEPRPIGTRYLTRNL

SEQ ID NO: 153 - protein, 728 aa, Adeno-associated virus; identical to SEQ ID NO: 145

SEQ ID NO: 154 - protein, 728 aa, Adeno-associated virus
MAADGYLPDWLEDNLSEGIREWWDLKPGAPKPKANQQKQDDGRGLVLPGYKYLGPFNGLDKGEPVNEADAAALEHDKAYDKQLEQGDNPYLKYNHADAEFQERLQEDTSFGGNLGRAVFQAKKRVLEPLGLVEEGAKTAPGKKRPIESPDSSTGIGKNGQPPAKKKLNFGQTGDSESVPDPQPLGEPPAAPSGLGSGTMAAGGGAPMADNNEGADGVGNASGNWHCDSTWLGDRVITTSTRTWALPTYNNHLYKQISSQSGATNDNHFFGYSTPWGYFDFNRFHCHFSPRDWQRLINNNWGFRPRKLRFKLFNIQVKEVTTNDGVTTIANNLTSTIQVFSDSEYQLPYVLGSAHQGCLPPFPADVFMIPQYGYLTLNNGSQSVGRSSFYCLEYFPSQMLRTGNNFEFSYTFEEVPFHSSYAHSQSLDRLMNPLIDQYLYYLARTQSTTGSTRELQFHQAGPNTMAEQSKNWLPGPCYRQQRLSKNIDSNNNSNFAWTGATKYHLNGRNSLTNPGVAMATNKDDEDQFFPINGVLVFGKTGAANKTTLENVLMTSEEEIKTTNPVATEEYGVVSSNLQSSTAGPQTQTVNSQGALPGMVWQNRDVYLQGPIWAKIPHTDGNFHPSPLMGGFGLKHPPPQILIKNTPVPANPPEVFTPAKFASFITQYSTGQVSVEIEWELQKENSKRWNPEIQYTSNYAKSNNVEFAVNNEGVYTEPRPIGTRYLTRNL

SEQ ID NO: 155 - protein, 728 aa, Adeno-associated virus
MAADGYLPDWLEDNLSEGIREWWDLKPGAPKPKANQQKQDDGRGLVLPGYKYLGPFNGLDKGEPVNEADAAALEHDKAYDKQLEQGDNPYLKYNHADAEFQERLQEDTSFGGNLGRAVFQAKKRVLEPLGLVEEGAKTAPGKKRPIESPDSSTGIGKKGQQPAKKKLNFGQTGDSESVPDPQPLGEPPAAPSGLGSGTMAAGGGAPMADNNEGADGVGNASGNWHCDSTWLGDRVITTSTRTWALPTYNNHLYKQISSQSGATNDNHFFGYSTPWGYFDFNRFHCHFSPRDWQRLINNNWGFRPRKLRFKLFNIQVKEVTTNDGVTTIANNLTSTIQVFSDSEYQLPYVLGSAHQGCLPPFPADVFMIPQYGYLTLNNGSQSVGRSSFYCLEYFPSQMLRTGNNFEFSYTFEEVPFHSSYAHSQSLDRLMNPLIDQYLYYLARTQSTTGSTRELQFHQAGPNTMAEQSKNWLPGPCYRQQRLSKNIDSNNNSNFAWTGATKYHLNGRNSLTNPGVAMATNKDDEDQFFPINGVLVFGKTGAANKTTLENVLMTSEEEIKTTNPVATEEYGVVSSNLQSSTAGPQTQTVNSQGALPGMVWQNRDVYLQGPIWAKIPHTDGNFHPSPLMGGFGLKHPPPQILIKNTPVPANPPEVFTPAKFASFITQYSTGQVSVEIEWELQKENSKRWNPEIQYTSNYAKSNNVEFAVNNEGVYTEPRPIGTRYLTRNL

SEQ ID NO: 156 - DNA, 2215 bp, synthetic construct
  misc_feature 1..2215: note = Description of Artificial Sequence: Synthetic polynucleotide
  source 1..2215: mol_type = other DNA
atggctgccgatggttatcttccagattggctcgaggacactctctctgaaggaataagacagtggtggaagctcaaacctggcccaccaccaccaaagcccgcagagcggcataaggacgacagcaggggtcttgtgcttcctgggtacaagtacctcggacccttcaacggactcgacaagggagagccggtcaacgaggcagacgccgcggccctcgagcacgacaaagcctacgaccggcagctcgacagcggagacaacccgtacctcaagtacaaccacgccgacgccgagttccaggagcggctcaaagaagatacgtcttttgggggcaacctcgggcgagcagtcttccaggccaaaaagaggcttcttgaacctcttggtctggttgaggaagcggctaagacggctcctggaaagaagaggcctgtagagcactctcctgtggagccagactcctcctcgggaaccggaaaggcgggccagcagcctgcaagaaaaagattgaattttggtcagactggagacgcagactcagtcccagaccctcaaccaatcggagaacctcccgcagccccctcaggtgtgggatctcttacaatggctgcaggcggtggcgcaccaatggcagacaataacgagggcgccgacggagtgggtaattcctcgggaaattggcattgcgattccacatggatgggcgacagagtcatcaccaccagcacccgaacctgggccctgcccacctacaacaaccacctctacaagcaaatctccaacagcacatctggaggatcttcaaatgacaacgcctacttcggctacagcaccccctgggggtattttgactttaacagattccactgccacttttcaccacgtgactggcagcgactcatcaacaacaactggggattccggcccaagagactcagcttcaagctcttcaacatccaggtcaaggaggtcacgcagaatgaaggcaccaagaccatcgccaataacctcaccagcaccatccaggtgtttacggactcggagtaccagctgccgtacgttctcggctctgcccaccagggctgcctgcctccgttcccggcggacgtgttcatgattccccagtacggctacctaacactcaacaacggtagtcaggccgtgggacgctcctccttctactgcctggaatactttccttcgcagatgctgagaaccggcaacaacttccagtttacttacaccttcgaggacgtgcctttccacagcagctacgcccacagccagagcttggaccggctgatgaatcctctgattgaccagtacctgtactacttgtctcggactcaaacaacaggaggcacgacaaatacgcagactctgggcttcagccaaggtgggcctaatacaatggccaatcaggcaaagaactggctgccaggaccctgttaccgccagcagcgagtatcaaagacatctgcggataacaacaacagtgaatactcgtggactggagctaccaagtaccacctcaatggcagagactctctggtgaatccgggcccggccatggcaagccacaaggacgatgaagaaaagtttttttcctcagagcggggttctcatctttgggaagcaaggctcagagaaaacaaatgtggacattgaaaaggtcatgattacagacgaagaggaaatcaggacaaccaatcccgtggctacggagcagtatggttctgtatctaccaacctccagagaggcaacagacaagcagctaccgcagatgtcaacacacaaggcgttcttccaggcatggtctggcaggacagagatgtgtaccttcaggggcccatctgggcaaagattccacacacggacggacattttcacccctctcccctcatgggtggattcggacttaaacaccctccgcctcagatcctgatcaagaacacgcctgtacctgcggatcctccgaccaccttcaaccagtcaaagctgaactctttcatcacccagtattctactggccaagtcagcgtggagatcgagtgggagctgcagaaggaaaacagcaagcgctggaaccccgagatccagtacacctccaactactacaaatctacaagtgtggactttgctgttaatacagaaggcgtgtactctgaaccccgccccattggcacccgttacctcacccgtaatctgtaa

SEQ ID NO: 157 - protein, 737 aa, synthetic construct
  REGION 1..737: note = Description of Artificial Sequence: Synthetic polypeptide
MAADGYLPDWLEDTLSEGIRQWWKLKPGPPPPKPAERHKDDSRGLVLPGYKYLGPFNGLDKGEPVNEADAAALEHDKAYDRQLDSGDNPYLKYNHADAEFQERLKEDTSFGGNLGRAVFQAKKRLLEPLGLVEEAAKTAPGKKRPVEHSPVEPDSSSGTGKAGQQPARKRLNFGQTGDADSVPDPQPIGEPPAAPSGVGSLTMAAGGGAPMADNNEGADGVGNSSGNWHCDSTWMGDRVITTSTRTWALPTYNNHLYKQISNSTSGGSSNDNAYFGYSTPWGYFDFNRFHCHFSPRDWQRLINNNWGFRPKRLSFKLFNIQVKEVTQNEGTKTIANNLTSTIQVFTDSEYQLPYVLGSAHQGCLPPFPADVFMIPQYGYLTLNNGSQAVGRSSFYCLEYFPSQMLKTGNNFQFTYTFEDVPFHSSYAHSQSLDRLMNPLIDQYLYYLSRTQTTGGTTNTQTLGFSQGGPNTMANQAKNWLPGPCYRQQRVSKTSADNNNSEYSWTGATKYHLNGRDSLVNPGPAMASHKDDEEKFFPQSGVLIFGKQGSEKTNVDIEKVMITDEEEIRTTNPVATEQYGSVSTNLQRGNRQAATADVNTQGVLPGMVWQDRDVYLQGPIWAKIPHTDGHFHPSPLMGGFGLKHPPPQILIKNTPVPADPPTTFNQSKLNSFITQYSTGQVSVEIEWELQKENSKRWNPEIQYTSNYYKSTSVDFAVNTEGVYSEPRPIGTRYLTRNL

SEQ ID NO: 158 - protein, 737 aa, synthetic construct
  REGION 1..737: note = Description of Artificial Sequence: Synthetic polypeptide
MAADGYLPDWLEDTLSEGIRQWWKLKPGPPPPKPAERHKDDSRGLVLPGYKYLGPFNGLDKGEPVNEADAAALEHDKAYDRQLDSGDNPYLKYNHADAEFQERLKEDTSFGGNLGRAVFQAKKRLLEPLGLVEEAAKTAPGKKRPVEHSPVEPDSSSGTGKAGQQPARKRLNFGQTGDADSVPDPQPIGEPPAAPSGVGSLTMAAGGGAPMADNNEGADGVGNSSGNWHCDSTWMGDRVITTSTRTWALPTYNNHLYKQISNSTSGGSSNDNAYFGYSTPWGYFDFNRFHCHFSPRDWQRLINNNWGFRPKRLSFKLFNIQVKEVTQNEGTKTIANNLTSTIQVFTDSEYQLPYVLGSAHQGCLPPFPADVFMIPQYGYLTLNNGSQAVGRSSFYCLEYFPSQMLKTGNNFQFTYTFEDVPFHSSYAHSQSLDRLMNPLIDQYLYYLSRTQTTGGTTNTQTLGFSQGGPNTMANQAKNWLPGPCYRQQRVSKTSADNNNSEYSWTGATKYHLNGRDSLVNPGPAMASHKDDEEKFFPQSGVLIFGKQGSEKTNVDIEKVMITDEEEIRTTNPVATEQYGSVSTNLQQGNTQAATADVNTQGVLPGMVWQDRDVYLQGPIWAKIPHTDGHFHPSPLMGGFGLKHPPPQILIKNTPVPADPPTTFNQSKLNSFITQYSTGQVSVEIEWELQKENSKRWNPEIQYTSNYYKSTSVDFAVNTEGVYSEPRPIGTRYLTRNL

SEQ ID NO: 159 - protein, 737 aa, synthetic construct
  REGION 1..737: note = Description of Artificial Sequence: Synthetic polypeptide
MAADGYLPDWLEDTLSEGIRQWWKLKPGPPPPKPAERHKDDSRGLVLPGYKYLGPFNGLDKGEPVNEADAAALEHDKAYDRQLDSGDNPYLKYNHADAEFQERLKEDTSFGGNLGRAVFQAKKRLLEPLGLVEEAAKTAPGKKRPVEHSPVEPDSSSGTGKAGQQPARKRLNFGQTGDADSVPDPQPIGEPPAAPSGVGSLTMAAGGGAPMADNNEGADGVGNSSGNWHCDSTWMGDRVITTSTRTWALPTYNNHLYKQISNSTSGGSSNDNAYFGYSTPWGYFDFNRFHCHFSPRDWQRLINNNWGFRPKRLSFKLFNIQVKEVTQNEGTKTIANNLTSTIQVFTDSEYQLPYVLGSAHQGCLPPFPADVFMIPQYGYLTLNNGSQAVGRSSFYCLEYFPSQMLRTGNNFQFTYTFEDVPFHSSYAHSQSLDRLMNPLIDQYLYYLSRTQTTGGTTNTQTLGFSQGGPNTMANQAKNWLPGPCYRQQRVSKTSADNNNSEYSWTGATKYHLNGRDSLVNPGPAMASHKDDEEKFFPQSGVLIFGKQGSEKTNVDIEKVMITDEEEIRTTNPVATEQYGSVSTNLQQGNTQAATADVNTQGVLPGMVWQDRDVYLQGPIWAKIPHTDGHFHPSPLMGGFGLKHPPPQILIKNTPVPADPPTTFNQSKLNSFITQYSTGQVSVEIEWELQKENSKRWNPEIQYTSNYYKSTSVDFAVNTEGVYSEPRPIGTRYLTRNL

SEQ ID NO: 160 - protein, 729 aa, synthetic construct
  REGION 1..729: note = Description of Artificial Sequence: Synthetic polypeptide
MAADGYLPDWLEDNLSEGIREWWDLKPGAPKPKANQQKQDDGRGLVLPGYKYLGPFNGLDKGEPVNAADAAALEHDKAYDQQLKAGDNPYLRYNHADAEFQERLQEDTSFGGNLGRAVFQAKKRVLEPLGLVEEGAKTAPGKKRPIDSPDSSTGIGKKGQQPAKKKLNFGQTGDSESVPDPQPLGEPPAAPSSVGSGTMAAGGGAPTADNNEGADGVGNASGNWHCDSTWLGDRVITTSTRTWALPTYNNHLYKQISSSSSGATNDNHYFGYSTPWGYFDFNRFHCHFSPRDWQRLINNNWGFRPKKLRFKLFNIQVKEVTTNDGVTTIANNLTSTVQVFSDSEYQLPYVLGSAHQGCLPPFPADVFMIPQYGYLTLNNGSQSVGRSSFYCLEYFPSQMLRTGNNFEFSYSFEDVPFHSSYAHSQSLDRLMNPLIDQYLYYLARTQSTTGSTRELQFHQAGPNTMAEQSKNWLPGPCYRQQRLSKNLDFNNNSNFAWTAATKYHLNGRNSLTNPGIPMATNKDDEDQFFPINGVLVFGKTGAANKTTLENVLMTSEEEIKTTNPVATEEYGVVSSNLQSSTAGPQSQTINSQGALPGMVWQNRDVYLQGPIWAKIPHTDGNFHPSPLMGGFGLEHPPPQILIKNTPVPANPPEVFTPAKFASFITQYSTGQVSVEIEWELQKENSKRWNPEIQYTSNYAKSNNVEFAVNPDGVYTEPRPIGTRYLTRNL

SEQ ID NO: 161 - DNA, 3075 bp, Adeno-associated virus
  source 1..3075: mol_type = genomic DNA
tgagaactttcctttcaacgattgcgtcggacaagatggtgatctggtgggaggaggggaagatgaccgccaaggtcgtggagtcggccaaagccattcttggaggaagcaaggtgcgtgtggaccagaaatgcaagtcctcggcccagatagacccgactcccgtgatcgtcacctccaacaccaacatgtgcgccgtgattgacgggaactcaacgaccttcgagcaccagcagccgttgcaagaccggatgttcaaatttgaacttacccgccgtctggatcatgactttggaaaggtcaccaagcaggaagtgaaagactttttccggtgggcaaaggatcacgtggttgaggtggagcatgaattctacgtcaaaaagggtggagctaagaaaagacccgcccccagtgacgcagatataagtgagcccaaacgggcgcgcgagtcagttgcgcagccatcaacgtcagacgcggaagcttcgatcaactacgcggacaggtaccaaaaacaaatgttctcgtcacgtgggcatgaatctgatgctgtttccctgcagacaatgcgagagaatgaatcagaattcaaatatctgcttcactcacggacagaaagactgtttagagtgctttcccgtgtcagaatctcaacccgtttctgtcgtcaaaaaggcgtatcagaaactgtgctacattcatcatatcatgggaaaggtgccagacgcttgcactgcctgcgatctggtcaatgtggatttggatgactgcatctctgaacaataaatgatttaaatcaggtatggctgccgatggttatcctccagattggctcgaggacactctctctgaagggataagacagtggtggaagctcaaacctggcccaccaccaccaaagcccgcagagcggcataaggacgacagcaggggtcttgtgcttcctgggtacaagtacctcggacccttcaacggactcgacaagggggagccggtcaacgaggcagacgccgcggccctcgagcacgacaaggcctacgaccggcagctcgacagcggagacaacccgtacctcaagtacaaccacgccgacgcagagtttcaggagcgccttaaagaagatacgtcttttgggggcaacctcggacgagcagtcttccaggcgaaaaagagggttcttgaacctctgggcctggttgaggaacctgttaagacggctccgggaaaaaagaggccggtagagcactctcctgtggagccagactcctcctcgggaaccggaaaagcgggccagcggcctgcaagaaaaagattaaattttggtcagactggagacgcagactccgtacctgacccccagcctctcggacagccaccagcagccccctctggtctgggatctactacaatggctacaggcagtggcgcaccaatggcagacaataacgagggtgccgatggagtgggtaattcctcaggaaattggcattgcgattcccaatggctgggcgacagagtcatcaccaccagcacccgaacctgggccctgcccacatacaacaaccacctctacaagcaaatctccagccaatcaggagccagcaacgacaaccactactttggctacagcaccccctgggggtattttgacttcaacagattccactgccacttttcaccacgtgactggcaaagactcatcaacaacaactggggattccggcccaaaagactcaacttcaagctctttaatattcaagtcaaagaggtcacgcagaatgacggtacgacgacgattgccaataaccttaccagcacggttcaggtgtttactgactcggagtaccagctcccgtacgtcctgggctcggcgcatcaaggatgcctcccgccgtttccagcggacgtcttcatggtcccacagtatggatacctcaccctgaacaacgggagtcaggcggtaggacgctcttccttttactgcctggagtactttccttctcagatgctgcgtactggaaacaactttcagttcagctacacttttgaagacgtgcctttccacagcagctacgctcacagccagagtctggatcggctgatgaatcctctgatcgaccagtacctgtattatctgaacaagacacaaacaaatagtggaactcttcagcagtctcggctactgtttagccaagctggaccaaccaacatgtctcttcaagctaaaaactggctgcctggaccttgctacagacagcagcgtctgtcaaaacaggcaaacgacaacaacaacagcaactttccctggactgcagctacaaagtatcatctaaatggccgggactcgttggttaatccaggaccagctatggccagtcacaaggatgacgaagaaaagtttttccccatgcatggaaccctgatatttggtaaacaaggaacaaatgccaacgacgcggatttggaaaatgtcatgattacagatgaagaagaaatcagggccaccaatcccgtggctacggagcagtacgggactgtgtcaaataatttgcaaaactcaaacactggtccaactactggaactgtcaatcgccaaggagcgttacctggtatggtgtggcaggatcgagacgtgtacctgcagggacccatttgggccaagattcctcacaccgatggacactttcatccttctccactgatgggaggttttggactcaaacacccgcctcctcagatcatgatcaaaaacactcccgttccagccaatcctcccacaaacttcagttctgccaagtttgcttctttcatcacacagtattccacgggacaggtcagcgtggagatcgagtgggagctgcagaaggagaacagcaaacgctggaatcccgaaattcagtacacttccaactacaacaagtctgttaatgtggactttactgtggacactaatggtgtgtattcagagcctcgccccattggcaccagatacctgactcgtaatctgtaattgcttgttaatcaataaaccgtttaattcgtttcagttgaactttggtctctgcgaagggcgaa

SEQ ID NO: 162 - DNA, 3142 bp, Adeno-associated virus
  source 1..3142: mol_type = genomic DNA
aaaacgacgggccagtgattgtaatacgactcactatagggcgaaattgaaattagcggccgcgaattcgcctttcgcagagaccaaagttcaactgaaacgaattaaacggtttattgattaacaagcaattacagattacgagtcaggtatctggtgccaatggggcgaggctctgaatacacaccattagtgtccacagtaaagtccacattaacagacttgttgtagttggaagtgtactgaatttcgggattccagcgtttgctgttctccttctgcagctcccactcgatctccacgctgacctgtcccgtggaatactgtgtgatgaaagaagcaaacttggcagaactgaagtttgtgggaggattggctggaacgggagtgtttttgatcatgatctgaggaggcgggtgtttgagtccaaaacctcccatcagtggagaaggatgaaagtgtccatcggtgtgaggaatcttggcccaaatgggtccctgcaggtacacgtctcgatcctgccacaccataccaggtaacgctccttggtgattgacagttccagtagttggaccagtgtttgagttttgcaaattatttgacacagtcccgtactgctccgtagccacgggattggtggccctgatttcttcttcatctgtaatcatgacattttccaaatccgcgtcgttggcatttgttccttgtttaccaaatatcagggttccatgcatggggaaaaacttttcttcgtcatccttgtgactggccatagctggtcctggattaaccaacgagtcccggccatttagatgatactttgtagctgcagtccagggaaagttgctgttgttgttgtcgtttgcctgttttgacagacgctgctgtctgtagcaaggtccaggcagccagtttttagcttgaagagacatgttggttggtccagcttggctaaacagtagccgagactgctgaagagttccactatttgtttgtgtcttgttcagataatacaggtactggtcgatcagaggattcatcagccgatccagactctggctgtgagcgtagctgctgtggaaaggcacgtcttcaaaagtgtagctgaactgaaagttgtttccagtacgcagcatctgagaaggaaagtactccaggcagtaaaaggaagagcgtcctaccgcctgactcccgttgttcagggtgaggtatccatactgtgggaccatgaagacgtccgctggaaacggcgggaggcatccttgatgcgccgagcccaggacgtacgggagctggtactccgagtcagtaaacacctgaaccgtgctggtaaggttattggcaatcgtcgtcgtaccgtcattctgcgtgacctctttgacttgaatattaaagagcttgaagttgagtcttttgggccggaatccccggttgttgttgacgagtctttgccagtcacgtggtgaaaagtggcagtggaatctgttgaagtcaaaatacccccagggggtgctgtagccaaagtagtggttgtcgttgctggctcctgattggctggagatttgcttgtagaggtggttgttgtatgtgggcagggcccaggttcgggtgctggtggtgatgactctgtcgcccagccattgggaatcgcaatgccaatttcctgaggaattacccactccatcggcaccctcgttattgtctgccattggtgcgccactgcctgtagccattgtagtagatcccagaccagagggggctgctggtggctgtccgagaggctgggggtcaggtacggagtctgcgtctccagtctgaccaaaatttaatctttttcttgcaggctgctggcccgcttttccggttcccgaggaggagtctggctccacaggagagtgctctaccggcctcttttttcccggagccgtcttaacaggctcctcaaccaggcccagaggttcaagaaccctctttttcgcctggaagactgctcgtccgaggttgcccccaaaagacgtatcttctttaaggcgctcctgaaactctgcgtcggcgtggttgtacttgaggtacgggttgtctccgctgtcgagctgccggtcgtaggccttgtcgtgctcgagggccgcggcgtctgcctcgttgaccggctcccccttgtcgagtccgttgaagggtccgaggtacttgtacccaggaagcacaagacccctgctgtcgtccttatgccgctctgcgggctttggtggtggtgggccaggtttgagcttccaccactgtcttattccttcagagagagtgtcctcgagccaatctggaagataaccatcggcagccatacctgatttaaatcatttattgttcagagatgcagtcatccaaatccacattgaccagatcgcaggcagtgcaagcgtctggcacctttcccatgatatgatgaatgtagcacagtttctgatacgcctttttgacgacagaaacgggttgagattctgacacgggaaagcactctaaacagtctttctgtccgtgagtgaagcagatatttgaattctgattcattctctcgcattgtctgcagggaaacagcatcagattcatgcccacgtgacgagaacatttgttttggtacctgtccgcgtagttgatcgaagcttccgcgtctgacgtcgatggctgcgcaactgactcgcgcgcccgtttgggctcacttatatctgcgtcactgggggcgggtcttttcttagctccaccctttttgacgtagaattcatgctccacctcaaccacgtgatcctttgcccaccggaaaaagtctttcacttcctgcttggtgacctttccaaagtcatgatccagacggcgggtaagttcaaatttgaacatccggtcttgcaacggctgctggtgctcgaaggtcgttgagttcccgtcaatcacggcgcacatgttggtgttggaggtgacgatcacgggagtcgggtctatctgggccgaggacttgcatttctggtccacacgcaccttgcttcctccaagaatggctttggccgactccacgaccttggcggtcatcttcccctcctcccaccagatcaccatcttgtcgacgcaatggtaaaaggaaagttctcattgg

SEQ ID NO: 163 - protein, 735 aa, Adeno-associated virus 2
MAADGYLPDWLEDTLSEGIRQWWKLKPGPPPPKPAERHKDDSRGLVLPGYKYLGPFNGLDKGEPVNEADAAALEHDKAYDRQLDSGDNPYLKYNHADAEFQERLKEDTSFGGNLGRAVFQAKKRVLEPLGLVEEPVKTAPGKKRPVEHSPVEPDSSSGTGKAGQQPARKRLNFGQTGDADSVPDPQPLGEPPATPAAVGPTTMASGGGAPMADNNEGADGVGNASGNWHCDSTWLGDRVITTSTRTWALPTYNNHLYKQISSASTGASNDNHYFGYSTPWGYFDFNRFHCHFSPRDWQRLINNNWGFRPKRLNFKLFNIQVKEVTQNDGTTTIANNLTSTVQVFTDSEYQLPYVLGSAHQGCLPPFPADVFMIPQYGYLTLNNGSQAVGRSSFYCLEYFPSQMLRTGNNFTFSYTFEDVPFHSSYAHSQSLDRLMNPLIDQYLYYLNRTQNQSGSAQDKALLFSRGSPAGMSVQPKNWLPGPCYRQQRVSKTKTDNNNSNFTWTGASKYNLNGRESIINPGTAMASHKDDKDKFFPMSGVMIFGKESAGASNTALDNVMITDEEEIKATNPVATERFGTVAVNFQSSSTDPATGDVHVMGALPGMVWQDRDVYLQGPIWAKIPHTDGHFHPSPLMGGFGLKHPPPQILIKNTPVPANPPAEFSATKFASFITQYSTGQVSVEIEWELQKENSKRWNPEVQYTSNYAKSANVDFTVDNNGLYTEPRPIGTRYLTRP

SEQ ID NO: 164 - protein, 740 aa, Adeno-associated virus 2
MAADGYLPDWLEDTLSEGIRQWWKLKPGPPPPKPAERHKDDSRGLVLPGYKYLGPFNGLDKGEPVNAADAAALEHDKAYDRQLDSGDNPYLKYNHADAEFQERLKEDTSFGGNLGRAVFQAKKRVLEPLGLVEEPVKTAPGKKRPVEHSPVEPDSSSGTGKAGQQPARKRLNFGQTGDADSVPDPQPLGQPPAAPSGLGTNTMATGSGAPMADNNEGADGVGNSSGNWHCDSTWMGDRVITTSTRTWALPTYNNHLYKQISSQSGASNDNHYFGYSTPWGYFDFNRFHCHFSPRDWQRLINNNWGFRPKRLNFKLFNIQVKEVTQNDGTTTIANNLTSTVQVFTDSEYQLPYVLGSAHQGCLPPFPADVFMVPQYGYLTLNNGSQAVGRSSFYCLEYFPSQMLRTGNNFTFSYTFEDVPFHSSYAHSQSLDRLMNPLIDQYLYYLSRTNTPSGTTTQSGLQFSQAGASDIRDQSRNWLPGPCYRQQRVSKTSADNNNSEYSWTGATKYHLNGRDSLVNPGPAMASHKDDEEKFFPQSGVLIFGKQGSEKTNVDIEKVMITDEEEIRTTNPVATEQYGSVSTNLQRGNRQAATADVNTQGVLPGMVWQDRDVYLQGPIWAKIPHTDGHFHPSPLMGGFGLKHPPPQILIKNTPVPANPSTTFSAAKFASFITQYSTGQVSVEIEWELQKENSKRWNPEIQYTSNYNKSVNVDFTVDTNGVYSEPRPIGTRYLTRNLLLAAA

SEQ ID NO: 165 - protein, 734 aa, Adeno-associated virus 2
MAADGYLPDWLEDTLSEGIRQWWKLKPGPPPPKPAERHKDDSRGLVLPGYKYLGPFNGLDKGEPVNEADAAALEHDKAYDRQLDSGDNPYLKYNHADAEFQERLKEDTSFGGNLGRAVFQAKKRVLEPLGLVEEPVKTAPGKKRPVEHSPVEPDSSSGTGKAGQQPARKRLNFGQTGDADSVPDPQPLGQPPAAPSGLGTNTMATGSGAPMADNNEGADGVGNSSGNWHCDSTWMGDRVITTSTRTWALPTYNNHLYKQISSQSGASNDNHYFGYSTPWGYFDFNRFHCHFSPRDWQRLINNNWGFRPKRLNFKLFNIQVKEVTQNDGTTTIANNLTSTVQVFTDSEYQLPYVLGSAHQGCLPPFPADVFMVPQYGYLTLNNGSQAVGRSSFYCLEYFPSQMLRTGNNFTFSYTFEDVPFHSSYAHSQSLDRLMNPLIDQYLYYLSRTNTPSGTTTQSGLQFSQAGASDIRDQSRNWLPGPCYRQQRVSKTSADNNNSEYSWTGATMYHLNGRDSLVNPGPAMASHKDDEEKFFPQSGVLIFGKQGSEKTNVDIEKVMITDEEEIRTTNPVATEQYGSVSTNLQRGNRQAATADVNTQGVLPGMVWQDRDVYLQGPIWAKIPHTDGHFHPSPLMGGFGLKHPPPQILIKNTPVPANPSTTFSAAKFASFITQYSTGQVSVEIEWELQKENSKRWNPEIQYTSNYNKSINVDFTVDTNGVYSEPRPIGTRYLTRN

SEQ ID NO: 166 - protein, 734 aa, Adeno-associated virus 2
MAADGYLPDWLEDTLSEGIRQWWKLKPGPPPPKPAERHKDDSRGLVLPGYKYLGPFNGLDKGEPVNEADAAALEHDKAYDRQLDSGDNPYLKYNHADAEFQERLKEDTSFGGNLGRAVFQAKKRVLEPLGLVEEPVKTAPGKKRPVEHSPVEPDSSSGTGKAGQQPARKRLNFGQTGDADSVPDPQPLGQPPAAPSGLGTNTMATGSGAPMADNNEGADGVGNSSGNWHCDSTWMGDRVITTSTRTWALPTYNNHLYKQISSQSGASNDNHYFGYSTPWGYFDFNRFHCHFSPRDWQRLINNNWGFRPKRLNFKLFNIQVKEVTQNDGTTTIANNLTSTVQVFTDSEYQLPYVLGSAHQGCLPPFPADVFMVPQYGYLTLNNGSQAVGRSSFYCLEYFPSQMLRTGNNFTFSYTFEDVPFHSSYAHSQSLDRLMNPLIDQYLYYLSRTNTPSGTTTQSGLQFSQAGASDIRDQSRNWLPGPCYRQQRVSKTSADNNNSEYSWTGATKYHLNGRDSLVNPGPAMASHKDDEEKFFPQSGVLIFGKQGSEKTNVDIEKVMITDEEEIRTTNPVATEQYGSVSTNLQRGNRQAATADVNTQGVLPGMVWQDRDVYLQGPIWAKIPHTDGHFHPSPLMGGFGLKHPPPQILIKNTPVPANPSTTFSEAKFASFITQYSTGQVSVEIEWELQKENSKRWNPEIQYTSNYNKSVNVDFTVDTNGVYSEPRPIGTRYLTRN

SEQ ID NO: 167 - protein, 739 aa, Adeno-associated virus 2
MAADGYLPDWLEDTLSEGIRQWWKLKPGPPPPKPAERHKDDSRGLVLPGYKYLGPFNGLDKGEPVNEADAAALEHDKAYDRQLDSGDNPYLKYNHADAEFQERLKEDTSFGGNLGRAVFQAKKRVLEPLGLVEEPVKTAPGKKRPVEHSPVEPDSSSGTGKAGQQPARKRLNFGQTGDADSVPDPQPLGQPPAAPSGLGTNTMATGSGAPMADNNEGADGVGNSSGNWHCDSTWMGDRVITTSTRTWALPTYNNHLYKQISSQSGASNDNHYFGYSTPWGYFDFNRFHCHFSPRDWQRLINNNWGFRPKRLNFKLFNIQVKEVTQNDGTTTIANNLTSTVQVFTDSEYQLPYVLGSAHQGCLPPFPADVFMVPQYGYLTLNNGSQAVGRSSFYCLEYFPSQMLRTGNNFTFSYTFEDVPFHSSYAHSQSLDRLMNPLIDQYLYYLSRTNTPSGTTTQSGLQFSQAGASDIRDQSRNWLPGPCYRQQRVSKTSADNNNSEYSWTGATKYHLNGRDSLVNPGPAMASHKDDEEKFFPQSGVLIFGKQGSEKTNVDIEKVMITDEEEIRTTNPVATEQYGSVSTNLQRGNRQAATADVNTQGVLPGMVWQDRDVYLQGPIWAKIPHTDGHFHPSPLMGGFGLKHPPPQILIKNTPVPANPSTTFSAAKFASFITQYSTGQVSVEIEWELQKENSKRWNPEIQYTSNYNKSVNVDFTVDTNGVYSEPRPIGTRYLTRNLLLAA

SEQ ID NO: 168 - protein, 725 aa, Adeno-associated virus 2
MAADGYLPDWLEDTLSEGIRQWWKLKPGPPPPKPAERHKDDSRGLVLPGYKYLGPFNGLDKGEPVNEADAAALEHDKAYDRQLDSGDNPYLKYNHADAEFQERLKEDTSFGGNLGRAVFQAKKRVLEPLGLVEEPVKTAPGKKRPVEHSPVEPDSSSGTGKAGQQPARKRLNFGQTGDADSVPDPQPLGQPPAAPSGLGTNTMATGSGAPMADNNEGADGVGNSSGNWHCDSTWMGDRVITTSTRTWALPTYNNHLYKQISSQSGASNDNHYFGYSTPWGYFDFNRFHCHFSPRDWQRLINNNWGFRPKRLNFKLFNIQVKEVTQNDGTTTIANNLTSTVQVFTDSEYQLPYVLGSAHQGCLPPFPADVFMVPQYGYLTLNNGSQAVGRSSFYCLEYFPSQMLRTGNNFTFSYTFEDVPFHSSYAHSQSLDRLMNPLIDQYLYYLSRTNTPSGTTTQSGLQFSQAGASDIRDQSRNWLPGPCYRQQRVSKTSADNNNSEYSWTGATKYHLNGRDSLVNPGPAMASHKDDEEKFFPQSGVLIFGKQGSEKTNVDIEKVMITDEEEIRTTNPVATEQYGSVSTNLQRGNRQAATADVNTQGVLPGMVWQDRDVYLQGPIWAKIPHTDGHFHPSPLMGGFGLKHPPPQILIKNTPVPANPSTTFSAAKFASFITQYSTGQVSVEIEWELQKENSKRWNPEIQYTSNYNKSVNVDFTVDTNGVYSEPRP

SEQ ID NO: 169 - protein, 707 aa, Adeno-associated virus 2
MAADGYLPDWLEDTLSEGIRQWWKLKPGPPPPKPAERHKDDSRGLVLPGYKYLGPFNGLDKGEPVNEADAAALEHDKAYDRQLDSGDNPYLKYNHADAEFQERLKEDTSFGGNLGRAVFQAKKRVLEPLGLVEEPVKTAPGKKRPVEHSPVEPDSSSGTGKAGQQPARKRLNFGQTGDADSVPDPQPLGQPPAAPSGLGTNTMATGSGAPMADNNEGADGVGNSSGNWHCDSTWMGDRVITTSTRTWALPTYNNHLYKQISSQSGASNDNHYFGYSTPWGYFDFNRFHCHFSPRDWQRLINNNWGFRPKRLNFKLFNIQVKEVTQNDGTTTIANNLTSTVQVFTDSEYQLPYVLGSAHQGCLPPFPADVFMVPQYGYLTLNNGSQAVGRSSFYCLEYFPSQMLRTGNNFTFSYTFEDVPFHSSYAHSQSLDRLMNPLIDQYLYYLSRTNTPSGTTTQSGLQFSQAGASDIRDQSRNWLPGPCYRQQRVSKTSADNNNSEYSWTGATKYHLNGRDSLVNPGPAMASHKDDEEKFFPQSGVLIFGKQGSEKTNVDIEKVMITDEEEIRTTNPVATEQYGSCIYQPPERQQTSSYRRCQHTRRSSRHGLAGQRCVPSGAHLGKDSTHGRTFSPLSPHGWIRTTPSSTDSHQEHPGTCESFDHLQCGKVCFLHHTVLHGTGQRGDRVRAAEGKQQTLESRNSVHFQLQQVC

SEQ ID NO: 170 - protein, 739 aa, Adeno-associated virus 2; identical to SEQ ID NO: 167

SEQ ID NO: 171 - protein, 737 aa, Adeno-associated virus 2
MASDGYLPDWLEDNLSEGIREWWDLKPGAPKPKANQQKQDDGRGLVLPGYKYLGPFNGLDKGEPVNAADAAALEHDKAYDQQLKAGDNPYLRYNHADAEFQERLQEDTSFGGNLGRAVFQAKKRVLEPFGLVEEGAKTAPGKKRPVEQSPQEPDSSSGIGKTGQQPAKKRLNFGQTGDSESVPDPQPLGEPPATPAAVGPTTMASGGGAPMADNNEGADGVGNASGNWHCDSTWLGDRVITTSTRTWALPTYNNHLYKQISSASTGASNDNHYFGYSTPWGYFDFNRFHCHFSPRDWQRLINNNWGFRPKRLNFKLFNIQVKEVTTNDGTTTIANNLTSTVQVFTDSEYQLPYVLGSAHQGCLPPFPADVFMVPQYGYLTLNNGSQAVGRSSFYCLEYFPSQMLRTGNNFTFSYTFEDVPFHSSYAHSQSLDRLMNPLIDQYLYYLSRTNTPSGTTTQSGLQFSQAGASDIRDQSRNWLPGPCYRQQRVSKTSADNNNSEYSWTGATKYHLNGRDSLVNPGPAMASHKDDEEKFFPQSGVLIFGKQGSEKTNVDIEKVMITDEEEIRTTNPVATEQYGSVSTNLQRGNRQAATADVNTQGVLPGMVWQDRDVYLQGPIWAKIPHTDGHFHPSPLMGGFGLKHHPPQILIKNTPVPANPSTTFSAAKFASFITQYSTGQVSVEIEWELQKENSKRWNPEIQYTSNYNKSVNVDFTVDTNGVYSEPRPIGTRYLTRNLL

SEQ ID NO: 172 - protein, 741 aa, Adeno-associated virus 2
MAADGYLPDWLEDTLSEGIREWWALKPGAPKPKANQQKQDDGRGLVLPGYKYLGPFNGLDKGEPVNEADAAALEHDKAYDQQLQAGDNPYLRYNHADAEFQERLQEDTSFGGNLGRAVFQAKKRVLEPLGLVEEPVKTAPGKKRPVEHSPVEPDSSSGTGKSGQQPARKRLNFGQTGDADSVPDPQPLGQPPAAPSGLGTNTMATGSGAPMADNNEGADGVGNSSGNWHCDSTWMGDRVITTSTRTWALPTYNNHLYKQISSQSGASNDNHYFGYSTPWGYFDFNRFHCHFSPRDWQRLINNNWGFRPKRLNFKLFNIQVKEVTQNDGTTTIANNLTSTVQVFTDSEYQLPYVLGSAHQGCLPPFPADVFMVPQYGYLTLNNGSQAVGRSSFYCLEYFPSQMLRTGNNFTFSYTFEDVPFHSSYAHSQSLDRLMNPLIDQYLYYLSRTNTPSGTTTQSGLQFSQAGASDIRDQSRNWLPGPCYRQQRVSKTSADNNNSEYSWTGATKYHLNGRDSLVNPGPAMASHKDDEEKFFPQSGVLIFGKQGSEKTNVDIEKVMITDEEEIRTTNPVATEQYGSVSTNLQRGNLANHNNTTNARQAATADVNTQGVLPGMVWQDRDVYLQGPIWAKIPHTDGHFHPSPLMGGFGLKHPPPQILIKNTPVPANPSTTFSAAKFASFITQYSTGQVSVEIEWELQKENSKRWNPEIQYTSNYNKSINVDFTVDTNGVYSEPRPIGTRYL

SEQ ID NO: 173 - protein, 730 aa, Adeno-associated virus 2
MASDGYLPDWLEDNLSEGIREWWDLKPGAPKPKANQQKQDDGRGLVLPGYKYLGPFNGLDKGEPVNAADAAALEHDKAYDQQLKAGDNPYLRYNHADAEFQERLQEDTSFGGNLGRAVFQAKKRVLEPFGLVEEGAKTAPGKKRPVEQSPQEPDSSSGIGKTGQQPAKKRLNFGQTGDSESVPDPQPLGEPPATPAAVGPTTMASGGGAPMADNNEGADGVGNASGNWHCDSTWLGDRVITTSTRTWALPTYNNHLYKQISSASTGASNDNHYFGYSTPWGYFDFNRFHCHFSPRDWQRLINNNWGFRPKRLNFKLFNIQVKEVTTNDGVTTIANNLTSTVQVFSDSEYQLPYVLGSAHQGCLPPFPADVFMIPQYGYLTLNNGSQAVGRSSFYCLEYFPSQMLRTGNNFTFSYTFEDVPFHSSYAHSQSLDRLMNPLIDQYLYYLNRTQNQSGSAQNNDLLFSRGSPAGMSVQPKNWLPGPCYRQQRVSKTKTDNNNSNFTWTGASKYNLNGRESIINPGTAMASHKDDKDKFFPMSGVMIFGKESAGASNTALDNVMITDEEEIKATNPVATERFGTVAVNLQSSSTDPATGDVHVMGALPGMVWQDRDVYLQGPIWAKIPHTDGHFHPSPLMGGFGLKNPPPQILIKNTPVPANPPAEFSATKFASFITQYSTGQVSVEIEWELQKENSKRWNPEVQYTSNYAKSANVDFTVDNNGLYTEPRPIGTR

SEQ ID NO: 174 - protein, 735 aa, Adeno-associated virus 2
  VARIANT 239: note = Xaa = any amino acid
MASDGYLPDWLEDNLSEGIREWWDLKPGAPKPKANQQKQDDGRGLVLPGYKYLGPFNGLDKGEPVNAADAAALEHDKAYDQQLKAGDNPYLRYNHADAEFQERLQEDTSFGGNLGRAVFQAKKRVLEPFGLVEEGAKTAPGKKRPVEQSPQEPDSSSGIGKTGQQPAKKRLNFGQTGDSESVPDPQPLGEPPATPAAVGPTTMASGGGAPMADNNEGADGVGNASGNWHCDSTWLGDRXITTSTRTWALPTYNNHLYKQISSASTGASNDNHYFGYSTPWGYFDFNRFHCHFSPRDWQRLINNNWGFRPKRLNFKLFNIQVKEVTTNDGVTTIANNLTSTVQVFSDSEYQLPYVLGSAHQGCLPPFPADVFMIPQYGYLTLNNGSQAVGRSSFYCLEYFPSQMLRTGNNFTFSYTFEDVPFHSSYAHSQSLDRLMNPLIDQYLYYLNRTQNQSGSAQNNDLLFSRGSPAGMSVQPKNWLPGPCYRQQRVSKTKTDNNNSNFTWTGASKYNLNGRESIINPGTAMASHKDDKDKFFPMSGVMIFGKESAGASNTALDNVMITDEEEIKATNPVATERFGTVAVNLQSSSTDPATGDVHVMGALPGMVWQDRDVYLQGPIWAKIPHTDGHFHPSPLMGGFGLKNPPPQILIKNTPVPANPPAEFSATKFASFITQYSTGQVSVEIEWELQKENSKRWNPEVQYTSNYAKSANVDFTVDNNGLYTEPRPIGTRYLTRP

SEQ ID NO: 175 - protein, 733 aa, Adeno-associated virus 2
MASDGYLPDWLEDNLSEGIREWWDLKPGAPKPKANQQKQDDGRGLVLPGYKYLGPFNGLDKGEPVNAADAAALEHDKAYDQQLKAGDNPYLRYNHADAEFQERLQEDTSFGGNLGRAVFLAKKRVLEPFGLVEEGAKTAPGKKRPVEQSPQEPDSSSGIGKTGQQPAKKRLNFGQTGDSESVPDPQPLGEPPATPAAVGPTTMASGGGAPMADNNEGADGVGNASGNWHCDSTWLGDRVITTSTRTWALPTYNNHLYKQISSASTGASNDNHYFGYSTPWGYFDFNRFHCHFSPRDWQRLINNNWGFRPKRLNFKLFNIQVKEVTTNDGVTTIANNLTSTVQVFSDSEYQLPYVLGSAHQGCLPPFPADVFMIPQYGYLTLNNGSQAVGRSSFYCLEYFPSQMLRTGNNFTFSYTFEDVPFHSSYAHSQSLDRLMNPLIDQYLYYLNRTQNQSGSAQNNDLLFSRGSPAGMSVQPKNWLPGPCYRQQRVSKTKTDNNNSNFTWTGASKYNLNGRESIINPGTAMASHKDDKDKFFPMSGVMIFGKESAGASNTALDNVMITDEEEIKATNPVATERFGTVAVNLQSSSTDPATGDVHVMGALPGMVWQDRDVYLQGPIWAKIPHTDGHFHPSPLMGGFGLKNPPPQILIKNTPVPANPPAEFSATKFASFITQYSTGQVSVEIEWELQKENSKRWNPEVQYTSNYAKSANVDFTVDNNGLYTEPRPIGTRYLT

SEQ ID NO: 176 - protein, 734 aa, Adeno-associated virus 2
MAADGYLPDWLEDTLSEGIRQWWKLKPGPPPPKPAERHKDDSRGLVLPGCKYLGPFNGLDKGEPVNEADAAALEHDKAYDRQLDSGDNPYLKYNHADAEFQERLKEDTSFGGNLGRAVFQAKKRVLEPLGLVEEPVKTAPGKKRPVEHSPVEPDSSSGTGKAGQQPARKRLNFGQTGDADSVPDPQPLGQPPAAPSGLGTNTMATGSGAPMADNNEGADGVGNSSGNWHCDSTWMGDRVITTSTRTWALPTYNNHLYKQISSQSGASNDNHYFGYSTPWGYFDFNRFHCHFSPRDWQRLINNNWGFRPKRLNFKLFNIQVKEVTQNDGTTTIANNLTSTVQVFSDSEYQLPYVLGSAHQGCLPPFPADVFMIPQYGYLTLNNGSQAVGRSSFYCLEYFPSQMLRTGNNFTFNYTFEDVPFHSSYAHSQSLDRLMNPLIDQYLYYLNRTQNQSGSAQNNDLLFSRGSPAGMSVQPKNWLPGPCYRQQRVSKTKTDNNNSNFTWTGASKYNLNGRESIINPGTAMASHKDDKDKFFPMSGVMIFGKESAGASNTALDNVMITDEEEIKATNPVATERFGTVAVNLQSSSTDPATGDVHVMGALPGMVWQDRDVYLQGPIWAKIPHTDGHFHPSPLMGGFGLKNPPPQILIKNTPVPANPPAEFSATKFASFITQYSTGQVSVEIEWELQKENSKRWNPEVQYTSNYAKSANVDFTVDNNGLYTEPRPIGTRYLTRP

SEQ ID NO: 177 - protein, 734 aa, Adeno-associated virus 2
MAADGYLPDWLEDTLSEGIRQWWKLKPGPPPPKPAERHKDDSRGLVLPGYKYLGPFNGLDKGEPVNEADAAALEHDKAYDRQLDSGDNPYLKYNHADAEFQERLKEDTSFGGNLGRAVFQAKKRVLEPLGLVEEPVKTAPGKKRPVEHSPVEPDSSSGTGKAGQQPARKRLNFGQTGDADSVPDPQPLGQPPAAPSGLGTNTMATGSGAPMADNNEGADGVGNSSGNWHCDSTWMGDRVITTSTRTWALSTYNNHLYKQISSQSGASNDNHYFGYSTPWGYFDFNRFHCHFSPRDWQRLINNNWGFRPKRLNFKLFNIQVKEVTQNDGTTTIANNLTSTVQVFTDSEYQLPYVLGSAHQGCLPPFPADVFMVPQYGYLTLNNGSQAVGRSSFYCLEYFPSQMLRTGNNFTFSYTFEDVPFHSSYAHSQSLDRLMNPLIDQYLYYLSRTNTPSGTTTQSRLQFSQAGASDIRDQSRNWLPGPCYRQQRVSKTSADNNNSEYSWTGATKYHLNGRDSLVNPGPAMASHKDDEEKFFPQSGVLIFGKQGSEKTNVDIEKVMITDEEEIRTTNPVATEQYGSVSTNLQRGNRQAATADVNTQGVLPGMVWQDRDVYLQGPIWAKIPHTDGHFHPSPLMGGFGLKHPPPQILIKNTPVPANPSTTFSAAKFASFITQYSTGQVSVEIEWELQKENSKRWNPEIQYTSNYNKSINVDFTVDTNGVYSEPRPIGTRYLTRN

SEQ ID NO: 178 - protein, 738 aa, Adeno-associated virus 2
MAADGYLPDWLEDTLSEGIRQWWKLKPGPPPPKPAERHKDDSRGLVLPGYKYLGPFNGLDKGEPVNEADAAALEHDKAYDRQLDGGDNPYLKYNHADAEFQERLKEDTSFGGNLGRAVFQAKKRVLEPLGLVEEPVKTAPGKKRPVEHSPVEPDSSSGTGKAGQQPARKRLNFGQTGDADSVPDPQPLGQPPAAPSGLGTNTMATGSGAPMADNNEGADGVGNSSGNWHCDSTWMGDRVITTSTRTWALPTYNNHLYKQISSQSGASNDNHYFGYSTPWGYFDFNRFHCHFSPRDWQRLINNNWGFRPKRLNFKLFNIQVKEVTQNDGTTTIANNLTSTVQVFTDSEYQLPYVLGSAHQGCLPPFPADVFMVPQYGYLTLNNGSQAVGRSSFYCLEYFPSQMLRTGNNFTFSYTFEDVPFHSSYAHSQSLDRLMNPLIDQYLYYLSRTNTPSGTTTQSGLQFSQAGASDIRDQSRNWLPGPCYRQQRVSKTSADNNNSEYSWTGATKYHLNGRDSLVNPGPAMASHKDDEEKFFPQSGVLIFGKQGSEKTNVDIEKVMITDEEEIRTTNPVATEQYGSVSTNLQRGNRQAATADVNTQGVLPGMVWQDRDVYLQGPIWAKIPHTDGHFHPSPLMGGFGLKHPPPQILIKNTPVPANPSTTFSAAKFASFITQYSTGQVSVEIEWELQKENSKRWNPEIQYTSNYNKSVNVDFTVDTNGVYSEPRPIGTRYLTRNLLRP

SEQ ID NO: 179 - DNA, 2208 bp, Adeno-associated virus
  source 1..2208: mol_type = genomic DNA
atggctgccgatggttatcttccagattggctcgaggacactctctctgaaggaataagacagtggtggaagctcaaacctggcccaccaccaccaaagcccgcagagcggcataaggacgacagcaggggtcttgtgcttcctgggtacaagtacctcggacccttcaacggactcgacaagggggagccggtcaacgaggcagacgccgcggccctcgagcacgacaaggcctacgaccggcagctcgacagcggagacaacccgtacctcaagtacaaccacgccgacgcagagtttcaggagcgccttaaagaagatacgtcttttgggggcaacctcggacgagcagtcttccaggcgaaaaagagggttcttgaacctctgggcctggttgaggaacctgttaagacggctccgggaaaaaagaggccggtagagcactctcctgtggagccagactcctcctcgggaaccggaaaagcgggccagcagcctgcaagaaaaagattaaattttggtcagactggagacgcagactccgtacctgacccccagcctctcggacagccaccagcagccccctctggtctgggatctactacaatggctacaggcagtggcgcaccaatggcagacaataacgagggtgccgatggagtgggtaattcctcaggaaattggcattgcgattcccaatggctgggcgacagagtcatcaccaccagcacccgaacctgggccctgcccacatacaacaaccacctctacaagcaaatctccagccaatcaggagccagcaacgacaaccactactttggctacagcaccccctgggggtattttgacttcaacagattccactgccacttttcaccacgtgactggcaaagactcatcaacaacaactggggattccggcccaaaagactcaacttcaagctctttaatattcaagtcaaagaggtcacgcagaatggcggtacgacgacgattgccaataaccttaccagcacggttcaggtgtttactgactcggagtaccagctcccgtacgtcctgggctcggcgcatcaaggatgcctcccgccgtttccagcggacgtcttcatggtcccacagtatggatacctcaccctgaacaacgggagtcaggcggtaggacgctcttccttttactgcctggagtactttccttctcagatgctgcgtactggaaacaactttcagttcagctacacttttgaagacgtgcctttccacagcagctacgctcacagccagagtctggatcggctgatgaatcctctgatcgaccagtacctgtattatctgaacaagacacaaacaaatagtggaactcttcagcagtctcggctactgtttagccaagctggaccaaccaacatgtctcttcaagctaaaaactggctgcctggaccttgctacagacagcagcgtctgtcaaaacaggcaaacggcaacaacaacagcaactttccctggactgcagctacaaagtatcatctaaatggccgggactcgttggttaatccaggaccagctatggccagtcacaaggatgacgaagaaaagtttttccccatgcatggaaccctgatatttggtaaacaaggaacaaatgccaacgacgcggatttggaaaatgtcatgattacagatgaagaagaaatcagggccaccaatcccgtggctacggagcagtacgggactgtgtcaaataatttgcaaaactcaaacactggtccaactactggaactgtcaatcaccaaggagcgttacctggtatggtgtggcaggatcgagacgtgtacctgcagggacccatttgggccaagattcctcacaccgatggacactttcatccttctccactgacgggaggttttggactcaaacacccgcctcctcagatcatgatcaaaaacactcccgttccagccaatcctcccacaaacttcagttctgccaagtttgcttctttcatcacacagtattccacgggacaggtcagcgtggagatcgagtgggagctgcagaaggagaacagcaaacgctggaatcccgaaattcagtacacttccaactacaacaagtctgttaatgtggactttactgtggacactaatggtgtgtattcagagcctcgccccattggcaccagatacctgactcgtaatctgtaa

SEQ ID NO: 180 - protein, 735 aa, Adeno-associated virus
MAADGYLPDWLEDTLSEGIRQWWKLKPGPPPPKPAERHKDDSRGLVLPGYKYLGPFNGLDKGEPVNEADAAALEHDKAYDRQLDSGDNPYLKYNHADAEFQERLKEDTSFGGNLGRAVFQAKKRVLEPLGLVEEPVKTAPGKKRPVEHSPVEPDSSSGTGKAGQQPARKRLNFGQTGDADSVPDPQPLGQPPAAPSGLGSTTMATGSGAPMADNNEGADGVGNSSGNWHCDSQWLGDRVITTSTRTWALPTYNNHLYKQISSQSGASNDNHYFGYSTPWGYFDFNRFHCHFSPRDWQRLINNNWGFRPKRLNFKLFNIQVKEVTQNGGTTTIANNLTSTVQVFTDSEYQLPYVLGSAHQGCLPPFPADVFMVPQYGYLTLNNGSQAVGRSSFYCLEYFPSQMLRTGNNFQFSYTFEDVPFHSSYAHSQSLDRLMNPLIDQYLYYLNKTQTNSGTLQQSRLLFSQAGPTNMSLQAKNWLPGPCYRQQRLSKQANGNNNSNFPWTAATKYHLNGRDSLVNPGPAMASHKDDEEKFFPMHGTLIFGKQGTNANDADLENVMITDEEEIRATNPVATEQYGTVSNNLQNSNTGPTTGTVNHQGALPGMVWQDRDVYLQGPIWAKIPHTDGHFHPSPLTGGFGLKHPPPQIMIKNTPVPANPPTNFSSAKFASFITQYSTGQVSVEIEWELQKENSKRWNPEIQYTSNYNKSVNVDFTVDTNGVYSEPRPIGTRYLTRNL

SEQ ID NO: 181 - DNA, 2208 bp, Adeno-associated virus
  source 1..2208: mol_type = genomic DNA
atggctgccgatggttatcttccagattggctcgaggacactctctctgaaggaataagacagtggtggaagctcaaacctggcccaccaccaccaaagctcgcagagcggcatcaggacgacagcaggggtcttgtgcttcctgggtacaagtacctcggacccttcaacggactcgacaaaggagagccggtcaacgaggcagacgccgcggccctcgagcacgacaaggcctacgaccggcagctcgacagcggagacaacccgtacctcaagtacaaccacgccgacgcggagtttcaggagcgtcttaaagaagatacgtcttttgggggcaacctcggacgagcagtcttccaggcgaaaaagagggttcttgaacctctgggcctggttgaggaacctgttaagacggctccgggaaaaaagaggccggtagagcactctcctgtggagccagactcctcctcgggaaccggaaaggcgggccatcagcctgcgagaaagagattgaattttggtcagactggagacgcagactccgtacctgacccccagcctctcggacagccaccagcagcccccacaagtctgggatctactacaatggctacaggcagtggcgcaccaatggcagacaataacgagggtgccgatggagtgggtaattcctcaggaaattggcattgcgattcccaatggctgggcgacagagtcatcaccaccagcacccgaacctgggccctgcccacctacaacaaccacctctacaagcaaatctccagccaatcaggagcctcgaacgacaaccactactttggctacagcaccccctgggggtattttgacttcaacagattccactgtcacttctccccacgtgattggcaaagactcatcaacaacaactggggattccgacccaagagactcaacttcaagctctttaacattcaagtcaaagaggtcacgcagaatgacggtacgacgacgattgccaataaccttaccagcacggttcaggtgtttactgactcggagtaccagctcccgtacgtcctcggctcggcgcatcaaggatgcctcccgccgtttccagcggacgtcttcacggtcccacagtatggatacctcaccctgaacaacgggagtcaggcggtaggacgctcttccttttactgcctggagtactttccttctcagatgctgcgtactggaaacaaccttaccttcagctacacctttgaggacgttcctttccacagcagctacgctcacagccagagtttggaccggctgatgaatcctctgatcgaccagtatctatattatctgaacaggacacaatcaaatagtggaactcttcagcagtctaggctactgtttagccaagctggacccaccagcatgtctcttcaagctaaaaactggctgcctggaccttgctacagacagcagcgtctttcaaagcaggcaaacgacaacaacaacagcaactttccctggactgcggctacaaagtatcatctaaatggccgggactcgttggttaatccaggaccagctatggccagccacaaagacgatgaagaaaagtttttccccatgcatggaaccctgatatttggtaaacaaggaacaaatgctaacgacgcggatttggagcatgttatgattacagatgaagaagaaatcaggaccaccaatcctgtggctacagagcagtacggaaacgtgtcaaataatttgcaaaactcaaatactggtccaactacagaaaatgtcaatcaccagggagcgttacctggtatggtgtggcaggatcgagacgtgtacctgcagggacccatttgggccaagattcctcacaccgacggacactttcacccttctccactgatgggaggttttggactcaaacacccgcctcctcaaatcatgatcaaaaacactcccgttccagccaatcctcccacaaactacagttctgccaagtttgcttctttcatcacacagtattccacgggccaggtcagcgtggagattgagtgggagctgcggaaggagaacagcaaacgctggaaccccgagatccagtatacttccaactacaacaaatctgttaatgtggactttactgtggacactaatggtgtgtattcagagcctcgccccattggcaccagatacctgactcgtaatctgtaa

SEQ ID NO: 182 - protein, 735 aa, Adeno-associated virus
MAADGYLPDWLEDTLSEGIRQWWKLKPGPPPPKLAERHQDDSRGLVLPGYKYLGPFNGLDKGEPVNEADAAALEHDKAYDRQLDSGDNPYLKYNHADAEFQERLKEDTSFGGNLGRAVFQAKKRVLEPLGLVEEPVKTAPGKKRPVEHSPVEPDSSSGTGKAGHQPARKRLNFGQTGDADSVPDPQPLGQPPAAPTSLGSTTMATGSGAPMADNNEGADGVGNSSGNWHCDSQWLGDRVITTSTRTWALPTYNNHLYKQISSQSGASNDNHYFGYSTPWGYFDFNRFHCHFSPRDWQRLINNNWGFRPKRLNFKLFNIQVKEVTQNDGTTTIANNLTSTVQVFTDSEYQLPYVLGSAHQGCLPPFPADVFTVPQYGYLTLNNGSQAVGRSSFYCLEYFPSQMLRTGNNLTFSYTFEDVPFHSSYAHSQSLDRLMNPLIDQYLYYLNRTQSNSGTLQQSRLLFSQAGPTSMSLQAKNWLPGPCYRQQRLSKQANDNNNSNFPWTAATKYHLNGRDSLVNPGPAMASHKDDEEKFFPMHGTLIFGKQGTNANDADLEHVMITDEEEIRTTNPVATEQYGNVSNNLQNSNTGPTTENVNHQGALPGMVWQDRDVYLQGPIWAKIPHTDGHFHPSPLMGGFGLKHPPPQIMIKNTPVPANPPTNYSSAKFASFITQYSTGQVSVEIEWELRKENSKRWNPEIQYTSNYNKSVNVDFTVDTNGVYSEPRPIGTRYLTRNL

SEQ ID NO: 183 - DNA, 2208 bp, Adeno-associated virus
  source 1..2208: mol_type = genomic DNA
atggctgccgatggttatcttccagattggctcgaggacactctctctgaaggaataagacagtggtggaagctcaaacctggcccaccaccaccaaagcccgcagagcggcatcaggacgacagcaggggtcttgtgcttcctgggtacaagtacctcggacccttcaacggactcgacaaaggagagccggtcaacgaggcagacgccgcggccctcgagcacgacaaggcctacgaccggcagctcgacagcggagacaacccgtacctcaagtacaaccacgccgacgcggagtttcaggagcgtcttaaagaagatacgtcttttgggggcaacctcggacgagcagtcttccaggcgaaaaagagggttcttgaacctctgggcctggttgaggaacctgttaagacggctccgggaaaaaagaggccggtagagcactctcctgtggagccagactcctcctcgggaaccggaaaagcgggccatcagcctgcgagaaagagattgaattttggtcagactggagacgcagactccgtacctgacccccagcctctcggacagccaccagcagcccccacaagtttgggatctactacaatggctacaggcagtggcgcaccaatggcagacaataacgagggtgccgatggagtgggtaattcctcaggaaattggcattgcgattcccaatggctgggcgacagagtcatcaccaccagcacccgaacctgggccctgcccacctacaacaaccacctctacaagcaaatctccagccaatcaggagcctcgaacgacaaccactactttggctacagcaccccctgggggtattttgacttcaacagattccactgtcacttctccccacgtgattggcaaagactcatcaacaacaactggggattccgacccaagagactcaacttcaagctctttaacattcaagtcaaggaggtcacgcagaatgacggtacgacgacgattgccaataaccttaccagcacggttcaggtgtttactgactcggagtaccagctcccgtacgtcctcggctcggcgcatcaaggatgcctcccgccgtttccagcggacgtcttcatggtcccacagtatggatacctcaccctgaacaacgggagtcaggcggtaggacgctcttccttttactgcctggagtactttccttctcagatgctgcgtactggaaacaactttaccttcagctacacctttgaggacgttcctttccacagcagctacgctcacagccagagtttggaccggctgatgaatcctctgatcgaccagtatctatattatctgaacaggacacaatcaaatagtggaactcttcagcagtctaggctactgtttagccaagctggacccaccagcatgtctcttcaagctaaaaactggctgcctggaccttgctacagacagcagcgtctttcaaagcaggcaaacgacaacaacaacagcaactttccctggactgcggctacaaagtatcgtctaaatggccgggactcgttggttaatccaggaccagctatggccagccacaaagacgatgaagaaaagtttttccccatgcatggaaccctgatatttggtaaacaaggaacaaatgctaacgacgcggatttggagcatgttatgattacagatgaagaagaaatcaggaccaccaatcctgtggctacagagcagtacggaaacgtgtcaaataatttgcaaaactcaaatactggtccaactacagaaaatgtcaatcaccagggagcgttacctggtatggtgtggcaggatcgagacgtgtacctgcagggacccatttgggccaagattcctcacaccgacggacactttcacccttctccactgatgggaggttttggactcaaacacccgcctcctcaaatcatgatcaaaaacactcccgttccagccaatcctcccacaaacttcagttctgccaagtttgcttctttcatcacacagtattccacgggccaggtcagcgtggagattgagtgggagctgcagaaggagaacagcaaacgctggaaccccgagatccagtatacttccaactacaacaaatctgttaatgtggactttactgtggacactaatggtgtgtattcagagcctcgccccattggcaccagatacctgactcgtaatctgtaa

SEQ ID NO: 184 - protein, 735 aa, Adeno-associated virus
MAADGYLPDWLEDTLSEGIRQWWKLKPGPPPPKPAERHQDDSRGLVLPGYKYLGPFNGLDKGEPVNEADAAALEHDKAYDRQLDSGDNPYLKYNHADAEFQERLKEDTSFGGNLGRAVFQAKKRVLEPLGLVEEPVKTAPGKKRPVEHSPVEPDSSSGTGKAGHQPARKRLNFGQTGDADSVPDPQPLGQPPAAPTSLGSTTMATGSGAPMADNNEGADGVGNSSGNWHCDSQWLGDRVITTSTRTWALPTYNNHLYKQISSQSGASNDNHYFGYSTPWGYFDFNRFHCHFSPRDWQRLINNNWGFRPKRLNFKLFNIQVKEVTQNDGTTTIANNLTSTVQVFTDSEYQLPYVLGSAHQGCLPPFPADVFMVPQYGYLTLNNGSQAVGRSSFYCLEYFPSQMLRTGNNFTFSYTFEDVPFHSSYAHSQSLDRLMNPLIDQYLYYLNRTQSNSGTLQQSRLLFSQAGPTSMSLQAKNWLPGPCYRQQRLSKQANDNNNSNFPWTAATKYRLNGRDSLVNPGPAMASHKDDEEKFFPMHGTLIFGKQGTNANDADLEHVMITDEEEIRTTNPVATEQYGNVSNNLQNSNTGPTTENVNHQGALPGMVWQDRDVYLQGPIWAKIPHTDGHFHPSPLMGGFGLKHPPPQIMIKNTPVPANPPTNFSSAKFASFITQYSTGQVSVEIEWELQKENSKRWNPEIQYTSNYNKSVNVDFTVDTNGVYSEPRPIGTRYLTRNL

SEQ ID NO: 185 - DNA, 2208 bp, Adeno-associated virus
  source 1..2208: mol_type = genomic DNA
atggctgccgatggttatcttccagattggctcgaggacactctctctgaaggaataagacagtggtggaagctcaaacctggcccaccaccaccaaagcccgcagagcggcatcaggacgacagcaggggtcttgtgcttcctgggtacaagtacctcggacccttcaacggactcgacaaaggagagccggtcaacgaggcagacgccgcggccctcgagcacgacaaggcctacgaccggcagctcgacagcggagacaacccgtacctcaagtacaaccacgccgacgcggagtttcaggagcgtcttaaagaagatacgtcttttgggggcaacctcggacgagcagtcttccaggcgaaaaagagggttcttgaacctctgggcctggttgaggaacctgttaagacggctccgggaaaaaagaggccggtagagcactctcctgtggagccagactcctcctcgggaaccggaaaagcgggccatcagcctgcgagaaagagattgaattttggtcagactggagacgcagactccgtacctgacccccagcctctcggacagccaccagcagcccccacaagtttgggatctactacaatggctacaggcagtggcgcaccaatggcagacaataacgagggtgccgatggagtgggtaattcctcaggaaattggcattgcgattcccaatggctgggcgacagagtcatcaccaccagcacccgaacctgggccctgcccacctacaacaaccacctctacaagcaaatctccagccaatcaggagcctcgaacgacaaccactactttggctacagcaccccctgggggtattttgacttcaacagattccactgtcacttctccccacgtgattggcaaagactcatcaacaacaactggggattccgacccaagagactcaacttcaagctctttaacattcaagtcaaagaggtcacgcagaatgacggtacgacgacgattgccaataaccttaccagcacggttcaggtgtttactgactcggagtaccagctcccgtacgtcctcggctcggcgcatcaaggatgcctcccgccgtttccagcggacgtcttcatggtcccacagtatggatacctcaccctgaacaacgggagtcaggcggtaggacgcccttccttttactgcctggagtactttccttctcagatgctgcgtactggaaacaactttaccttcagctacacctttgaggacgttcctttccacagcagctacgctcacagccagagtttggaccggctgatgaatcctctgatcgaccagtatctatattatctgaacaggacacaatcaaatagtggaactcttcagcagtctaggctactgtttagccaagctggacccaccagcatgtctcttcaagctaaaaactggctgcctggaccttgctacagacagcagcgtctttcaaagcaggcaaacgacaacaacaacagcaactttccctggactgcggctacaaagtatcatctaaatggccgggactcgttggttaatccaggaccagctatggccagccacaaagacgatgaagaaaagtttttccccatgcatgggaccctgatatttggtaaacaaggaacaaatgctaacgacgcggatttggagcatgttatgattacagatgaagaagaaatcaggaccaccaatcctgtggctacagagcagtacggaaacgtgtcaaataatttgcaaaactcaaatactggtccaactacagaaaatgtcaatcaccagggagcgttacctggtatggtgtggcaggatcgagacgtgtacctgcagggacccatttgggccaagattcctcacaccgacggacactttcacccttctccactgatgggaggttttggactcaaacacccgcctcctcaaatcatgatcaaaaacactcccgttccagccaatcctcccacaaacttcagttctgccaagtttgcttctttcatcacacagtattccacgggccaggtcagcgtggagattgagtgggagctgcagaaggagaacagcaaacgctggaaccccgagatccagtatacttccaactacaacaaatctgttaatgtggactttactgtggacactaatggtgtgtattcagagcctcgccccattggcaccagatacctgactcgtaatctgtaa

SEQ ID NO: 186 - protein, 735 aa, Adeno-associated virus
MAADGYLPDWLEDTLSEGIRQWWKLKPGPPPPKPAERHQDDSRGLVLPGYKYLGPFNGLDKGEPVNEADAAALEHDKAYDRQLDSGDNPYLKYNHADAEFQERLKEDTSFGGNLGRAVFQAKKRVLEPLGLVEEPVKTAPGKKRPVEHSPVEPDSSSGTGKAGHQPARKRLNFGQTGDADSVPDPQPLGQPPAAPTSLGSTTMATGSGAPMADNNEGADGVGNSSGNWHCDSQWLGDRVITTSTRTWALPTYNNHLYKQISSQSGASNDNHYFGYSTPWGYFDFNRFHCHFSPRDWQRLINNNWGFRPKRLNFKLFNIQVKEVTQNDGTTTIANNLTSTVQVFTDSEYQLPYVLGSAHQGCLPPFPADVFMVPQYGYLTLNNGSQAVGRPSFYCLEYFPSQMLRTGNNFTFSYTFEDVPFHSSYAHSQSLDRLMNPLIDQYLYYLNRTQSNSGTLQQSRLLFSQAGPTSMSLQAKNWLPGPCYRQQRLSKQANDNNNSNFPWTAATKYHLNGRDSLVNPGPAMASHKDDEEKFFPMHGTLIFGKQGTNANDADLEHVMITDEEEIRTTNPVATEQYGNVSNNLQNSNTGPTTENVNHQGALPGMVWQDRDVYLQGPIWAKIPHTDGHFHPSPLMGGFGLKHPPPQIMIKNTPVPANPPTNFSSAKFASFITQYSTGQVSVEIEWELQKENSKRWNPEIQYTSNYNKSVNVDFTVDTNGVYSEPRPIGTRYLTRNL

SEQ ID NO: 187 - DNA, 2208 bp, Adeno-associated virus
  source 1..2208: mol_type = genomic DNA
atggctgccgatggttatcttccagattggctcgaggacactctctctgaaggaataagacagtggtggaagctcaaacctggcccaccaccaccaaagcccgcagagcggcataaggacgacagcaggggtcttgtgcttcctgggtacaagtacctcggacccttcaacggactcgacaagggagagccggtcaacgaggcagacgccgcggccctcgagcacgacaaggcctacgaccggcagctcgacagcggagacaacccgtacctcaagtacaaccacgccgacgcggagtttcaggagcgccttaaagaagatacgtcttttgggggcaacctcggacgagcagtcttccaggcaaaaaagagggttcttgaacctctgggcctggttgaggagcctgttaaaacggctccgggaaaaaagaggccggtagagcactctcctgcggagccagactcctcctcgggaaccggaaaagcgggccagcagcctgcaagaaaaagattgaatttcggtcagactggagacgcagactccgtacctgacccccagcctctcggacagccaccagcagccccctctggtctgggaactaatacgatggcttcaggcagtggcgcaccaatggcagacaataacgagggcgccgacggagtgggtaattcctcgggaaattggcattgcgattccacatggatgggcgacagagtcatcaccaccagcacccgaacttgggccctgcccacctacaacaaccatctctacaagcaaatctccagccaatcaggagccagcaacgacaaccactactttggctacagcaccccttgggggtattttgacttcaacagattccactgccacttttcaccacgtgactggcaaagactcatcaacaacaactggggattccggcccaagagactcaacttcaagctctttaacattcaagtcaaagaggtcacgcagaatgacggtacgacgacgattgccaataaccttaccagcacggttcaggtgtttactgactcggagtaccagctcccgtacgtcctcggctcggcgcatcaaggatgcctcccgccgttcccagcagacgtcttcatggtgccacagtatggatacctcaccctgaacaacgggagtcaggcagtaggacgctcttcattttactgcctggagtactttccttctcagatgctgcgtaccggaaacaactttaccttcagctacacctttgaggacgttcctttccacagcagctacgctcacagccagagtttggaccgtctcatgaatcctctcatcgaccagtacctgtattacttgagcagaacaaacactccaagcggaaccaccacgcagtccaggcttcagttttctcaggccggagcaagtgacattcgggaccagtctaggaactggcttcctggaccctgttaccgccagcagcgagtatcaaagacatctgcggataacaacaacagtgaatactcgtggactggagctaccaagtaccacctcaatggcagagactctctggtgaatccgggcccggccatggccagccacaaggacgatgaagaaaagttttttcctcagagcggggttctcatctttgggaagcaaggctcagagaaaacaaatgtggacattgaaaaggtcatgattacagacgaagaggaaatcaggaccaccaatcccgtggctacggagcagtatggttctgtatctaccaacctgcagggcggcaacacacaagcagctaccgcagatgtcaacacacaaggcgttcttccaggcatggtctggcaggacagagacgtgtacctgcaggggcccatctgggcaaagattccacacacggacggacattttcacccctctcccctcatgggcggattcggacttaaacaccctcctccacagattctcatcaagaacaccccggtacctgcgaatccttcgaccaccttcagtgcggcaaagtttgcttctttcatcacacagtattccacggggcaggtcagcgtggagatcgagtgggagctgcagaaggagaacagcaaacgctggaatcccgagatccagtacacttccaactacaacaaatctgttaatgtggactttactgttgacactaatggcgtgtattcagagcctcgccccattggcaccagatacctgactcgtaatctgtaa

SEQ ID NO: 188 - protein, 735 aa, Adeno-associated virus
MAADGYLPDWLEDTLSEGIRQWWKLKPGPPPPKPAERHKDDSRGLVLPGYKYLGPFNGLDKGEPVNEADAAALEHDKAYDRQLDSGDNPYLKYNHADAEFQERLKEDTSFGGNLGRAVFQAKKRVLEPLGLVEEPVKTAPGKKRPVEHSPAEPDSSSGTGKAGQQPARKRLNFGQTGDADSVPDPQPLGQPPAAPSGLGTNTMASGSGAPMADNNEGADGVGNSSGNWHCDSTWMGDRVITTSTRTWALPTYNNHLYKQISSQSGASNDNHYFGYSTPWGYFDFNRFHCHFSPRDWQRLINNNWGFRPKRLNFKLFNIQVKEVTQNDGTTTIANNLTSTVQVFTDSEYQLPYVLGSAHQGCLPPFPADVFMVPQYGYLTLNNGSQAVGRSSFYCLEYFPSQMLRTGNNFTFSYTFEDVPFHSSYAHSQSLDRLMNPLIDQYLYYLSRTNTPSGTTTQSRLQFSQAGASDIRDQSRNWLPGPCYRQQRVSKTSADNNNSEYSWTGATKYHLNGRDSLVNPGPAMASHKDDEEKFFPQSGVLIFGKQGSEKTNVDIEKVMITDEEEIRTTNPVATEQYGSVSTNLQGGNTQAATADVNTQGVLPGMVWQDRDVYLQGPIWAKIPHTDGHFHPSPLMGGFGLKHPPPQILIKNTPVPANPSTTFSAAKFASFITQYSTGQVSVEIEWELQKENSKRWNPEIQYTSNYNKSVNVDFTVDTNGVYSEPRPIGTRYLTRNL

SEQ ID NO: 189 - DNA, 3161 bp, Adeno-associated virus
  source 1..3161: mol_type = genomic DNA
gattgaatttagcggccgcgaattcgcccttgctgcgtcaactggaccaatgagaactttccattcaatgattgcgtcgacaagatggtgatctggtgggaggagggaaagatgaccgccaaggtcatggagtcggccaaagccattctcggaggaagcaaggtgcgcgtggaccagaaatgtaagtcctcggcccagatagacccgactcccgtgattgtcacctccaacaccaacatgtgcgccgtgattgacgggaactcaacgaccttcgagcaccagcagccgttgcaagaccggatgttcaaatttgaactcacccgccgtctggatcatgactttgggaaggtcaccaagcaggaagtcaaagactttttccggtgggcaaaggatcacgtggttgaggtggagcatgaattctacgtcaaaaagggtggagccaagaaaagacccgcccccagtgacgcagatataagtgagcccaaacgggcgcgcgggtcagttgcgcagccatcgacgtcagacgcggaagcttcgatcaactacgcggacaggtaccaaaacaaatgttctcgtcacgtgggcatgaatctgatgctgtttccctgcagacaatgcgagagaatgaatcaaaattcaaatatctgcttcactcacggacagaaggactgtttagagtgctttcccgtgtcagaatctcaacccgtttctgtcgtcaaaaaggcgtatcagaaactttgctacattcatcatatcatgggaaaggtgccagacgcttgcactgcctgcgatctggtcaatgtggatttggatgactgcatctctgaacaataaatgatttaaatcaggtatggctgccgatggttatcttccagattggctcaaggacactctctctgaaggaataagacagtggtggaagctcaaacctggcccaccaccaccaaagcccgcagagcggcataaggacgacagcgggggtcttgtgcttcctgggtacaagtacctcggacccttcaacggactcgacaagggagagccggtcaacgaggcagacgccgcggccctcgagtacgacaaggcctacgaccggcagctcgacagcggagacaacccgtacctcaagtacaaccacgccgacgcggagtttcaggagcgccttaaagaagatacgtcttttgggggcaacctcggacgagcagtcttccaggcgaaaaagagggttcttgaacctctgggcctggttgaggaacctgttaagacggctccgggaaaaaagaggccggtagagcactctcctgtggagccagactcctcctcgggaacaggaaaagcgggccagcagcctgcgagaaagagattgaattttggtcagactggagacgcagactccgtacctgacccccagcctctcggacagccaccagcagccccctctggtctgggaactaatacgatggctacaggcagtggcgcaccaatggcagacaataacgagggcgccgacggagtgggtaattcctcgggaagttggcattgcgattccacatggatgggcgacagagtcatcaccaccagcacccgaacctgggctctgcccacctacaacaaccatctgtacaagcagatctccagccaatcaggagccagcaacgacaaccactactttggctacagcaccccttgggggtattttgacttcaacagattccactgccacttttcaccacgtgactggcaaagactcatcaacaacaactggggattccggcccaagagactcaacttcaagctctttaacattcaagtcaaggaggtcacgcagaatgacggtacgacgacgattgccaataaccttaccagcacggttcaggtgtttactgactcggagtaccagctcccgtacgtccccggctcggcgcatcaaggatgcctcccgccgttcccagcagacgtcttcatggtgccacagtatggatacctcaccctgaacaacgggagtcaggcagtaggacgctcttcattttactgcctggagtactttccttctcagatgcttcgtaccggaaacaactttaccttcagctacacctttgaggatgttcctttccacagcagctacgctcacagccagagtttggaccgtctcatgaatcctctcatcgaccagtacctgtattacttgagcagaacaaacactccaagcggaaccaccacgcagtccaggcttcagttttctcaggccggagcaagtgacattcgggaccagtctaggaactggcttcctggaccctgttaccgccagcagcgagtatcaaagacagctgcggacaacaacaacagtgaatactcgtggactggagctaccaagtaccacctcaatggcagagactctctggtgaatccgggcccggccatggccagccacaaggacgatgaagaaaagttttttcctcaaagcggggttctcatctttgggaagcaaggctcagagaaaacaaatgtggacattgaaaaggtcatgattacagacgaagaggaaatcagaaccaccaatcccgtggccacggagcagtatggttctgtatctaccaacctccagagcggcaacacacaagcagctactgcagatgtcaacacacaaggcgttcttccaggcatggtctggcaggacagagacgtgcacctgcaggggcctatctgggcaaagattccacacacggacggacattttcacccctctcccctcatgggcggatttggacttaaacaccctcctccacagattctcatcaagaacaccccggtacctgcaaatccttcgaccaccttcagtgcggcaaagtttgcttccttcatcacacagtattccacagggcaggtcagcgtggagatcgagtgggagctgcagaaggagaacagcaaacgctggaaccccgagatccagtacacttccaactacaacaaatctgttaatgtggactttactgtggacactaatggtgtgtattcagagcctcgccccattggcaccagatacctgactcgtaatctgtaattgcttgttaatcaataaaccgtttaattcgtttcagttgaactttggtctctgcgaagggcgaattcgtttaaaccctgcaggactagtccctttagtgagg

SEQ ID NO: 190 - DNA, 3162 bp, Adeno-associated virus
  source 1..3162: mol_type = genomic DNA
gaattgaatttagcggccgcgaattcgcccttcgcagagaccaaagttcaactgaaacgaattaaacggtttattgattaacaagcaattacagattacgagtcaggtatctggtgccaatggggcgaggctctgaatacacgccattagtgtccacagtaaagtccacattaacagacttgttgtagttggaagtgtactgaatttcgggattccagcgtttgctgttttccttctgcagctcccactcgatctccacgctgacctgtcccgtggagtactgtgtgatgaaggaagcaaactttgccgcactgaaggtggtcgaaggattcgcaggtaccggggtgttcttgatgagaatctgtggaggagggtgtttaagtccgaatccacccatgaggggagaggggtgaaaatgtccgtccgtgtgtggaatctttgcccagatgggcccctgaaggtacacatctctgtcctgccagaccatgcctggaagaacgccttgtgtgttgacatctgcggtagctgcttgtctgttgcctctctggaggttggtagatacagaaccgtactgctccgtagccacgggattggttgtcctgatttcctcttcgtctgtaatcatgaccttttcaatgtccacatttgttttctctgagccttgcttcccaaagatgagaaccccgctctgaggaaaaaacttttcttcattgtccttgtggcttgccatggccgggcccggattcaccagagagtctctgccattgaggtggtacttggtagctccagtccacgagtattcactgttgttgttatccgcagatgtctttgatactcgctgctggcggtaacagggtccaggaagccagttcctagactggtcccgaatgtcactcgctccggcctgagaaaactgaagccttgactgcgtggtggttccacttggagtgtttgttgtgctcaagtaatacaggtactggtcgatgagaggattcatgagacggtccagactctggctgtgagcgtagccgctgtggaaaggaacgtcctcaaaagtgtagctgaaggtaaagttgtttccggtacgcagcatctgagaaggaaagtactccaggcagtaaaatgaagagcgtcctactgcctgactcccgttgttcagggtgaggtatccatactgtggcaccatgaagacgtctgctgggaacggcgggaggcatccttgatgcgccgagccgaggacgtacgggagctggtactccgagtcagtaaacacctgaaccgtgctggtaaggttattggcaatcgtcgtcgtaccgtcattctgcgtgacctctttgacttgaatgttaaagagcttgaagttgagtctcttgggtcggaatccccagttgttgttgatgagtctttgccagtcacgtggtgaaaagtggcagtggaatctgttgaagtcaaaatacccccaaggggtgctgtagccaaagtagtgattgtcgttcgaggctcctgattggctggaaatttgtttgtagaggtggttgttgtaggtgggcagggcccaggttcgggtgctggtggtgatgactctgtcgcccatccatgtggaatcgcaatgccaatttcccgaggaattacccactccgtcggcgccctcgttattgtctgccattggtgcgccactgcctgtagccatcgtattagttcccagaccagagggggctgctggtggctgtccgagaggctgggggtcaggtactgagtctgcgtctccagtctgaccaaaattcaatctttttcttgcaggctgctggcccgcctttccggttcccgaggaggagtctggctccacaggagagtgctctaccggcctcttttttcctggagccgtcttgacaggttccccaaccaggcccagaggttcaagaaccctctttttcgcctggaagactgctcgtccgaggttgcccccaaaagacgtatcttctttaaggcgctcctgaaactccgcgtcggcgtggttgtacttgaggtacgggttgtctccgctgtcgagctgccggtcgtaggctttgtcgtgctcgagggccgcggcgtctgcctcgttgaccggctctcccttgtcgagtccgttgaagggtccgaggtacttgtacccaggaagcacaagacccctgctgtcgtccttatgccgctctgcgggctttggtggtggtgggccaggtttgagcttccaccactgtcttattccttcagagagagtgtcctcgagccaatctggaagataaccatcggcagccatacctgatttaaatcatttattgttcaaagatgcagtcatccaaatccacattgaccagatcgcaggcagtgcaagcgtctggcacctttcccatgatatgatgaatgtagcacagtttctgatacgcctttttgacgacagaaacgggttgagattctgacacgggaaagcactctaaacagtctttctgtccgtgagtgaagcagatatttgaattctgattcattctctcgcattgtctgcagggaaacagcatcagattcatgcccacgtgacgagaacatttgttttggtacctgtctgcgtagttgatcgaagcttccgcgtctgacgtcgatggctgcgcaactgactcgcgcacccgtttgggctcacttatatctgcgtcactgggggcgggtcttttcttggctccaccctttttgacgtagaattcatgctccacctcaaccacgtgatcctttgcccaccggaaaaagtctttgacttcctgcttggtgaccttcccaaagtcatgatccagacggcgggtgagttcaaatttgaacatccggtcttgcaacggctgctggtgttcgaaggtcgttgagttcccgtcaatcacggcgcacatgttggtgttggaggtgacgatcacgggagtcgggtctatctgggccgaggacttgcatttctggtccacgcgcaccttgcttcctccgagaatggctttggccgactccacgaccttggcggtcatcttcccctcctcccaccagatcaccatcttgtcgacacagtcgttgaagggaaagttctcattggtccagttgacgcagcaagggcgaattcgtttaaacctgcaggactagtccctttagtgaggg

SEQ ID NO: 191 - DNA, 3164 bp, Adeno-associated virus
  source 1..3164: mol_type = genomic DNA
gcgaattgaatttagcggccgcgaattcgcccttcgcagagaccaaagttcaactgaaacgaattaaacggtttattgattaacaagcaattacaaattacgagtcaggtatctggtgccaatggggcgaggctctgaatacacgccattagtgtccacagtaaagtccacattaacagacttgttgtagttggaagtgtactgaatttcgggattccagcgtttgctgttttccttctgcagctcccactcgatctccacgctgacctgtcccgtggagtactgtgtgatgaaggaagcaaactttgccgcactgaaggtggtcgaaggattcgcaggtaccggggtgttcttgatgagaatctgtggaggagggtgtttaggtccgaatccacccatgaggggagaggggtgaaaatgtccgtccgtgtgtggaatctttgcccagatgggcccctgaaggtacacatctctgtcctgccagaccatgcctggaagaacgccttgtgtgttgacatctgcggtagctgcttgtctgttgcctctctggaggttggtagatacagaaccatactgctccgtagccacgggattggttgtcctgatttcctcttcgtctgtaatcatgaccttttcaatgtccacatttgttttctctgagccttgcttcccaaagatgagaaccccgctctgaggaaaaaacttttcttcattgtccttgtggcttgccatggccgggcccggattcaccagagagtctctgccattgaggtggtacttggtagctccagtccacgagtattcactgttgttgttatccgcagatgtctttgatactcgctgctggcggtaacagggtccaggaagccagttcctagactggtcccgaatgtcactcgctccggcctgagaaaactgaagccttgactgcgtggtggttccacttggagtgtttgttgtgctcaagtaatacaggtactggtcgatgagaggattcatgagacggtccagactctggctgtgagcgtagctgctgtggaaaggaacgtcctcaaaagtgtagctgaaggtaaagttgtttccggtacgcagcatctgagaaggaaagtactccgggcagtaaaatgaagagcgtcctactgcctgactcccgttgctcagggtgaggtatccatactgtggcaccatgaagacgtctgctgggaacggcgggaggcatccttgatgcgccgagccgaggacgtacgggagctggtactccgagtcagtaaacacctgaaccgtgctggtaaggttattggcaatcgtcgtcgtaccgtcattctgcgtgacctctttgacttgaatgttaaagagcttgaagttgagtctcttgggtcggaatccccagttgttgttgatgagtctttgccagtcacgtggtgaaaagtggcagtggaatctgttgaagtcaaaatacccccaaggggtgctgtagccaaagtagtgattgtcgttcgaggctcctgattggctggaaatttgtctgtagaggtggttgttgtaggtgggcagggcccaggttcgggtgctggtggtgatgactctgtcgcccatccatgtggaatcgcaatgccgatttcccgaggaattacccactccgtcggcgccctcgttattgtctgccattggtgcgccactgcctgtagccatcgtattagttcccagaccagagggggctgctggtggctgtccgagaggctgggggtcaggtactgagtctgcgtctccagtctgaccaaaattcaatctttttcttgcaggctgctggcccgcctttccggttcccgaggaggagtctggctccacaggagagtgctctaccggcctcttttttcccggagccgtcttaacaggttccccaaccaggcccagaggttcaagaaccctctttttcgcctggaagactgctcgtccgaggttgcccccaaaagacgtatcttctttaaggcgctcctgaaactccgcgtcggcgtggttgtacttgaggtacgggttgtctccgctgtcgagctgccggtcgtaggctttgtcgtgctcgagggccgcggcgtctgcctcgttgaccggctctcccttgtcgagtccgttgaagggtccgaggtacttgtacccaggaagcacaagacccctgctgtcgtccttatgccgctctgcgggctttggtggtggtgggccaggtttgagcttccaccactgtcttattccttcagagagagtgtcctcgagccaatctggaagataaccatcggcagccatacctgatttaaatcatttattgttcaaagatgcagtcatccaaatccacattgaccagatcgcaggcagtgcaagcgtctggcacctttcccatgatatgatgaatgtagcacagtttctgatacgcctttttgacgacagaaacgggttgagattctgacacgggaaagcactctaaacagtctttctgtccgtgagtgaagcagatatttgaattctgattcattctctcgcattgtctgcagggaaacagcatcagattcatgcccacgtgacgagaacatttgttttggtacctgtctgcgtagttgatcgaagcttccgcgtctgacgtcgatggctgcgcaactgactcgcgcacccgtttgggcccacttatatctgcgtcactgggggcgggtcttttcttggctccaccctttttgacgtagaattcatgctccacctcaaccacgtgatcctttgcccaccggaaaaagtctttgacttcctgcttggtgaccttcccaaagtcatgatccagacggcgggtgagttcaaatttgaacatccggtcttgcaacggctgctggtgttcgaaggtcgttgagttcccgtcaatcacggcgcacatgttggtgttggaggtgacgatcacgggagtcgggtctatctgggccgaggacttgcatttctggtccacgcgcaccttgcttcctccgagaatggctttggccgactccacgaccttggcggtcatcttcccctcctcccaccagatcaccatcttgtcgacacagtcgttgaagggaaagttctcattggtccagttgacgcagcaagggcgaattcgtttaaacctgcaggactagtccctttagtgaggg

SEQ ID NO: 192 - DNA, 3163 bp, Adeno-associated virus
  source 1..3163: mol_type = genomic DNA
accctcactaaagggactagtcctgcaggtttaaacgaattcgcccttgctgcgtcaactggagcaatgagaactttcccttcaacgactgtgtcgacaagatggtgatttggtgggaggaggggaagatgaccgccaaggtcgtggagtcggccaaagccattctcggaggaagcaaggtgcgcgtggaccagaaatgcaagtcctcggcccagatagatccgactcccgtgatcgtcacctccaacaccaacatgtgcgccgtgattgacgggaactcaacgaccttcgaacaccagcagccgttgcaagaccggatgttcaaatttgaactcacccgccgtctggatcatgactttgggaaggtcaccaagcaggaagtcaaagactttttccggtgggcaaaggatcacgtggttgaggtggagcatggattctacgtcaaaaagggtggagccaagaaaagacccgcccctagtgacgcagatataagtgagcccaaacgggtgcgcgagtcagttgcgcagccatcgacgtcggacgcggaagcttcgatcaactacgcggacaggtaccaaaacaaatgttctcgtcacgtgggcatgaatctgatgctgtttccctgcagacaatgcgagagaatgaatcaaaattcaaatatctgcttcactcacggacagaaagactgtttagagtgctttcccgtgtcagaatctcaacctgtttctgtcgtcaaaaaggcgtatcagaaactgcgctacattcatcatatcatgggaaaggtgccagacgcttgcactgcctgcgatctggtcaatgtggatttggatgactgcatctctgaacaataaatgatttaaatcaggtatggctgccgatggttatcttccagattggctcgaggacactctctctgaaggaataagacagtggtggaagctcaaacctggcccaccaccaccaaagcccgcagagcggcataaggacgacagcaggggtcttgtgcttcctgggtacaagtacctcggacccttcaacggactcgacaagggagagccggtcaacgaggcagacgccgcggccctcgagcacgacaaggcctacgaccggcagctcgacagcggagacaacccgtacctcaagtacaaccacgccgacgcggagtttcaggagcgtcttaaagaagatacgtcttttgggggcaacctcggacgagcagtcttccaggcgaaaaagagggttcttgaacctctgggcctggttgaggaacctgttaagacggctccgggaaaaaagaggccggtagagcactctcctgcggagccagactcctcctcgggaaccggaaaagcgggccagcagcctgcaagaaaaagactgaatttcggtcagactggagacgcagactccgtacctgacccccagcctctcggacagccaccagcagcccccacaagtttgggatctactacaatggctacaggcagtggcgcaccaatggcagacaataacgagggtgccgatggagtgggtaattcctcaggaaattggcattgcgattcccaatggctgggcgacagagtcatcaccaccagcacccgaacctgggccctgcccacctacaacaaccacctttacaagcaaatctccagccaatcaggagcctcaaacgacaaccactactttggctacagcaccccctgggggtattttgacttcaacagattccactgccacttttcaccacgtgactggcaaagactcatcaacaacaactggggattccgacccaagagactcaacttcaagctctttaacattcaagtcaaagaggtcacgcagaatgacggtacgacgacgattgccaataaccttaccagcacggttcaggtgtttactgactcggagtaccagctcccgtacgtcctcggctcggcgcatcaaggatgcctcccgccgtttccagcggacgtcttcatggtcccacagtatggatacctcaccctgaacaacgggagtcaggcggtaggacgctcttccttttactgcctggagtgctttccttctcagatgctgcgtactggaaacaactttcagttcagctacacttttgaagacgtgcctttccacagcagctacgctcacagccagagtttggatcggctgatgaatcctctgatcgaccagtacctgtattatctaaacagaacacaaacagctagtggaactcagcagtctcggctactgtttagccaagctggacccacaagcatgtctcttcaagctaaaaactggctgcctggaccgtgttatcgccagcagcgtttgtcaaagcaggcaaacgacaacaacaacagcaactttccctggactggagctaccaagtaccacctcaatggcagagactctttggtgaacccgggcccggccatggccagccacaaggacgatgaagaaaagtttttccccatgcatggaaccctaatatttggtaaagaaggaacaaatgctaccaacgcggaattggaaaatgtcatgattacagatgaagaggaaatcaggaccaccaatcccgtggctacagagcagtacggatatgtgtcaaataatttgcaaaactcaaatactgctgcaagtactgaaactgtgaatcaccaaggagcattacctggtatggtgtggcaggatcgagacgtgtacctgcagggacccatttgggccaagattcctcacaccgatggacactttcatccttctccactgatgggaggttttggactcaaacacccgcctcctcagattatgatcaaaaacactcccgttccagccaatcctcccacaaacttcagttctgccaagtttgcttccttcatcacacagtattccacgggacaggtcagcgtggagatcgagtgggagctgcagaaggagaacagcaaacgctggaatcccgaaattcagtacacttccaactacaacaaatctgttaatgtggactttactgtggacactaatggtgtgtattcagagcctcgccccattggcaccagatacctgactcgtaatctgtaattgcttgttaatcaataaaccgtttaattcgtttcagttgaactttggtctctgcgaagggcgaattcgcggccgctaaattcaattcgcc

SEQ ID NO: 193 - protein, 735 aa, Adeno-associated virus
MAADGYLPDWLEDTLSEGIRQWWKLKPGPPPPKPAERHKDDSRGLVLPGYKYLGPFNGLYKGEPVDEADAAALEHDKAYDRQLDSGDNPYLKYNHADAEFQERLKEDTSFGGNLGRAVFQAKKRVLEPLGLVGEPVKTAPGKKRPVEHSPVEPDSSSGTGKAGNQPARKRLNFGQTGDADSVPDPQPLGQPPAAPSGLGSTTMATGSGAPVADNNEGADGVGNSSGNWHCDSQWLGDRVITTSTRTWALPTYNNHLYKQISSQSGASNDNHYFGYSTPWGYFDFNRFHCHFSPRDRQRLINNNWGFRPKRLNFKLFNIQVKEVTQNDGTTTIANNLTSTVQVFTDSGYQLPYVLGLAHQGCLPPFPADVFMVPQYGYLTLNNGSQAVGRSSFYCLEYFPSQMLRTGNNFQFSYTFEDVPFHSSYAHSQSLDRLMNPLIDQYLYYLNKTQSNSGTLQQSRLLFSQAGPTSMSLQAKNWLPGPCYRQQRLSKQANDNNNSNFPWTAATKYHLNGRDSLVNPGPAMASHKDDEEKFFPMHGTLIFGKQGTNANDADLDNVMITDEEEIRTTNPVATEQYGYVSNNLQNSNTGPTTGTVNHQGALPGMVWQDRDVYLQGPIWAKIPHTDGHFHPSPLMGGFGLKHPPPQIMIKNTPVPANPPTNFSSAKFASFITQYSTGQVSVEIEWELQKEDSKRWNPEIQYTSNYNKPVNVDFTVDTNGVYSEPRPIGTRYLTRNL

SEQ ID NO: 194 - DNA, 2208 bp, Adeno-associated virus
  source 1..2208: mol_type = genomic DNA
atggctgccgatggttatcttccagattggctcgaggacactctctctgaaggaataagacagtggtggaagctcaaacctggcccaccaccaccaaagcccgcagagcggcataaggacgacagcaggggtcttgtgcttcctgggtacaagtacctcggacccttcaacggactctacaagggagagccggtcgacgaggcagacgccgcggccctcgagcacgacaaggcctacgaccggcagctcgacagcggagacaacccgtacctcaagtacaaccacgccgacgcggagtttcaggagcgccttaaagaagatacgtcttttgggggcaacctcggacgagcagtcttccaggccaaaaagagggttcttgaacctctgggcttggttggggagcctgttaaaacggctccgggaaaaaagaggccggtagagcactctcctgtggagccagactcctcctcgggaaccggaaaagcgggcaaccagcctgcaagaaaaagattgaattttggtcagactggagacgcagactccgtacctgacccccagcctctcggacagccaccagcagccccctctggtctgggatctactacaatggctacaggcagtggcgcaccagtggcagacaataacgagggtgccgatggagtgggtaattcctcaggaaattggcattgcgattcccaatggctgggcgacagagtcatcaccaccagcacccgaacctgggctctgcccacctacaataaccacctctacaagcaaatctccagccaatcaggagcctcaaacgacaaccactactttggctacagcaccccctgggggtattttgacttcaacagattccactgccacttttcaccacgtgaccggcaaagactcatcaacaacaactggggattccgaccaaaaagactcaacttcaagctctttaacattcaagtcaaagaggtcacgcagaatgacggtacgacgacgattgccaataaccttaccagcacggttcaggtgtttactgactcggggtaccagctcccgtacgtcctcggcttggcgcatcaaggatgcctcccgccgttcccagcagacgtcttcatggtgccacagtatggatacctcaccctgaacaacgggagtcaggcggtaggacgctcttccttttactgcctggagtactttccttctcagatgctgcgtactggaaacaactttcagttcagctacacctttgaagacgttcctttccacagcagctacgctcacagccagagtctggatcggctgatgaatcctctgatcgaccagtacctgtattatctgaacaagacacaatcaaatagtggaactcttcagcagtctcggctactgtttagccaagctggacccaccagcatgtctcttcaagctaaaaactggctgcctggaccttgctacagacagcagcgtctgtcaaagcaggcaaacgacaacaacaacagcaactttccctggactgcggctacaaagtatcatctaaatggccgggactcgttggttaatccaggaccagctatggccagccacaaagacgatgaagaaaagtttttccccatgcatggaaccctgatatttggtaaacaaggaacaaatgctaacgacgcggatttggacaatgtcatgattacagatgaagaagaaatccgcaccaccaatcccgtggctacggagcagtacggatatgtgtcaaataatttgcaaaactcaaatactggtccaactactggaactgtcaatcaccaaggagcgttacctggtatggtgtggcaggatcgagacgtgtacctgcagggacccatttgggccaagattcctcacaccgatggacactttcatccttctccacttatgggaggttttggactcaaacacccacctcctcagatcatgattaaaaacactcccgttccagccaatcctcccacaaacttcagttctgccaagtttgcttctttcatcacacagtattccacgggacaagtcagcgtggagatcgagtgggagctgcagaaggaggacagcaaacgctggaaccccgagatccagtacacttccaactataacaaacctgttaatgtggactttactgtggacactaatggtgtgtattcagagcctcgccccattggcaccagatacctgactcgtaatctgtaa

SEQ ID NO: 195 - DNA, 3161 bp, Adeno-associated virus
  source 1..3161: mol_type = genomic DNA
cgaattgatttagcggccgcgaattcgcccttcgcagagaccaaagttcaactgaaacgaattaaacggtttattgattaacaagcaattacagattacgagtcaggtatctggtgccaatggggcgaggctctgaatacacaccattagtgtccacagtaaagtccacattaacagatttgttgtagttggaagtgtactggatctcgggattccagcgtttgctgttctccttctgtagctcccactcgatctccacgctgacccgccccgtggaatactgtgtgatgaaggaagcaaactttgccgcactgaaggtggtcgaaggattcgcaggtaccggggtgtttttgatgagaatctgtggaggagggtgtttaagtccgaatccgcccatgaggggagaggggtgaaaatgtccgtccgtgtgcggaatctttgcccagataggcccctgcaggtacacgtctctgtcctgccagaccatgcctggaagaacgccttgtgtgttgacatctgcagtagatgcttgtgtgttgccgctctggaggttggtagatacagaaccatactgctccgtggccacgggattggtggttctgatttcctcttcgtctgtaatcatgaccttttcaatgtccacatttgttttctctgatccttgttttccaaagatgagaaccccgctctgaggaaaaaacttttcttcatcgtccttgtggctggccattgccgggcccggattcaccagagagtctctgccattgaggtggtacttggtagctccaatccacgagtattcactgttgttgttgtccgcagatgtctttgatactcgctgctggcggtaacagggtccaggaagccagttcctagactgatcccgaatgtcactcgctccggcctgagaaaactgaagcctggactgcgtggtggttccgcttggagtgtttgttctgctcaagtaatacaggtactggtcgatgagaggattcatgagacggtccaaactctggctgtgagcgtagctgctgtggaaaggaacatcctcaaaggtgtagctgaaggtaaagttgtttccggtacgcagcatctgagaagggaagtactccaggcagtaaaatgaagagcgtcctactgcctgactcccgttgttcagggtgaggtatccatactgtggcaccatgaagacgtctgctgggaacggcgggaggcatccttgatgcgccgagccgaggacgtacgggagctggtactccgagtcagtaaacacctgaaccgtgctggtaaggttattggcaatcgtcgtcgtaccatcattctgcgtgacctctctgacttgaatgttaaagagcttgaagttgagtctcttgggccggaatccccagttgttgttgatgagtctttgccagtcacgtggtgaaaagtggcagtggaatctgttgaagtcaaaatacccccaaggggtgctgtagccaaagtagtggttgtcgttgctggctcctgattggctggaaatctgcttgtacagatggttgttgtaggtgggcagagcccaggttcgggtgctggtggtgatgactctgtcgcccatccatgtggaatcgcaatgccaatttcccgaggaattacccactccgtcggcgccatcgttattgtctgccattggtgcgccactgcctgtagccatcgtattagttcccagaccagagggggctgctggtggctgtccgagaggctgggggtcaggtacggagtctgcgtctccagtctgaccgaaattcaatctctttcttgcaggctggttgcccgcttttccggttcccgaggaggagtctggctccacaggagagtgctctaccggcctcttttttcccggagccgtcttaacaggctcctcaaccaggcccagaggttcaagaaccctcttttttgcctggaagactgctcgtccgaggttgcccccaaaagacgtatcttctttaaggcgctcctgaaactccgcgtcggcgtggtcgtacttgaggtacgggttgtctccgctgtcgagctgccggtcgtaggccttgtcgtgctcgagggccgcggcgtctgcctcgttgaccggctctcccttgtcgagtccgttgaagggtccgaggtacttgtacccaggaagcacaagacccctgctgtcgtccttatgccgctctgcgggctttggtggtggtgggccaggtttgagcttccaccactgtcttattccttcagagagagtgtcctcgagccaatctggaagataaccatcggcagccatacctgatttaaatcatttattgttcagagatgcagtcatccaaatccacattgaccagatcgcaggcagtgcaagcgtctggcacctttcccatgatatgatgaatgtagcaaagtttctgatacgcctttttgacgacagaaacgggttgagattctgacacgggaaagcactctaaacagtctttctgtccgtgagtgaagcagatatttgaattctgattcattctctcgcattgtctgcagggaaacagcatcagattcatgcccacgtgacgagaacatttgttttggtacctgtccgcgtagttgatcgaagcttccgcgtctgacgtcgatggctgcgcaactgactcgcgcgcccgtttgggctcacttatatctgcgtcactgggggcgggtcttttcttggctccaccctttttgacgtagaattcatgctccacctcaaccacgtgatcctttgcccaccggaaaaagtctttcacttcctgcttggtgaccttcccaaagtcatgatccagacggcgggttagttcaaatttgaacatccggtcttgcaacggctgctggtgttcgaaggtcgttgagttcccgtcaatcacggcgcacatgttggtgttggaggtggcgatcacgggagtcgggtctatctgggccgaggacttgcacttttggtccacgcgcaccttgcttcctccgagaatggcttcggccgattccacgaccttggcggtcatctttccctcctcccaccagatcaccatcttgtcgacacagtcgttgaagggaaagttctcattggtccagttgacgcagcaagggcgaattcgtttaaacctgcaggaactagtcccttagtgagg

SEQ ID NO: 196 - protein, 735 aa, Adeno-associated virus
MAADGYLPDWLEDTLSEGIRQWWKLKPGPPPPKPAERHKDDSRGLVLPGYKYLGPFNGLYKGEPVNEADAAALEHDKAYDRQLDSGDNPYLKYNHAGAEFQERLKEDTSFGGNLGRAVFQAKKRVLEPLGLVEEPVKTAPGKKRPVEHSPVEPDSSSGTGKAGNQPARKRLNFGQTGDADSVPDPQPLGQPPAAPSGLGSTTMATGSGAPVADNNEGADGVGNSSGNWHCDSQWLGDRVITTSTRTWALPTYNNHLYKQISSQSGASNDNHYFGYSTPWGYFDFNRFHCHFSPRDWQRLINNNWGFRPKRLNFKLFNIQVKEVTQNDGTTTIANNLTSTVQVFTDSEYQLPYVLGSAHQGCLPPFPADVFMVPQYGYLTLNNGSQAVGRSSFYCLEYFPSQMLRTGNNFQFSYTFEDVPFHSSYAHSQSLDRLMNPLIDQYLYYLNKTQSNSGTLQQSRLLFSQAGPTSMSLQAKNWLPGPCYRQQRLSKQANDNNNSNFPWTAATKYHLNGRDSLVNPGPAMASHKDDEEKFFPMHGTLIFGKQGTNANDADLDNVMITDEEEIRTTNPVATEQYGYVSNNLQDSNTGPTTGTVNHQGALPGMVWQDRDVYLQGPIWAKIPHTDGHFHPSPLMGGFGLKHPPPQIMIKNTPVPANPPTNFSSAKFASFITQYSTGQVSVEIEWELQKENSKRWNPEIQYTSNYNKSVNVDFTVDTNGVYSEPRPIGTRYLTRNL

SEQ ID NO: 197 - DNA, 2208 bp, Adeno-associated virus
  source 1..2208: mol_type = genomic DNA
atggctgccgatggttatcttccagattggctcgaggacactctctctgaaggaataagacagtggtggaagctcaaacctggcccaccaccgccaaagcccgcagagcggcataaggacgacagcaggggtcttgtgcttcctgggtacaagtacctcggacccttcaacggactctacaagggagagccggtcaacgaggcagacgccgcggccctcgagcacgacaaggcctacgaccggcagctcgacagcggagacaacccgtacctcaagtacaaccacgccggcgcggagtttcaggagcgccttaaagaagatacgtcttttgggggcaacctcggacgagcagtcttccaggccaaaaagagggttcttgaacctctgggcttggttgaggagcctgttaaaacggctccgggaaaaaagaggccggtagagcactctcctgtggagccagactcctcctcgggaaccggaaaagcgggcaaccagcctgcaagaaaaagattgaattttggtcagactggagacgcagactccgtacctgacccccagcctctcggacagccaccagcagccccctctggtctgggatctactacaatggctacaggcagtggcgcaccagtggcagacaataacgagggtgccgatggagtgggtaattcctcaggaaattggcattgcgattcccaatggctgggcgacagagtcatcaccaccagcacccgaacctgggctctgcccacctacaacaaccacctctacaagcaaatctccagccaatcaggagcctcaaacgacaaccactactttggctacagcaccccctgggggtattttgacttcaacagattccactgccacttttcaccacgtgactggcaaagactcatcaacaacaactggggattccgaccaaagagactcaacttcaagctctttaacattcaagtcaaagaggtcacgcagaatgacggtacgacgacgattgccaataaccttaccagcacggttcaggtgtttactgactcggagtaccagctcccgtacgtcctcggctcggcgcatcaaggatgcctcccgccgttcccagcagacgtcttcatggtgccacagtatggatacctcaccctgaacaacgggagtcaggcggtaggacgctcttccttttactgcctggagtactttccttctcagatgctgcgtactggaaacaactttcagttcagctacacctttgaagacgttcctttccacagcagctacgctcacagccagagtctggatcggctgatgaatcctctgatcgaccagtacctgtattatctgaacaagacacaatcaaatagtggaacccttcagcagtctcggctactgtttagccaagctggacccaccagcatgtctcttcaagctaaaaactggctgcctggaccttgctacagacagcagcgtctgtcaaagcaggcaaacgacaacaacaacagcaactttccctggactgcggctacaaagtatcatctaaatggccgggactcgttggttaatccaggaccagctatggccagccacaaagacgatgaagaaaagtttttccccatgcatggaaccctgatatttggtaaacaaggaacaaatgctaacgacgcggatttggacaatgtcatgattacagatgaagaagaaatccgcaccaccaatcccgtggctacggagcagtacggatatgtgtcaaataatttgcaagactcaaatactggtccaactactggaactgtcaatcaccaaggagcgttacctggtatggtgtggcaggatcgagacgtgtacctgcagggacccatttgggccaagattcctcacaccgatggacactttcatccttctccacttatgggaggttttggactcaaacacccacctcctcagatcatgattaaaaacactcccgttccagccaatcctcccacaaacttcagttctgccaagtttgcttctttcatcacacagtattccacgggacaagtcagcgtagagatcgagtgggagctgcagaaggagaacagcaaacgctggaaccccgagatccagtacacttccaactataacaaatctgttaatgtggactttactgtggacactaatggtgtgtattcagagcctcgccccattggcaccagatacctgactcgtaatctgtaa

SEQ ID NO: 198 - protein, 738 aa, Adeno-associated virus
MAADGYLPDWLEDNLSEGIREWWDLKPGAPKPKANQQKQDDGRGLVLPGCKYLGPFNGLDKGEPVNAADAAALEHDKAYDQQLKAGDNPYLRYNHADAEFQERLQEDTSFGGNLGRAVFQAKKRVLEPLGLVEEGAKTAPGKKRPVEPSPQRSPDSSTGIGKTGQQPAKKRLNFGQTGDSESVPDPQPIGEPPAGPSGLGSGTMAAGGGAPMADNNEGADGVGSSSGNWHCDSTWLGDRVITTSTRTWALPTYNNHLYKQISNGTSGGSTNDNTYFGYSTPWGYFDFNRFHCHFSPRDWQRLINNNWGFRPKRLNFKLFNIQVKEVTQNEGTKTIANNLTSTIQVFTDSEYQLPYVLGSAHQGCPPPFPADVFMIPQYGYLTLNNGSQAVGRSSFYCLEYFPSQMRRTGNNFEFSYQFEDVPFHSSYAHSQSLDRLMNPLIDQYLYYLSRTQSTGGTAGTQQLLFSQAGPNNMSAQAKNWLPGPCYRQQRVSTTLSQNNNSNFAWTGATKYHLNGRDSLVNPGVAMATHKDDEERFFPSSGVLMFGKQGAGKDNVDYSSVMLTSEEEIKTTNPVATEQYGVVADNLQQQNAAPIVGAVNSQGALPGMVWQNRDVYLQGPIWAKIPHTDGNFHPSPLMGGFGLKHPPPQILIKNTPVPADPPTTFSQAKLASFITQYSTGQVSVEIEWELQKENSKRWNPEIQYTSNYNKSVNVDFTVDTNGVYSEPRPIGTRYLTRNL

SEQ ID NO: 199 - DNA, 2217 bp, Adeno-associated virus
  source 1..2217: mol_type = genomic DNA
atggctgccgatggttatcttccagattggctcgaggacaacctctctgagggcattcgcgagtggtgggacttgaaacctggagccccgaaacccaaagccaaccagcaaaagcaggacgacggccggggtctggtgcttcctggctgcaagtacctcggacccttcaacggactcgacaagggggagcccgtcaacgcggcggacgcagcggccctcgagcacgacaaggcctacgaccagcagctcaaagcgggtgacaatccgtacctgcggtataaccacgccgacgccgagtttcaggagcgtctgcaagaagatacgtcttttgggggcaacctcgggcgagcagtcttccaggccaagaagcgggttctcgaacctctcggtctggttgaggaaggcgctaagacggctcctggaaagaagagaccggtagagccatcaccccagcgttctccagactcctctacgggcatcggcaagacaggccagcagcccgcgaaaaagagactcaactttgggcagactggcgactcagagtcagtgcccgaccctcaaccaatcggagaaccccccgcaggcccctctggtctgggatctggtacaatggctgcaggcggtggcgctccaatggcagacaataacgaaggcgccgacggagtgggtagttcctcaggaaattggcattgcgattccacatggctgggcgacagagtcatcaccaccagcacccgaacctgggccctccccacctacaacaaccacctctacaagcaaatctccaacgggacatcgggaggaagcaccaacgacaacacctacttcggctacagcaccccctgggggtattttgactttaacagattccactgccacttctcaccacgtgactggcagcgactcatcaacaacaactggggattccggcccaagagactcaacttcaagctcttcaacatccaggtcaaggaggtcacgcagaatgaaggcaccaagaccatcgccaataaccttaccagcacgattcaggtctttacggactcggaataccagctcccgtacgtcctcggctctgcgcaccagggctgcccgcctccgttcccggcggacgtcttcatgattcctcagtacgggtacctgactctgaacaacggcagtcaggccgtgggccgttcctccttctactgcctggagtactttccttctcaaatgcggagaacgggcaacaactttgagttcagctaccagtttgaggacgtgccttttcacagcagctacgcgcatagccaaagcctggaccggctgatgaaccccctcatcgaccagtacctgtactacctgtctcggactcagtccacgggaggtaccgcaggaactcagcagttgctattttctcaggccgggcctaataacatgtcggctcaggccaaaaactggctacccgggccctgctaccggcagcaacgcgtctccacgacactgtcgcaaaataacaacagcaactttgcttggaccggtgccaccaagtatcatctgaatggcagagactctctggtaaatcccggtgtcgctatggcaacgcacaaggacgacgaagagcgattttttccatccagcggagtcttgatgtttgggaaacagggagctggaaaagacaacgtggactatagcagcgttatgctaaccagtgaggaagaaatcaaaaccaccaacccagtggccacagaacagtacggcgtggtggccgataacctgcaacagcaaaacgccgctcctattgtaggggccgtcaacagtcaaggagccttacctggcatggtctggcagaaccgggacgtgtacctgcagggtcctatctgggccaagattcctcacacggacggcaactttcatccttcgccgctgatgggaggctttggactgaaacacccgcctcctcagatcctgattaagaatacacctgttcccgcggatcctccaactaccttcagtcaagccaagctggcgtcgttcatcacgcagtacagcaccggacaggtcagcgtggaaattgaatgggagctgcagaaagagaacagcaagcgctggaacccagagattcagtatacttccaactataacaaatctgttaatgtggactttactgtggacactaatggtgtgtattcagagcctcgccccattggcaccagatacctgactcgtaatctgtaa

SEQ ID NO: 200 - DNA, 3167 bp, Adeno-associated virus
  source 1..3167: mol_type = genomic DNA
attgaatttagcggccgcgaattcgcccttcgcagagaccaaagttcaactgaaacgaattaaacggtttattgattaacaagcaattacagattacgagtcaggtacctggtgccaatggggcgaggctctgaatacacaccattagtgtccacagtaaagtccacattaacagatttgttgtagttggaagtgtactgaatctcgggattccagcgtttgctgttctccttctgcagctcccactcgatctccacgctgacctgccccgtggagtactgtgtaatgaaggaagcaaactttgccgcactgaaggtagtcgaaggattcgcaggtaccggggtgttcttgatgagaatctgcgggggagggtgtttaagtccgaatccgcccatgaggggagaggggtgaaaatgtccgtccgtgtgtggaatctttgcccagatgggcccctgcaggtacacgtctctgtcctgccacaccatgcctggaagaacgccttgtgtgttgacatctgaggtagctgcttgtgtgttgccgctctggaggttggtagatacagaaccatactgctccgtagccacgggattggtggtcctgatttcctcttcgtctgtaatcatgaccttttcaatgtccacattagtttttcccgagtcttgttttccaaagatgagaaccccgctctgaggaaaaaacttttcttcatcgtccttgtggctggccatggccgggcccggattcaccagagagtctcttccattaaggtggtacttggtagctccagtccacgagtattcactgttgttgttatccgcagatgtctttgatactcgctgctggcggtaacagggtccaggaagccagttcctagactggtcccgaatgtcacttgctccggcctgagaaaactgaagccttgactgcgtggtggttccgcttggagtgtttgttctgctcaagtaatacaggtactggtcgatgagaggattcatgagacggtccaaactctggctgtgggcgtagctgctgtggaaaggaacgtcctcaaaggtgtagctgaaggtaaagttgtttccggtacgcagcatctgagaaggaaagtactccaggcagtaaaatgaagagcgtcctactgcctgactcccgttgttcagggtgaggtatccatactgtggcaccatgaagacgtctgctgggaacggcgggaggcatccttgatgcgccgagccgaggacgtacgggagctggtactccgagtcagtaaacacctgaaccgtgctggtaaggttattggcaatcgtcgtcgtaccgtcattctgcgtgacctccttgacttgaatgttaaagagcttgaagttgagtcttttgggccggaatccccaattgttgttgatgagtctttgccagtcacgtggcgaaaagtggcagtggaatctgttgaagtcaaaatacccccaaggggtgctgtagccaaagtagtggttgtcgtttgaggctcctgattggctggaaatctgcttgtagaggtggttgttgtaggtgggcagagcccaggtgcgggtgctggtggtgatgactctgtcgcccatccatgtggaatcgcaatgccaatttcccgaggaattacccactccgtcggcgccctcgttattgtctgccattggtgcgccactgcctgtagccatcgtattagttcccagaccagagggggctgctggtggctgtccgagaggctgggggtcaggtacggagtctgcgtctccagtctgaccgaaattcaatctctttcttgcaggctgctggcccgcttttccggttcccgaggaggagtctggctccgcaggagagtgctctaccggcctcttttttcccggagccgtcttaacaggttcctcaaccaggcccagaggttcaagaaccctctttttcgcctggaagactgctcgtccgaggttgcccccaaaagacgtatcttctttaagacgctcctggaactccgcgtcggcgtggttgtacttggggtacgggttgtctccgctgtcgagctgccggtcgtaggccttgtcgtgctcgagggccgcggcgtctgcctcgttgaccggctctcccttgtcgagtccgttgaagggtccaaggtacttgtacccaggaagcacaagacccctgctgtcgtccttatgccgctctgcgggctttggtggtggtgggccaggtttgagcttccaccactgtcttattccttcagagagagtgtcctcgagccaatctggaagataaccatcggcagccatacctgatttaaatcatttattgttcagagatgcagtcatccaaatccacattgaccagatcgcaagcagtgcaagcgtctggcacctttcccatgatatgatgaatgtagcacagtttctgatacgcctttttgacgacagaaacgggttgagattctgacacgggaaagcactctaaacagtctttctgtccgtgagtgaagcagatatttgaattctgattcattctctcgcattgtctgcagggaaacagcatcagattcatgcccacgtgacgagaacatttgttttggtacctgtccgcgtagttgattgaagcttccgcgtctgacgtcgatggctgcgcaactgactcgcgcgcccgtttgggctcacttatatctgcgtcactgggggcgggtctttttttggctccaccctttttgacgtagaattcatgctctacctcaaccacgtgatcctttgcccaccggaaaaagtctttgacttcctgcttggtgaccttcccaaagtcatgatccagacggcgggtgagttcaaatttgaacatccggtcttgcaacggctgctggtgttcgaaggtcgttgagttcccgtcaatcactgcgcacatgttggtgttggaggtgacaatcacgggagtcgggtctatctgggccgaggacttgcatttctggtccacgcgcaccttgcttcctccgagaatggctttggccgactccacgaccttggcggtcatcttcccctcctcccaccagatcaccatcttgtcgacgcaatcattgaaaggaaagttctcattggtccagttgacgcagccgtagaaagggcgaattcgtttaaacctgcaggactagtccctttagtgagggt

SEQ ID NO: 201 - DNA, 3161 bp, Adeno-associated virus
  source 1..3161: mol_type = genomic DNA
aattgaatttagcggccgcgaattcgcccttcgcagagaccaaagttcaactgaaacgaattaaacggtttattgattaacaagcaattacagattacgagtcaggtatctggtgccaatggggcgaggctctgaatacacaccattagtgtccacagtaaagtccacattaacagatttgttgtagttggaagtgtactgaatctcgggattccagcgtttgctgttctccttctgcagctcccactcgatctccacgctgacctgccccgtggagtactgtgtaatgaaggaagcaaactttgccgcactgaaggtagtcgaaggattcgcaggtaccggggtgttcttgatgagaatctgcgggggagggtgtttaagtccgaatccgcccatgaggggagaggggtgaaaatgtccgtccgtgtgtggaatctttgcccagatgggcccctgcaggtacacgtctctgtcctgccacaccatgcctggaagaacgccttgtgtgttgacatctgaggtagctgcttgtgtgttgccgctctggaggttggtagatacagaaccatactgctccgtagccacgggattggtggtcctgatttcctcttcgtctgtaatcatgaccttttcaatgtccacattagtttttcccgagtcttgttttccaaagatgagaaccccgctctgaggaaaaaacttttcttcatcgtccttgtggctggccatggccgggcccggattcaccagagagtctcttccattaaggtggtacttggtagctccagtccacgagtattcactgttgttgttatccgcagatgtctttgatactcgctgctggcggtaacagggtccaggaagccagttcctagactggtcccgaatgtcacttgctccggcctgagaaaactgaagccttgactgcgtggtggttccgcttggagtgtttgttctgctcaagtaatacaggtactggtcgacgagaggattcatgagacggtccaaactctggctgtgggcgtagctgctgtggaaaggaacgtcctcaaaggtgtagctgaaggtaaagttgtttccggtacgcagcatctgagaaggaaagtactccaggcagtaaaatgaagagcgtcctactgcctgactcccgttgttcagggtgaggtatccatactgtggcaccatgaagacgtctgctgggaacggcgggaggcatccttgatgcgccgagccgaggacgtacgggagctggtactccgagtcagtaaacacctgaaccgtgctggtaaggttattggcaatcgtcgtcgtaccgtcattctgcgtgacctccttgacttgaatgttaaagagcttgaagttgagtcttttgggccgggatccccaattgttgttgatgagtctttgccagtcacgtggcgaaaagtggcagtggaatctgttgaagtcaaaatacccccaaggggtgctgtagccaaagtagtggttgtcgtttgaggctcctgattggctggaaatctgcctgtagaggtggttgttgtaggtgggcagagcccaggtgcgggtgctggtggtgatgactctgtcgcccatccatgtggaatcgcaatgccaatttcccgaggaattacccactccgtcggcgccctcgttattgtctgccattggtgcgccactgcctgtagccatcgtattagttcccagaccagagggggctgctggtggctgtccgagaggctgggggtcaggtacggagtctgcgtctccagtctgaccgaaattcaatctccttcttgcaggctgctggcccgcttttccggttcccgaggaggagtctggctccgcaagagagtgctctaccggcctcttttttcccggagccgtcttaacaggttcctcaaccaggcccagaggttcaagaaccctctttttcgcctggaagactgctcgtccgaggttgcccccaaaagacgtatcttctttaagacgctcctggaactccgcgtcggcgtggttgtacttgaggtacgggttgtctccgccgtcgagctgccggtcgtaggccttgtcgtgctcgagggccgcggcgtctgcctcgttgaccggctctcccttgtcgagtccgttgaagggtccaaggtacttgtacccaggaagcacaagacccctgctgtcgtccttatgccgctctgcgggctttggtggtggtgggccaggtttgagcttccaccactgtcttattccttcagagagagtgtcctcgagccaatctggaagataaccatcggcagccatacctgatttaaatcatttattgttcagagatgcagtcatccaaatccacattgaccagatcgcaagcagtgcaagcgtctggcacctttcccatgatatgatgaatgtagcacagtttctgatacgcctttttgacgacagaaacgggttgagattctgacacgggaaagcactctaaacagtctttctgtccgtgagtgaagcagatatttgaattctgattcattctctcgcattgtctgcagggaaacagcatcagattcatgcccacgtgacgagaacatttgttttggtacctgtccgcgtagttgattgaagcttccgcgtctgacgtcgatggctgcgcaactgactcgcgcgcccgtttgggctcacttatatctgcgtcactgggggcgggtctttttttggctccaccctttttgacgtagaattcatgctctacctcaaccacgtgatcctttgcccaccggaaaaagtctttgacttcctgcttggtgaccttcccaaagtcatgatccagacggcgggtgagttcaaatttgaacatccggtcttgcaacggctgctggtgttcgaaggtcgttgagttcccgtcaatcactgcgcacatgttggtgttggaggtgacaatcacgggagtcgggtctatctgggccgaggacttgcatttctggtccacgcgcaccttgcttcctccgagaatggctttggccgactccacgaccttggcggtcatcttcccctcctcccaccagatcaccatcttgtcgacgcaatcattgaaaggaaagttctcattggtccagttgacgcagcaagggcgaattcgtttaaacctgcaggactagtccctttagtgaggg

SEQ ID NO: 202 - DNA, 3172 bp, Adeno-associated virus
  source 1..3172: mol_type = genomic DNA
gattgaatttagcggccgcgaattcgcccttgctgcgtcaactggaccaatgagaactttcccttcaacgattgcgtcgacaagatggtgatctggtgggaggagggcaagatgaccgccaaggtcgtggagtccgccaaggccattctgggtggaagcaaggtgcgcgtggaccaaaagtgcaagtcatcggcccagatcgaccccacgcccgtgatcgtcacctccaacaccaacatgtgcgccgtgatcgacgggaacagcaccaccttcgagcaccagcagcccctgcaggaccgcatgttcaagttcgagctcacccgccgtctggagcacgactttggcaaggtgaccaagcaggaagtcaaagagttcttccgctgggctcaggatcacgtgactgaggtggcgcatgagttctacgtcagaaagggcggagccaccaaaagacccgcccccagtgacgcggatataagcgagcccaagcgggcctgcccctcagttgcggagccatcgacgtcagacgcggaagcaccggtggactttgcggacaggtaccaaaacaaatgttctcgtcacgcgggcatgcttcagatgctgtttccctgcaagacatgcgagagaatgaatcagaatttcaacgtctgcttcacgcacggggtcagagactgctcagagtgcttccccggcgcgtcggaatctcaacccgtcgtcagaaaaaagacgtatcagaaactgtgcgcgattcatcatctgctggggcgggcacccgagattgcgtgttcggcctgcgatctcgtcaacgtggacttggatgactgtgtttctgagcaataaatgacttaaaccaggtatggctgctgacggttatcttccagattggctcgaggacaacctctctgagggcattcgcgagtggtgggacctgaaacctggagcccccaagcccaaggccaaccagcagaagcaggacgacggccggggtctggtgcttcctggctacaagtacctcggacccttcaacggactcgacaagggggagcccgtcaacgcggcggacgcagcggccctcgagcacgacaaggcctacgaccagcagctcaaagcgggtgacaatccgtacctgcggtataaccacgccgacgccgagtttcaggagcgtctgcaagaagatacgtcttttgggggcaacctcgggcgagcagtcttccaggccaagaagcgggttctcgaacctctcggtctggttgaggaagctgctaagacggctcctggaaagaagagaccggtagaaccgtcacctcagcgttcccccgactcctccgcgggcatcggcaagaaaggccagcagcccgctaaaaagagactgaactttggtcagactggcgactcagagtcagtccccgaccctcaaccaatcggagaaccaccagcaggcccctctggtctgggatctggtacaatggctgcaggcggtggcgctccaatggcagacaataacgaaggcgccgacggagtgggtagttcctcaggaaattggcattgcgattccacatggctgggcgacagagtcatcaccaccagcacccgaacctgggccctgcccacctacaacaaccacctctacaagcaaatatccaatgggacatcgggaggaagcaccaacgacaacacctacttcggctacagcaccccctgggggtattttgacttcaacagattccactgccacttctcaccacgtgactggcagcgactcatcaacaacaactggggattccggccaaaaagactcagcttcaagctcttcaacatccaggtcaaggaggtcacgcagaatgaaggcaccgagaccatcgccaataaccttaccagcacgattcaggtatttacggactcggaataccagctgccgtacgtcctcggctccgcgcaccagggctgcctgcctccgttcccggcggacgtcttcatgattccccagtacggctaccttacactgaacaatggaagtcaagccgtaggccgttcctccttctactgcctggaatattttccatctcaaatgctgcgaactggaaacaattttgaattcagctacaccttcgaggacgtgcctttccacagcagctgcgcacacagccagagctcggaccgactgatgaatcctctcatcgaccagtacctgtactacttatccagaactcggtccacaggaggaactcaaggtacccagcaattgttattttctcaagctgggcctgcaaacatgtcggctcaggctaagaactggctacctggaccttgctaccggcagcagcgagtctctacgacactgtcgcaaaacaacaacagcaactttgcttggactggtgccaccaaatatcacctgaacggaagagactctttggtaaatcccggtgtcgccatggcaacccacaaggacgacgaggaacgcttcttcccgtcgagtggagtcctgatgtttggaaaacagggtgctggaagagacaatgtggactacagcagcgttatgctaaccagcgaagaagaaattaaaaccactaaccctgtagccacagaacaatacggtgtggtggctgacaacttgcagcaaaccaatacagggcctattgtgggaaatgtcaacagccaaggagccttacctggcatggtctggcagaaccgagacgtgtacctgcagggtcccatctgggccaagattcctcacacggacggcaacttccacccttcaccgctaatgggaggatttggactgaagcacccacctcctcagatcctgatcaagaacacgccggtacctgcggatcctccaacaacgttcagccaggcgaaattggcttccttcattacgcagtacagcaccggacaggtcagcgtggaaatcgagtgggagctgcagaaggagaacagcaaacgctggaacccagagattcagtacacttcaaactactacaaatctacaaatgtggactttgctgtcaatacagagggaacttattctgagcctcgccccattggtactcgttacctcacccgtaatctgtaattgctggttaatcaataaaccgtttgattcgtttcagttgaactttggtctctgcgaagggcgaattcgtttaaacctgcaggactagtccctttagtgagg

SEQ ID NO: 203 - DNA, 3172 bp, Adeno-associated virus
  source 1..3172: mol_type = genomic DNA
gattgaatttagcggccgcgaattcgcccttgctgcgtcaactggaccaatgagaactttcccttcaacgattgcgtcgacaagatggtgatctggtgggaggagggcaagatgaccgccaaggtcgtggagtccgccaaggccattctgggtggaagcaaggtgcgcgtggaccaaaagtgcaagtcatcggcccagatcgaccccacgcccgtgatcgtcacctccaacaccaacatgtgcgccgtgatcggcgggaacagcaccaccttcgagcaccagcagcccctgcaggaccgcatgttcaagttcgagctcacccgccgtctggagcacgactttggcaaggtgaccaagcaggaagtcaaagagttcttccgctgggctcaggatcacgtgactgaggtggcgcatgagttctacgtcagaaagggcggagccaccaaaagacccgcccccagtgacgcggatataagcgagcccaagcgggcctgcccctcagttgcggagccatcgacgtcagacgcggaagcaccggtggactttgcggacaggtaccaaaacaaatgttctcgtcacgcgggcatgcttcagatgctgtttccctgcaagacatgcgagagaatgaatcagaatttcaacgtctgcttcacgcacggggtcagagactgctcagagtgcctccccggcgcgtcagaatctcaacccgtcgtcagaaaaaagacgtatcagaaactgtgcgcgattcatcatctgctggggcgggcacccgagattgcgtgttcggcctgcgatctcgtcaacgtggacttggatgactgtgtttctgagcaataaatgacttaaaccaggtatggctgctgacggttatcttccagattggctcgaggacaacctctctgagggcattcgcgagtggtgggacctgaaacctggagcccccaagcccaaggccaaccagcagaagcaggacgacggccggggtctggtgcttcttggctacaagtacctcggacccttcaacggactcgacaagggggagcccgtcaatgcggcggacgcagcggccctcgagcacgacaaggcctacgaccagcagctcaaagcgggtgacaatccgtacctgcggtataaccacgccgacgccgagtttcaggagcgtctgcaagaagatacgtcttttgggggcaacctcgggcgagcagtcttccaggccaagaagcgggttctcgaacctctcggtctggttgaggaagctgctaagacggctcctggaaagaagagaccggtagaaccgtcacctcagcgttcccccgactcctccacgggcatcggcaagaaaggccagcagcccgctaaaaagagactgaactttggtcagactggcgactcagagtcagtccccgaccctcaaccaatcggagaaccaccagcaggcccctctggtctgggatctggtacaatggctgcaggcggtggcgctccaatggcagacaataacgaaggcgccgacggagtgggtagttcctcaggaaattggcattgcgattccacatggctgggcgacagagtcatcaccaccagcacccgaacctgggccctgcccacctacaacaaccacctctacaagcaaatatccaatgggacatcgggaggaagcaccaacgacaacacctacttcggctacagcaccccctgggggtattttgacttcaacagattccactgccacttctcaccacgtgactggcagcgactcatcaacaacaactggggattccggccaaaaagactcagcttcaagctcttcaacatccaggtcaaggaggtcacgcagaatgaaggcaccaagaccatcgccaataaccttaccagcacgattcaggtatttacggactcggaataccagctgccgtacgtcctcggctccgcgcaccagggctgcctgcctccgttcccggcggacgtcttcatgattccccagtacggctaccttacactgaacaatggaagtcaagccgtaggccgttcctccttctactgcctggaatattttccatctcaaatgctgcgaactggaaacaattttgaattcagctacaccttcgaggacgtgcctttccacagcggctacgcacacagccagagcttggaccgactgatgaatcctctcatcgaccagtacctgtactacttatccagaactcagtccacaggaggaactcaaggtacccagcaattgttattttctcaagctgggcctgcaaacatgtcggctcaggctaagaactggctacctggaccttgctaccggcagcagcgagtctctacgacactgtcgcaaaacaacaacagcaactttgcttggactggtgccaccaaatatcacctgaacggaagagactctttggtaaatcccggtgtcgccatggcaacccacaaggacgacgaggaacgcttcttcccgtcgagtggagtcctgatgtttggaaaacagggtgctggaagagacaatgtggactacagcagcgttatgctaaccagcgaagaagaaattaaaaccactaaccctgtagccacagaacaatacggtgtggtggctgacaacttgcagcaaaccaatacagggcctattgtgggaaatgtcaacagccaaggagccttacctggcatggtctggcagaaccgagacgtgtacctgcagggtcccatctgggccaagattcctcacacggacggcaacttccacccttcaccgctaatgggaggatttggactgaagcacccacctcctcagatcctgatcaagaacacgccggtacctgcggatcctccaacgacgttcagccaggcgaaattggcttccttcattacgcagtacagcaccggacaggtcagcgtggaaatcgagtgggagctgcagaaggagaacagcaaacgctggaacccagagattcagtacacttcaaactactacaaatctacaaatgtggactttgctgtcaatacagagggaacttattctgagcctcgccccattggtactcgttacctcacccgtaatctgtaattgctggttaatcaataaaccgtttgattcgtttcagttgaactttggtctctgcgaagggcgaattcgtttaaacctgcaggactagtccctttagtgagg

SEQ ID NO: 204 - DNA, 2208 bp, Adeno-associated virus
  source 1..2208: mol_type = genomic DNA
atggctgccgatggttatcttccagattggctcgaggacactctctctgaaggaataagacagtggtggaagctcaaacctggcccaccaccaccaaagcccgcagagcggcataaggacgacagcaggggtcttgtgcttcctgggtacaagtacctcggacccttcaacggactcgacaagggagagccggtcaacgaggcagacgccgcggccctcgagcacgacaaggcctacgaccggcagctcgaaagcggagacaacccgtacctcaagtacaaccacgccgacgcggagtttcaggagcgtcttaaagaagatacgtcttttgggggcaacctcggacgagcagtcttccaggcgaaaaagagggttcttgaacctctgggcctggttgaggagcctgttaaaacggctccgggaaaaaagaggccggtagagcactctcctgtggagccagactcctcctcgggaaccggaaaagcgggccagcagcctgcgagaaaaagattgaattttggtcagactggagacgcagactccgtacctgacccccagcctctcggacagccaccagcagccccctctggtctgggatctactacaatggcttcaggcagtggcgcaccagtggcagacaataacgagggtgccgatggagtgggtaattcctcaggaaattggcattgcgattcccaatggctgggcgacagagtcatcaccaccagcacccgaacctgggccctgcccacctacaacaaccacctctacaagcaaatctccagccaatcaggagcctcaaacgacaaccactactttggctacagcaccccctgggggtattttgacttcaacagattccactgccacttttcaccacgtgactggcaaagactcatcaacaacagctggggattccgacccaaaagactcaacttcaagctctttaacattcaagtcaaagaggtcacgcagaatgacggtacgacgacgattgccaataaccttaccagcacggttcaagtgtttaccgactcggagtaccagctcccgtacgtcctcggctcggcgcatcaaggatgcctcccgccgttcccagcagacgtctttatggtcccacagtatggatacctcaccctgaacaacgggagtcaggcggtaggacgctcttccttttactgcctggagtactttccttctcagatgctgcgtactggaaacaactttcagttcagctacacctttgaagacgttcccttccacagcagctacgctcacagccagagtctggatcggctgctgaatcctctgatcgaccagtacctatattatctgaacaagacacaatcaaatagtggaactcttcagcagtctcggctactgtttagccaagctggacccaccagcatgtctcttcaagctaaaaactggctgcctggaccttgctacagacagcagcgtctgtcaaagcaggcaaacgacaacaacaacagcaactttccctggactgcggctacaaagtatcatctaaatggccgggactcgttggttaatccaggaccagctatggccagccacaaagacgatgaagaaaagtttttccccatgcatggaaccctgatatttggtaaacaaggaacaaatgctaacgacgcggatttggacaatgtcatgattacagatgaagaagaaatccgcaccaccaatcccgtggctacggagcagtacggatatgtgtcaaataatttgcaaaactcaaatactggtccaactactggaactgtcaatcaccaaggagcgttacctggtatggtgtggcaggatcgagacgtgtacctgcagggacccatttgggccaagattcctcacacggacgggcactttcatccttctccactaatgggaggttttgggctcaaacacccgcctcctcagatcatgatcaaaaacactcccgttccagccaatcctcctacaaacttcagttcttccaagtttgcttctttcatcacacagtattccacggggcaggtcagcgtggagatcgagtgggagctgcagaaggagaacagcaaacgctggaatcccgaaattcagtatacttccaactacaacaaatctgttaatgtggactttactgtggacactaatggtgtgtattcagagcctcgccccattggcaccagatacccgactcgtaatctgtaa

SEQ ID NO: 205 - protein, 735 aa, Adeno-associated virus
MAADGYLPDWLEDTLSEGIRQWWKLKPGPPPPKPAERHKDDSRGLVLPGYKYLGPFNGLDKGEPVNEADAAALEHDKAYDRQLESGDNPYLKYNHADAEFQERLKEDTSFGGNLGRAVFQAKKRVLEPLGLVEEPVKTAPGKKRPVEHSPVEPDSSSGTGKAGQQPARKRLNFGQTGDADSVPDPQPLGQPPAAPSGLGSTTMASGSGAPVADNNEGADGVGNSSGNWHCDSQWLGDRVITTSTRTWALPTYNNHLYKQISSQSGASNDNHYFGYSTPWGYFDFNRFHCHFSPRDWQRLINNSWGFRPKRLNFKLFNIQVKEVTQNDGTTTIANNLTSTVQVFTDSEYQLPYVLGSAHQGCLPPFPADVFMVPQYGYLTLNNGSQAVGRSSFYCLEYFPSQMLRTGNNFQFSYTFEDVPFHSSYAHSQSLDRLLNPLIDQYLYYLNKTQSNSGTLQQSRLLFSQAGPTSMSLQAKNWLPGPCYRQQRLSKQANDNNNSNFPWTAATKYHLNGRDSLVNPGPAMASHKDDEEKFFPMHGTLIFGKQGTNANDADLDNVMITDEEEIRTTNPVATEQYGYVSNNLQNSNTGPTTGTVNHQGALPGMVWQDRDVYLQGPIWAKIPHTDGHFHPSPLMGGFGLKHPPPQIMIKNTPVPANPPTNFSSSKFASFITQYSTGQVSVEIEWELQKENSKRWNPEIQYTSNYNKSVNVDFTVDTNGVYSEPRPIGTRYPTRNL

SEQ ID NO: 206 - DNA, 2208 bp, Adeno-associated virus
  source 1..2208: mol_type = genomic DNA
atggctgccgatggttatcttccagattggctcgaggacactctctctgaaggaataagacagtggtggaagctcaaacctggcccaccaccaccaaagcccgcagagcggcataaggacgacagcaggggtcttgtgcttcctgggtacaagtacctcggacccttcaacggactcgacaagggagagccggtcaacgaggcagacgccgcggccctcgagcacgacaaggcctacgaccggcagctcgacagcggagacaacccgtacctcaagtacaaccacgccgacgcggagtttcaggagcgtcttaaagaagatacgtcttttgggggcaacctcggacgagcagtcttccaggccaaaaagaggattcttgaacctctgggcctggttgaggaacctgttaagacggctccgggagaaaagaggccggtagagcactctcctgcggagccagactcctcctcgggaaccggaaaagcgggccagcagcctgcaagaaagagattgaattttggccagactggagacgcagactcagtacctgacccccagcctctcggacagccaccagcagccccctctggtctgggaactaatacgatggcttcaggcagtggcgcaccaatggcagacaataacgagggcgccgacggagtgggtaattcctcgggaaattggtattgcgattccacatggatgggcgacagagtcatcaccaccagcacccgcacctgggccctgcccacctacaacaaccatctgtacaagcaaatctccagccagtctggagccagcaacgacaaccactactttggctacagcaccccctgggggtattttgacttcaacagattccactgccacttctccccacgtgactggcaaagactcatcaacaacaactggggattccggcccaagagactcagcttcaagctctttaacattcaagtcaaagaggtcacgcagaatgacggtacgacgacgattgccaataaccttaccagcacggttcaggtgtttactgactcggagtaccagctcccgtacgtcctcggctcggcgcatcaaggatgcctcccgccgttcccagcagacgtcttcatggtgccacagtatggatacctcaccctgaacaacggcagtcaggcggtaggacgctcttccttttactgcctggagtactttccttctcagatgcttcgtaccggaaacaactttaccttcagctacacctttgaagacgttcctttccatagcagctacgctcacagccaaagtctggaccgtctcatgaatcctctcatcgaccagtacctgtattacttgagcagaacaaacactccaagcggaaccaccacgatgtccaggcttcagttttctcaggccggagcaagtgacattcgggaccagtctagaaactggcttcctggaccctgttaccgccagcagcgagtatcaaagacagctgcggacaacaacaacagtgattactcgtggactggagctaccaagtaccacctcaatggaagagactctctggtgaatccgggcccagctatggccagccacaaggacgatgaagaaaaatattttcctcagagcggggttctcatctttggaaaacaagactcgggaaaaactaatgtggacattgaaaaggttatgattacagacgaagaggaaatcaggaccaccaatcccgtggctacggagcagtatggttctgtatctaccaacctccagagcggcaacacacaagcagctacctcagatgtcaacacacaaggcgttcttccaggcatggtctggcaggacagagacgtgtacctgcaggggcccatctgggcaaagattccacacacggacggacattttcacccctctcccctcgtgggcggattcggacttaaacaccctcctccacaaattctcatcaagaacaccccggtacctgcgaatccttcgaccactttcagtgcggcaaagtttgcttccttcatcacacagtactccacggggcaggtcagcgtggagatcgagtgggagctgcagaaggagaacagcaaacgctggaatcccgaaattcagtacacttccaactacaacaaatctgttaatgtggactttactgtggacactaatggtgtgtattcagagcctcgccccattggcaccagatacctgactcgtaatctgtaa

SEQ ID NO: 207 - protein, 735 aa, Adeno-associated virus
MAADGYLPDWLEDTLSEGIRQWWKLKPGPPPPKPAERHKDDSRGLVLPGYKYLGPFNGLDKGEPVNEADAAALEHDKAYDRQLDSGDNPYLKYNHADAEFQERLKEDTSFGGNLGRAVFQAKKRILEPLGLVEEPVKTAPGEKRPVEHSPAEPDSSSGTGKAGQQPARKRLNFGQTGDADSVPDPQPLGQPPAAPSGLGTNTMASGSGAPMADNNEGADGVGNSSGNWYCDSTWMGDRVITTSTRTWALPTYNNHLYKQISSQSGASNDNHYFGYSTPWGYFDFNRFHCHFSPRDWQRLINNNWGFRPKRLSFKLFNIQVKEVTQNDGTTTIANNLTSTVQVFTDSEYQLPYVLGSAHQGCLPPFPADVFMVPQYGYLTLNNGSQAVGRSSFYCLEYFPSQMLRTGNNFTFSYTFEDVPFHSSYAHSQSLDRLMNPLIDQYLYYLSRTNTPSGTTTMSRLQFSQAGASDIRDQSRNWLPGPCYRQQRVSKTAADNNNSDYSWTGATKYHLNGRDSLVNPGPAMASHKDDEEKYFPQSGVLIFGKQDSGKTNVDIEKVMITDEEEIRTTNPVATEQYGSVSTNLQSGNTQAATSDVNTQGVLPGMVWQDRDVYLQGPIWAKIPHTDGHFHPSPLVGGFGLKHPPPQILIKNTPVPANPSTTFSAAKFASFITQYSTGQVSVEIEWELQKENSKRWNPEIQYTSNYNKSVNVDFTVDTNGVYSEPRPIGTRYLTRNL

SEQ ID NO: 208 - DNA, 2209 bp, Adeno-associated virus
  source 1..2209: mol_type = genomic DNA
atggctgccgatggttatcctccagattggctcgaggacactctctctgaagggataagacagtggtggaagctcaaacctggcccaccaccaccaaagcccgcagagcggcataaggacgacagcaggggtcttgtgcttcctgggtacaagtacctcggacccttcaacggactcgacaagggggagccggtcaacgaggcagacgccgcggccctcgagcacgacaaggcctacgaccggcagctcgacagcggagacaacccgtacctcaagtacaaccacgccgacgcagagtttcaggagcgccttaaagaagatacgtcttttgggggcaacctcggacgagcagtcttccaggcgaaaaagagggttcttgaacctctgggcctggttgaggaacctgttaagacggctccgggaaaaaagaggccggtagagcactctcctgtggagccagactcctcctcgggaaccggaaaagcgggccagcggcctgcaagaaaaagattaaattttggtcagactggagacgcagactccgtacctgacccccagcctctcggacagccaccagcagccccctctggtctgggatctactacaatggctacaggcagtggcgcaccaatggcagacaataacgagggtgccgatggagtgggtaattcctcaggaaattggcattgcgattcccaatggctgggcgacagagtcatcaccaccagcacccgaacctgggccctgcccacatacaacaaccacctctacaagcaaatctccagccaatcaggagccagcaacgacaaccactactttggctacagcaccccctgggggtattttgacttcaacagattccactgccacttttcaccacgtgactggcaaagactcatcaacaacaactggggattccggcccaaaagactcaacttcaagctctttaatattcaagtcaaagaggtcacgcagaatgacggtacgacgacgattgccaataaccttaccagcacggttcaggtgtttactgactcggagtaccagctcccgtacgtcctgggctcggcgcatcaaggatgcctcccgccgtttccagcggacgtcttcatggtcccacagtatggatacctcaccctgaacaacgggagtcaggcggtaggacgctcttccttttactgcctggagtactttccttctcagatgctgcgtactggaaacaactttcagttcagctacacttttgaagacgtgcctttccacagcagctacgctcacagccagagtctggatcggctgatgaatcctctgatcgaccagtacctgtattatctgaacaagacacaaacaaatagtggaactcttcagcagtctcggctactgtttagccaagctggaccaaccaacatgtctcttcaagctaaaaactggctgcctggaccttgctacagacagcagcgtctgtcaaaacaggcaaacgacaacaacaacagcaactttccctggactgcagctacaaagtatcatctaaatggccgggactcgttggttaatccaggaccagctatggccagtcacaaggatgacgaagaaaagtttttccccatgcatggaaccctgatatttggtaaacaaggaacaaatgccaacgacgcggatttggaaaatgtcatgattacagatgaagaagaaatcagggccaccaatcccgtggctacggagcagtacgggactgtgtcaaataatttgcaaaactcaaacactggtccaactactggaactgtcaatcgccaaggagcgttacctggtatggtgtggcaggatcgagacgtgtacctgcagggacccatttgggccaagattcctcacaccgatggacactttcatccttctccactgatgggaggttttggactcaaacacccgcctcctcagatcatgatcaaaaacactcccgttccagccaatcctcccacaaacttcagttctgccaagtttgcttctttcatcacacagtattccacgggacaggtcagcgtggagatcgagtgggagctgcagaaggagaacagcaaacgctggaatcccgaaattcagtacacttccaactacaacaagtctgttaatgtggactttactgtggacactaatggtgtgtattcagagcctcgccccattggcaccagatacctgactcgtaatctgtaat

SEQ ID NO: 209 - protein, 735 aa, Adeno-associated virus
MAADGYPPDWLEDTLSEGIRQWWKLKPGPPPPKPAERHKDDSRGLVLPGYKYLGPFNGLDKGEPVNEADAAALEHDKAYDRQLDSGDNPYLKYNHADAEFQERLKEDTSFGGNLGRAVFQAKKRVLEPLGLVEEPVKTAPGKKRPVEHSPVEPDSSSGTGKAGQRPARKRLNFGQTGDADSVPDPQPLGQPPAAPSGLGSTTMATGSGAPMADNNEGADGVGNSSGNWHCDSQWLGDRVITTSTRTWALPTYNNHLYKQISSQSGASNDNHYFGYSTPWGYFDFNRFHCHFSPRDWQRLINNNWGFRPKRLNFKLFNIQVKEVTQNDGTTTIANNLTSTVQVFTDSEYQLPYVLGSAHQGCLPPFPADVFMVPQYGYLTLNNGSQAVGRSSFYCLEYFPSQMLRTGNNFQFSYTFEDVPFHSSYAHSQSLDRLMNPLIDQYLYYLNKTQTNSGTLQQSRLLFSQAGPTNMSLQAKNWLPGPCYRQQRLSKQANDNNNSNFPWTAATKYHLNGRDSLVNPGPAMASHKDDEEKFFPMHGTLIFGKQGTNANDADLENVMITDEEEIRATNPVATEQYGTVSNNLQNSNTGPTTGTVNRQGALPGMVWQDRDVYLQGPIWAKIPHTDGHFHPSPLMGGFGLKHPPPQIMIKNTPVPANPPTNFSSAKFASFITQYSTGQVSVEIEWELQKENSKRWNPEIQYTSNYNKSVNVDFTVDTNGVYSEPRPIGTRYLTRNL

SEQ ID NO: 210 - DNA, 2208 bp, Adeno-associated virus
  source 1..2208: mol_type = genomic DNA
atggctgccgatggttatcttccagattggctcgaggacactctctctgaaggaataagacagtggtggaagctcaaacctggcccaccaccaccaaagcccgcagagcggcataaggacgacagcaggggtcttgtgcttcctgggtacaggtacctcggacccttcaacggactcgacaagggagagccggtcaacgaggcagacgccgcggccctcgagcacgacaaggcctacgaccggcagctcgacagcggagacaacccgtacctcaagtacaaccacgtcgacgcggagtttcaggagcgtcttaaagaagatacgtcttttgggggcaacctcggacgagcagtcttccaggccaaaaagaggattcttgaacctctgggcctggttgaggaacctgttaaggcggctccgggagaaaagaggccggtagagcactctcctgcggagccagactcctcctcgggaaccggaaaagcgggccagcagcctgcaagaaagagattgaattttggtcagactggagacgcagactcagtacctgacccccagcctctcggacagccaccagcagccccctctggtctgggaactaatacgatggcttcaggcagtggcgcaccaatggcagacaataacgagggcgccgacggagtgggtaattcctcgggaaattggcattgcgattccacatggatgggcgacagagtcatcaccaccagcacccgcacctgggccctgcccacctacaacaaccatctgtacaagcaaatctccagccagtctggagccagcaacgacaaccactactttggctacagcaccccctgggggcattttgacttcaacagattccactgccacttctccccacgtgactggcaaagactcatcaacaacaactggggattccggcccaagagactcagcttcaagctctttaacattcaagtcaaagaggtcacgcagaatgacggtacgacgacgattgccaataaccttaccagcacggttcaggtgtttactgactcggagtaccagctcccgtacgtcctcggctcggcgcatcaaggatgcctcccgccgttcccagcagacgtcttcatggtgccacagtatggatacctcaccctgaacaacggcagtcaggcggtaggacgctcttccttttactgcctggagtactttccttctcagatgcttcgtaccggaaacaactttaccttcagctacacctttgaagacgttcctttccatagcagctacgctcacagccaaagtctggaccgtctcatgaatcctctcatcgaccagtacctgtattacttgagcagaacaaacactccaagcggaaccaccacgatgtccaggcttcagttttctcaggccggagcaagtgacattcgggaccagtctagaaactggcttcctggaccctgttaccgccagcagcgagtatcaaagacagctgcggacaacaacaacagtgattactcgtggactggagctaccaagtaccacctcaatggaagagactctctggtgaatccgggcccagctatggccagccacaaggacgatgaagaaaaatattttcctcagagcggggttctcatctttggaaaacaagactcgggaaaaactaatgtggacattgaaaaggttatgattacagacgaagaggaaatcaggaccaccaatcccgtggctacggagcagtatggttctgtatctaccaacctccagagcggcaacacacaagcagctacctcagatgtcaacacacaaggcgttcttccaggcatggtctggcaggacagagacgtgtacctgcaggggcccatctgggcaaagattccacacacggacggacattttcacccctctccccccatgggcggattcggacttaaacaccctcctccacaaattctcatcaagaacaccccggtacctgcgaatccttcgaccactttcagtgcggcaaagtttgcttccttcatcacacagtactccacggggcaggtcagcgtggagatcgagtgggagctgcagaaggagaacagcaaacgctggaatcccgaaattcagtacacttccaactacaacaaatctgttaatgtggactttactgtggacactaatggtgtgtattcagagcctcgccccattggcgccagatacctgactcgtaatctgtaa

SEQ ID NO: 211 - protein, 735 aa, Adeno-associated virus
MAADGYLPDWLEDTLSEGIRQWWKLKPGPPPPKPAERHKDDSRGLVLPGYRYLGPFNGLDKGEPVNEADAAALEHDKAYDRQLDSGDNPYLKYNHVDAEFQERLKEDTSFGGNLGRAVFQAKKRILEPLGLVEEPVKAAPGEKRPVEHSPAEPDSSSGTGKAGQQPARKRLNFGQTGDADSVPDPQPLGQPPAAPSGLGTNTMASGSGAPMADNNEGADGVGNSSGNWHCDSTWMGDRVITTSTRTWALPTYNNHLYKQISSQSGASNDNHYFGYSTPWGHFDFNRFHCHFSPRDWQRLINNNWGFRPKRLSFKLFNIQVKEVTQNDGTTTIANNLTSTVQVFTDSEYQLPYVLGSAHQGCLPPFPADVFMVPQYGYLTLNNGSQAVGRSSFYCLEYFPSQMLRTGNNFTFSYTFEDVPFHSSYAHSQSLDRLMNPLIDQYLYYLSRTNTPSGTTTMSRLQFSQAGASDIRDQSRNWLPGPCYRQQRVSKTAADNNNSDYSWTGATKYHLNGRDSLVNPGPAMASHKDDEEKYFPQSGVLIFGKQDSGKTNVDIEKVMITDEEEIRTTNPVATEQYGSVSTNLQSGNTQAATSDVNTQGVLPGMVWQDRDVYLQGPIWAKIPHTDGHFHPSPPMGGFGLKHPPPQILIKNTPVPANPSTTFSAAKFASFITQYSTGQVSVEIEWELQKENSKRWNPEIQYTSNYNKSVNVDFTVDTNGVYSEPRPIGARYLTRNL

SEQ ID NO: 212 - DNA, 2208 bp, Adeno-associated virus
  source 1..2208: mol_type = genomic DNA
atggctgccgatggttatcttccagattggctcgaggacaccctctctgaaggaataagacagtggtggaagctcaaacctggcccaccaccaccaaagcccgcagagcggcataaggacgacagcaggggtcttgtgcttcctgggtacaagtacctcggacccttcaacggactcgacaagggagagccggtcaacgaggcagacgccgcggccctcgagcacgacaaggcctacgaccggcagctcgacagcggagataacccgtacctcaagtacaaccacgccgacgcggagtttcaggagcgccttaaagaggatacgtcttttgggggcaacctcggacgagcagtcttccaggccaaaaagaggattcttgaacctctgggcctggttgaggaacctgttaagacggctccgggaaaaaagaggccggtagagcactctcctgcggagccagactcctcctcgggaaccggaaaagcgggccagcagcctgcaagaaagagattgaattttggtcagactggagacgcagactcagtacctgacccccggcctctcggacagccaccagcagccccctctggtctgggaactaatacgatggcttcaggcagtggcgcaccaatggcagacaataacgagggcgccgacggagtgggtaattcctcgggaaattggcattgcgattccacatggatgggcgacagagtcatcaccaccagcacccgcacctgggccctgcccacctacaacaaccatctgtacaagcaaatctccagccagtctggagccagcaacgacaaccactactttggctacagcaccccctgggggtattttgacttcaacagattccactgccacttctccccacgtgactggcaaagactcatcaacaacaactggggattccggcccaagagactcagcttcaagctctttaacattcaagtcaaagaggtcacgcagaatgacggtacgacgacgattgccaataaccttaccagcacggttcaggtgtttactgactcggagtaccagctcccgtacgtcctcggctcggcgcatcaaggatgcctcccgccgttcccagcagacgtcttcatggtgccacagtatggatacctcaccctgaacaacggcagtcaggcggtaggacgctcttccttttactgcctggagtactttccttctcagatgcttcgtaccggaaacaactttaccttcagctacacctttgaagacgttcctttccatagcagctacgctcacagccaaagtctggaccgtctcatgaatcctctcatcgaccagtacctgtattacttgagcagaacaaacactccaagcggaaccaccacgatgtccaggcttcagttttctcaggccggagcaagtgacattcgggaccagtctagaaactggcttcctggaccctgttaccgccagcagcgagtatcaaagacagctgcggacaacaacaacagtgattactcgtggactggagctaccaagtaccacctcaatggaagagactctctggtgaatccgggcccagctatggccagccacaaggacgatgaagaaaaatattttcctcagagcggggttctcatctttggaaaacaagactcgggaaaaactaatgtggacattgaaaaggttatgattacagacgaagaggaaatcaggaccaccaatcccgtggctacggagcagtatggttctgtatctaccaacctccagagcggcaacacacaagcagctacctcagatgtcaacacacaaggcgttcttccaggcatggtctggcaggacagagacgtgtacctgcaggggcccatctgggcaaagattccacacacggacggacattttcacccctctcccctcatgggcggattcggacttaaacaccctcctccacaaattctcatcaagaacaccccggtacctgcgaatccttcgaccactttcagtgcggcaaagtttgcttccttcatcacacagtactccacggggcaggtcagcgtggagatcgagtgggagctgcagaaggagaacagcaaacgctggaatcccgaaattcagtacacttccaactacaacaaatctgttaatgtggactttactgtggacactaatggtgtgtattcagagcctcgccccattggcaccagatacctgactcgtaatctgtaa

SEQ ID NO: 213 - protein, 735 aa, Adeno-associated virus
MAADGYLPDWLEDTLSEGIRQWWKLKPGPPPPKPAERHKDDSRGLVLPGYKYLGPFNGLDKGEPVNEADAAALEHDKAYDRQLDSGDNPYLKYNHADAEFQERLKEDTSFGGNLGRAVFQAKKRILEPLGLVEEPVKTAPGKKRPVEHSPAEPDSSSGTGKAGQQPARKRLNFGQTGDADSVPDPRPLGQPPAAPSGLGTNTMASGSGAPMADNNEGADGVGNSSGNWHCDSTWMGDRVITTSTRTWALPTYNNHLYKQISSQSGASNDNHYFGYSTPWGYFDFNRFHCHFSPRDWQRLINNNWGFRPKRLSFKLFNIQVKEVTQNDGTTTIANNLTSTVQVFTDSEYQLPYVLGSAHQGCLPPFPADVFMVPQYGYLTLNNGSQAVGRSSFYCLEYFPSQMLRTGNNFTFSYTFEDVPFHSSYAHSQSLDRLMNPLIDQYLYYLSRTNTPSGTTTMSRLQFSQAGASDIRDQSRNWLPGPCYRQQRVSKTAADNNNSDYSWTGATKYHLNGRDSLVNPGPAMASHKDDEEKYFPQSGVLIFGKQDSGKTNVDIEKVMITDEEEIRTTNPVATEQYGSVSTNLQSGNTQAATSDVNTQGVLPGMVWQDRDVYLQGPIWAKIPHTDGHFHPSPLMGGFGLKHPPPQILIKNTPVPANPSTTFSAAKFASFITQYSTGQVSVEIEWELQKENSKRWNPEIQYTSNYNKSVNVDFTVDTNGVYSEPRPIGTRYLTRNL

SEQ ID NO: 214 - DNA, 2208 bp, Adeno-associated virus
  source 1..2208: mol_type = genomic DNA
atggctgccgatggttatcttccagattggctcgaggacactctctctgaaggaataagacagtggtggaagctcaaacctggcccaccaccaccaaagcccgcagagcggcataaggacgacagcaggggtcttgtgcttcctgggtacaagtacctcggacccttcaacggactcgacaagggagagccggtcaacgaggcagacgccgcggccctcgagcacgacaaggcctacgaccggcagctcgacagcggagacaacccgtacctcaagtacaaccacgccgacgcggagtttcaggagcgccttaaaggagatacgtcttttgggggcaacctcggacgagcagtcttccaggccaaaaagaggattcttgaacctctgggcctggttgaggaacctgttaagacggctccgggaaaaaagaggccggtagagcactctcctgcggagccagactcctcctcgggaaccggaaaagcgggccagcagcctgcaagaaagagattgaattttggtcagactggagacgcagactcagtacctgacccccagcctctcggacagccaccagcagccccctctggtctgggaactaatacgatggcttcaggcagtggcgcaccaatggcagacaataacgagggcgccgacggagtgggtaattcctcgggaaattggcattgcgattccacatggatgggcggcagagtcatcaccaccagcacccgcacctgggccctgcccacctacaacaaccatctgtacaagcaaatctccagccagtctggagccagcaacgacaaccactactttggctacagcaccccctgggggtattttgacttcaacagattccactgccacttctccccacgtgactggcaaagactcatcaacaacaactggggattccggcccaagagactcagcttcaagctctttaacattcaagtcaaagaggtcacgcagaatgacggtacgacgacgattgccaataaccttaccagcacggttcaggtgtttactgactcggagtaccagctcccgtacgtcctcggctcggcgcatcaaggatgcctcccgccgttcccagcagacgtcttcatggtgccacagtatggatacctcaccctgaacaacggcagtcaggcggtaggacgctcttccttttactgcctggagtactttccttctcagacgcttcgtaccggaaacaactttaccttcagctacacctttgaagacgttcctttccatagcagctacgctcacagccaaagtctggaccgtctcatgaatcctctcatcgaccagtacctgtattacttgagcagaacaaacactccaagcggaaccaccacgatgtccaggcttcagttttctcaggccggagcaagtgacattcgggaccagtctagaaactggcttcctggaccctgttaccgccagcagcgagtatcaaagacagctgcggacaacaacaacagtgattactcgtggactggagctaccaagtaccacctcaatggaagagactctctggtgaatccgggcccagctatggccagccacaaggacgatgaagaaaaatattttcctcagagcggggttctcatctttggaaaacaagactcgggaaaaactaatgtggacattgaaaaggttatgattacagacgaagaggaaatcaggaccaccaatcccgtggctacggagcagtatggttctgtatctaccaacctccagagcggcaacacacaagcagctacctcagatgtcaacacacaaggcgttcttccaggcatggtctggcaggacagagacgtgtacctgcaggggcccatctgggcaaagattccacacacggacggacattttcacccctctcccctcatgggcggattcggacttaaacaccctcctccacaaattctcatcaagaacaccccggtacctgcgaatccttcgaccactttcagtgcggcaaagtttgcttccttcatcacacagtactccacggggcaggtcagcgtggagatcgagtgggagctgcagaaggagaacagcaaacgctggaatcccgaaattcagtacacttccaactacaacaaatctgttaatgtggactttactgtggacactaatggtgtgtattcagagcctcgccccattggcaccagatacctgactcgtaatctgtaa

SEQ ID NO: 215 - protein, 735 aa, Adeno-associated virus
MAADGYLPDWLEDTLSEGIRQWWKLKPGPPPPKPAERHKDDSRGLVLPGYKYLGPFNGLDKGEPVNEADAAALEHDKAYDRQLDSGDNPYLKYNHADAEFQERLKGDTSFGGNLGRAVFQAKKRILEPLGLVEEPVKTAPGKKRPVEHSPAEPDSSSGTGKAGQQPARKRLNFGQTGDADSVPDPQPLGQPPAAPSGLGTNTMASGSGAPMADNNEGADGVGNSSGNWHCDSTWMGGRVITTSTRTWALPTYNNHLYKQISSQSGASNDNHYFGYSTPWGYFDFNRFHCHFSPRDWQRLINNNWGFRPKRLSFKLFNIQVKEVTQNDGTTTIANNLTSTVQVFTDSEYQLPYVLGSAHQGCLPPFPADVFMVPQYGYLTLNNGSQAVGRSSFYCLEYFPSQTLRTGNNFTFSYTFEDVPFHSSYAHSQSLDRLMNPLIDQYLYYLSRTNTPSGTTTMSRLQFSQAGASDIRDQSRNWLPGPCYRQQRVSKTAADNNNSDYSWTGATKYHLNGRDSLVNPGPAMASHKDDEEKYFPQSGVLIFGKQDSGKTNVDIEKVMITDEEEIRTTNPVATEQYGSVSTNLQSGNTQAATSDVNTQGVLPGMVWQDRDVYLQGPIWAKIPHTDGHFHPSPLMGGFGLKHPPPQILIKNTPVPANPSTTFSAAKFASFITQYSTGQVSVEIEWELQKENSKRWNPEIQYTSNYNKSVNVDFTVDTNGVYSEPRPIGTRYLTRNL

SEQ ID NO: 216 - DNA, 2208 bp, Adeno-associated virus
  source 1..2208: mol_type = genomic DNA
atggctgccgatggttatcttccagattggctcgaggacactctctctgaaggaataagacagtggtggaagctcaaacctggcccaccaccaccaaagcccgcagagcggcataaggacgacagcaggggtcttgtgcttcctgggtacaagtacctcggacccttcaacggactcgacaagggagagccggtcaacgaggcagacgccgcggccctcgagcacgacaaggcctacgaccggcagctcgacagcggagacaacccgtacctcaagtacaaccacgccgacgcggagtttcaggagcgtcttaaagaagatacgtcttttgggggcaacctcggacgagcagtcttccaggccaaaaagaggattcttgaacctctgggcctggttgaggaacctgttaagacggctccgggaaaaaagaggccggtagagcactctcctgcggagccagactcctcctcgggaaccggaaaagcgggccagcagcctgcaagaaagagattgaattttggtcagactggagacgcagactcagtacctgacccccagcctctcggacagccaccagcagccccctctggtctgggaactaatacgatggcttcaggcagtggcgcaccaatggcagacaataacgagggcgccgacggagtgggtaattcctcgggaaattggcattgcgattccacatggatgggcgacagagtcatcaccaccagcacccgcacctgggccctgcccacctgcaacaaccatctgtacaagcaaatctccagccagtctggagccagcaacgacaaccactactttggctacagcaccccctgggggtattttgacttcaacagattccactgccacttctccccacgtgactggcaaagactcatcaacaacaactggggattccggcccaagagactcagcttcaagctctttaacattcaagtcaaagaggtcacgcagaatgacggtacgacgacgattgccaataaccttaccagcacggttcaggtgtttactgactcggagtaccagctcccgtacgtcctcggctcggcgcatcaaggatgcctcccgccgttcccagcagacgtcttcatggtgccacagtatggatacctcaccctgaacaacggcagtcaggcggtaggacgctcttccttttactgcctggagtattttccttctcagatgcttcgtaccggaaacaactttaccttcagctacacctttgaagacgttcctttccatagcagctacgctcacagccaaagtctggaccgtctcatgaatcctctcatcgaccagtacctgtattacttgagcagaacaaacactccaagcggaaccaccacgatgtccaggcttcagttttctcaggccggagcaagtgacattcgggaccagtctagaaactggcttcctggaccctgttaccgccagcagcgagtatcaaagacagctgcggacaacaacaacagtgattactcgtggactggagctaccaagtaccacctcaatggaagagactctctggtgaatccgggcccagctatggccagccacaaggacgatgaagaaaaatattttcctcagagcggggttctcatctttggaaaacaagactcgggaaaaactaatgtggacattgaaaaggttatgattacagacgaagaggaaatcaggaccaccaatcccgtggctacggagcagtatggttctgtatctacctacctccagagcggcaacacacaagcagctacctcagatgtcaacacacaaggcgttcttccaggcatggtctggcaggacagagacgtgtacctgcgggggcccatctgggcaaagattccacacacggacggacattttcacccctctcccctcatgggcggatttggacttaaacaccctcctccacaaattctcatcaagaacaccccggtacctgcgaatccttcgaccactttcagtgcggcaaagtttgcttccttcatcacacagtactccacggggcaggtcagcgtggagatcgagtgggagctgcagaaggagaacagcaaacgctggaatcccgaaattcagtacacttccaactacaacaaatctgttaatgtggactttactgtggacactaatggtgtgtattcagagcctcgccccattggcaccagatacctgactcgtaatctgtaa

SEQ ID NO: 217 - protein, 735 aa, Adeno-associated virus
MAADGYLPDWLEDTLSEGIRQWWKLKPGPPPPKPAERHKDDSRGLVLPGYKYLGPFNGLDKGEPVNEADAAALEHDKAYDRQLDSGDNPYLKYNHADAEFQERLKEDTSFGGNLGRAVFQAKKRILEPLGLVEEPVKTAPGKKRPVEHSPAEPDSSSGTGKAGQQPARKRLNFGQTGDADSVPDPQPLGQPPAAPSGLGTNTMASGSGAPMADNNEGADGVGNSSGNWHCDSTWMGDRVITTSTRTWALPTCNNHLYKQISSQSGASNDNHYFGYSTPWGYFDFNRFHCHFSPRDWQRLINNNWGFRPKRLSFKLFNIQVKEVTQNDGTTTIANNLTSTVQVFTDSEYQLPYVLGSAHQGCLPPFPADVFMVPQYGYLTLNNGSQAVGRSSFYCLEYFPSQMLRTGNNFTFSYTFEDVPFHSSYAHSQSLDRLMNPLIDQYLYYLSRTNTPSGTTTMSRLQFSQAGASDIRDQSRNWLPGPCYRQQRVSKTAADNNNSDYSWTGATKYHLNGRDSLVNPGPAMASHKDDEEKYFPQSGVLIFGKQDSGKTNVDIEKVMITDEEEIRTTNPVATEQYGSVSTYLQSGNTQAATSDVNTQGVLPGMVWQDRDVYLRGPIWAKIPHTDGHFHPSPLMGGFGLKHPPPQILIKNTPVPANPSTTFSAAKFASFITQYSTGQVSVEIEWELQKENSKRWNPEIQYTSNYNKSVNVDFTVDTNGVYSEPRPIGTRYLTRNL

SEQ ID NO: 218 - DNA, 2208 bp, Adeno-associated virus; identical to SEQ ID NO: 212
  source 1..2208: mol_type = genomic DNA

SEQ ID NO: 219 - protein, 735 aa, Adeno-associated virus; identical to SEQ ID NO: 213

SEQ ID NO: 220 - DNA, 2208 bp, Adeno-associated virus
  source 1..2208: mol_type = genomic DNA
atggctgccgatggttatcttccagattggctcgaggacactctctctgaaggaataagacagtggtggaagctcaaacctggcccaccaccaccaaagcccgcagagcggcataaggacggcagcaggggtcttgtgcttcctgggtacaagtacctcggacccttcaacggactcgacaagggagagccggtcaacgaggcagacgccgcggccctcgagcacgacaaggcctacgaccggcagctcaacagcggagacaacccgtacctcaagtacaaccacgccgacgcggagtttcaggagcgccttaaagaagatacgtcttttgggggcaacctcggacgagcagtcttccaggcaaaaaagagggttcttgaacctctgggcctggttgaggagcctgttaaaacggctccgggaaaaaagagaccggtagagcactctcctgcggagccagactcctcctcgggaaccggaaaagcgggccagcagcctgcaagaaagagattgaattttggtcagactggagacgcagactccgtacctgacccccagcctctcggacagccaccagcagccccctctggtctgggatctactacaatggctacaggcagtggcgcaccaatggcagacaataacgagggtgccgatggagtgggtaattcctcaggaaattggcattgcgattcccaatggctgggcgacagagtcatcaccacaagcactcgaacctgggccctgcccacctacaacaaccacctctacaagcaaatctccagccaatcaggagcctcaaacgacaaccactattttggctacagcaccccttgggggtattttgacttcaacagattccactgccacttttcaccacgtgactggcaaagactcatcaacaacaactggggattccgacccaagagactcaacttcaagctctttaacattcaagtcaaagaggtcacgcagaatgacggtacgacgacgattgccaataaccttaccagcacggttcaggtgtttactgactcggagtaccagctcccgtacgtcctcggctcggcgcatcaaggatgcctcccgccgttcccagcggacgtcttcatggtcccacagtatggatacctcaccctgaacaacgggagtcaggcggtaggacgctctcccttttactgcctggagtactttccttctcagatgctgcgtactggaaacaactttcagttcagctacacttttgaagacgtgcctttccacagcagctacgctcacagccagagtctggatcggctgatgaatcctctgatcgaccagtacctgtattatctgaacaagacacaaacaaatagtggaactcttcagcagtctcggctactgtttagccaagctggacccaccaacatgtctcttcaagctaaaaactggctgcctggaccttgctacagacagcagcgtctgtcaaagcaggcaaacgacaacaacaacagcaactttccctggactgcagctacaaagtatcatctaaatggccgggactcgttggttaatccaggaccagctatggccagtcacaaggatgacgaagaaaagtttttccccatgcatggaaccctgatatttggtaaacaaggaacaaatgccaacgacgcggatttggaaaatgtcatgattacagatgaagaagaaatcaggaccaccaatcccgtggctacggagcagtacgggactgtgtcaaataatttgcaaaactcaaacactggtccaactactggaactgtcaatcaccaaggagcgttacctggtatggtgtggcaggatcgagatgtgtaccttcagggacccatttgggccaagattcctcacaccgatggacactttcatccttctccactgatgggaggttttggactcaaacacccgcctcctcagattatgatcaaaaacactcccgttccagccaatcctcctacaaacttcagttctgccaagtttgcttctttcatcacacagtattccacggggcaggtcagcgtggagatcgagtgggagctgcagaaggagaacagcaaacgctggaatcccgaaattcagtacacttccaactacaacaaatctgttaatgtggactttactgtggacaataatggcgtgtactcagagcctcgccccattggcaccagatacctgactcgtaatctgtaa

SEQ ID NO: 221 - protein, 735 aa, Adeno-associated virus
MAADGYLPDWLEDTLSEGIRQWWKLKPGPPPPKPAERHKDGSRGLVLPGYKYLGPFNGLDKGEPVNEADAAALEHDKAYDRQLNSGDNPYLKYNHADAEFQERLKEDTSFGGNLGRAVFQAKKRVLEPLGLVEEPVKTAPGKKRPVEHSPAEPDSSSGTGKAGQQPARKRLNFGQTGDADSVPDPQPLGQPPAAPSGLGSTTMATGSGAPMADNNEGADGVGNSSGNWHCDSQWLGDRVITTSTRTWALPTYNNHLYKQISSQSGASNDNHYFGYSTPWGYFDFNRFHCHFSPRDWQRLINNNWGFRPKRLNFKLFNIQVKEVTQNDGTTTIANNLTSTVQVFTDSEYQLPYVLGSAHQGCLPPFPADVFMVPQYGYLTLNNGSQAVGRSPFYCLEYFPSQMLRTGNNFQFSYTFEDVPFHSSYAHSQSLDRLMNPLIDQYLYYLNKTQTNSGTLQQSRLLFSQAGPTNMSLQAKNWLPGPCYRQQRLSKQANDNNNSNFPWTAATKYHLNGRDSLVNPGPAMASHKDDEEKFFPMHGTLIFGKQGTNANDADLENVMITDEEEIRTTNPVATEQYGTVSNNLQNSNTGPTTGTVNHQGALPGMVWQDRDVYLQGPIWAKIPHTDGHFHPSPLMGGFGLKHPPPQIMIKNTPVPANPPTNFSSAKFASFITQYSTGQVSVEIEWELQKENSKRWNPEIQYTSNYNKSVNVDFTVDNNGVYSEPRPIGTRYLTRNL

SEQ ID NO: 222 - DNA, 2208 bp, Adeno-associated virus
  source 1..2208: mol_type = genomic DNA
atggctgccgatggttatcttccagattggctcgaggacactctctctgaaggaataagacagtggtggaagctcaaacctggcccaccaccaccaaagcccgcagagcggcataaggacgacagcaggggtcttgtgcttcctgggtacaagtacctcggacccttcaacggactcgacaagggagagccggtcaacgaggcagacgccgcggccctcgagcacgacaaggcctacgaccggcagctcgacagcggagacaacccgtacctcaagtacaaccacgccgacgcggagtttcaggagcgtcttaaagaagatacgtcttttgggggcaacctcggacgagcagtcttccaggccaaaaagaggattcttgaacctctgggcctggttgaggaacctgttaagacggctccgggaaaaaagaggccggtagagcactctcctgcggagccagactcctcctcgggaaccggaaaagcgggccagcagcctgcaagaaagagattgaattttggtcagactggagacgcagactcagtacctgacccccagcctctcggacagccaccagcagccccctctggtctgggaactaatacgatggcttcaggcagtggcgcaccaatggcagacaataacgagggcgccgacggagtgggtaattcctcgggaaattggcattgcgattccacatggatgggcgacagagtcatcaccaccagcacccgcacctgggccctgcccacctacaacaaccatctgtacaagcaaatctccagccagtctggagccagcaacgacaaccactactttggctacagcaccccctgggggtattttgacttcaacagattccactgccacttctccccacgtgactggcaaagactcatcaacaacaactggggattccggcccaagagactcagcttcaagctctttaacattcaagtcaaagaggtcacgcagaatgacggtacgacgacgattgccaataaccttaccagcacggttcaggtgtttactgactcggagtaccagctcccgtacgtcctcggctcggcgcatcaaggatgcctcccgccgttcccagcagacgtcttcatggtgccacagtatggatacctcaccctgaacaacggcagtcaggcggtaggacgctcttccttttactgcctggagtactttccttctcagatgcttcgtaccggaaacaactttaccttcagctacacctttgaagacgttcctttccatagcagctacgctcacagccaaagtctggaccgtctcatgaatcctctcatcgaccagtacctgtattacttgagcagaacaaacactccaagcggaaccaccacgatgtccaggcttcagttttctcaggccggagcaagtgacattcgggaccagtctagaaactggcttcctggaccctgttaccgccagcagcgagtatcaaagacagctgcggacaacaacaacagtgattactcgtggactggagctaccaagtaccacctcaatggaagagactctctggtgaatccgggcccagctatggccagccacaaggacgatgaagaaaaatattttcctcagagcggggttctcatctttggaaaacaagactcgggaaaaactaatgtggacattgaaaaggttatgattacagacgaagaggaaatcaggaccaccaatcccgtggctacggagcagtatggttctgtatctaccaacctccagagcggcaacacacaagcagctacctcagatgtcaacacacaaggcgttcttccaggcatggtctggcaggacagagacgtgtacctgcaggggcccatctgggcaaagattccacacacggacggacattttcacccctctcccctcatgggcggattcggacttaaacaccctcctccacaaattctcatcaagaacaccccggtacctgcgaatccttcgaccactttcagtgcggcaaagtttgcttccttcatcacacagtactccacggggcaggtcagcgtggagatcgagtgggagctgcagaaggagaacagcaaacgctggaatcccgaaattcagtacacttccaactacaacaaatctgttaatgtggactttactgtggacactaatggtgtgtattcagagcctcgccccattggcaccagatacctgactcgtaatctgtaa

SEQ ID NO: 223 - protein, 735 aa, Adeno-associated virus
MAADGYLPDWLEDTLSEGIRQWWKLKPGPPPPKPAERHKDDSRGLVLPGYKYLGPFNGLDKGEPVNEADAAALEHDKAYDRQLDSGDNPYLKYNHADAEFQERLKEDTSFGGNLGRAVFQAKKRILEPLGLVEEPVKTAPGKKRPVEHSPAEPDSSSGTGKAGQQPARKRLNFGQTGDADSVPDPQPLGQPPAAPSGLGTNTMASGSGAPMADNNEGADGVGNSSGNWHCDSTWMGDRVITTSTRTWALPTYNNHLYKQISSQSGASNDNHYFGYSTPWGYFDFNRFHCHFSPRDWQRLINNNWGFRPKRLSFKLFNIQVKEVTQNDGTTTIANNLTSTVQVFTDSEYQLPYVLGSAHQGCLPPFPADVFMVPQYGYLTLNNGSQAVGRSSFYCLEYFPSQMLRTGNNFTFSYTFEDVPFHSSYAHSQSLDRLMNPLIDQYLYYLSRTNTPSGTTTMSRLQFSQAGASDIRDQSRNWLPGPCYRQQRVSKTAADNNNSDYSWTGATKYHLNGRDSLVNPGPAMASHKDDEEKYFPQSGVLIFGKQDSGKTNVDIEKVMITDEEEIRTTNPVATEQYGSVSTNLQSGNTQAATSDVNTQGVLPGMVWQDRDVYLQGPIWAKIPHTDGHFHPSPLMGGFGLKHPPPQILIKNTPVPANPSTTFSAAKFASFITQYSTGQVSVEIEWELQKENSKRWNPEIQYTSNYNKSVNVDFTVDTNGVYSEPRPIGTRYLTRNL

SEQ ID NO: 224 - DNA, 2208 bp, Adeno-associated virus
  source 1..2208: mol_type = genomic DNA
atggctgccgatggttatcttccagattggctcgaggacactctctctgaaggaataagacagtggtggaagctcaaacctggcccaccaccaccaaagcccgcagagcggcataaggacgacagcaggggtcttgtgcttcctgggtacaagtacctcggacccttcaacggactcgacaagggagagccggtcaacgaggcagacgccgcggccctcgagcacgacaaggcctacgaccggcagctcgacagcggagacaacccgtacctcaagtacaaccacgccgacgcggagtttcaggagcgtcttaaagaagatacgtcttttgggggcaacctcggacgagcagtcttccaggccaaaaagaggattcttgaacctctgggcctggttgaggaacctgttaagacggctccgggaaaaaagaggccggtagagcactctcctgcggagccagactcctcctcgggaaccggaaaagcgggccagcagcctgcaagaaagagattgaattttggtcagactggagacgcagactcagtacctgacccccagcctctcggacagccaccagcagccccctctggtctgggaactaatacgatggcttcaggcagtggcgcaccaatggcagacaataacgagggcgccgacggagtgggtaattcctcgggaaattggcattgcgattccacatggatgggcgacagagtcatcaccaccagcacccgcacctgggccctgcccacctacaacaaccatctgtacaagcaaatctccagccagtctggagccagcaacgacaaccactactttggctacagcaccccctgggggtatttcgacttcaacagattccactgccacttctccccacgtgactggcaaagactcatcaacaacaactggggattccggcccaagagactcagcttcaagctctttaacattcaagtcaaagaggtcacgcagaatgacggtacgacgacgattgccaataaccttaccagcacggttcaggtgtttactgactcggggtaccagctcccgtacgtcctcggctcggcgcatcaaggatgccttccgccgttcccagcagacgtcttcatggtgccacagtatggatacctcaccctgaacaacggcagtcaggcggtaggacgctcttccttttactgcctggagtactttccttctcagatgcttcgtaccggaaacaactttaccttcagctacacctttgaagacgttcctttccatagcagctacgctcacggccaaagtctggaccgtctcatgaatcctctcatcgaccagtacctgtattacttgagcagaacaaacactccaagcggaaccaccacgatgtccaggcttcagttttctcaggccggagcaagtgacgttcgggaccagtctagaaactggcttcctggaccctgttaccgccagcagcgagtatcaaagacagctgcggacaacaacaacagtgattactcgtggactggagctaccaagtaccacctcaatggaagagactctctggtgaatccgggcccagctatggccagccacaaggacgatgaagaaaaatattttcctcagagcggggttctcgtctttggaaaacaagactcgggaaaaactaatgtggacattgaaaaggttatgattacagacgaagaggaaatcaggaccaccaatcccgcggctacggagcagtatggttctgtatctaccaacctccagagcggcaacacacaagcagctacctcagatgtcaacacacaaggcgttcttccaggcatggtctggcaggacagagacgtgtacctgcaggggcccatctgggcaaagattccacacacggacggacattttcacccctctcccctcatgggcggattcggacttaaacaccctcctccacaaattctcatcaagaacaccccggtacctgcgaatccttcgaccactttcagtgcggcaaagtttgtttccttcatcacacagtactccacggggcaggtcagcgtggagatcgagtgggagctgcagaaggagaacagcaaacgctggaatcccgaaattcagtacacttccaactacaacaaatctgttaatgtggactttactgtggacactaatggtgtgtattcagagcctcgccccattggcaccagatacctgactcgtaatctgtaa

SEQ ID NO: 225 - protein, 735 aa, Adeno-associated virus
MAADGYLPDWLEDTLSEGIRQWWKLKPGPPPPKPAERHKDDSRGLVLPGYKYLGPFNGLDKGEPVNEADAAALEHDKAYDRQLDSGDNPYLKYNHADAEFQERLKEDTSFGGNLGRAVFQAKKRILEPLGLVEEPVKTAPGKKRPVEHSPAEPDSSSGTGKAGQQPARKRLNFGQTGDADSVPDPQPLGQPPAAPSGLGTNTMASGSGAPMADNNEGADGVGNSSGNWHCDSTWMGDRVITTSTRTWALPTYNNHLYKQISSQSGASNDNHYFGYSTPWGYFDFNRFHCHFSPRDWQRLINNNWGFRPKRLSFKLFNIQVKEVTQNDGTTTIANNLTSTVQVFTDSGYQLPYVLGSAHQGCLPPFPADVFMVPQYGYLTLNNGSQAVGRSSFYCLEYFPSQMLRTGNNFTFSYTFEDVPFHSSYAHGQSLDRLMNPLIDQYLYYLSRTNTPSGTTTMSRLQFSQAGASDVRDQSRNWLPGPCYRQQRVSKTAADNNNSDYSWTGATKYHLNGRDSLVNPGPAMASHKDDEEKYFPQSGVLVFGKQDSGKTNVDIEKVMITDEEEIRTTNPAATEQYGSVSTNLQSGNTQAATSDVNTQGVLPGMVWQDRDVYLQGPIWAKIPHTDGHFHPSPLMGGFGLKHPPPQILIKNTPVPANPSTTFSAAKFVSFITQYSTGQVSVEIEWELQKENSKRWNPEIQYTSNYNKSVNVDFTVDTNGVYSEPRPIGTRYLTRNL

SEQ ID NO: 226 - DNA, 2208 bp, Adeno-associated virus
  source 1..2208: mol_type = genomic DNA
atggctgccgatggttatcttccagattggctcgaggacactctctctgaaggaataagacagtggtggaaactcaaacctggcccaccaccaccaaagcccgcagagcggcataaggacgacagcaggggtcttgtgcttcctgggtacaagtacctcggacccttcaacggactcgacaagggagagccggtcaacgaggcagacgccgcggccctcgagcacgacaaggcctacgaccggcagctcgacagcggagacaacccgtacctcaagtacaaccacgccgacgcggagtttcaggagcgccttaaagaagatacgtcttttgggggcaacctcggacgagcagtcttccaggcaaaaaagagggttctggaacctctgagcctggttgaggagcctgttaagacggctccgggaaaaaagaggccggtagagcactctcccgcagagccagattcctcctccggaactggaaagtcgggcaaccagcctgcaagaaagagattgaatttcggtcagactggagactcagactccgtacctgacccccagcctctcggacagccaccagcagccccctctggtctgggaactaatacgatggctacaggcagtggcgcaccaatggcagacaataacgagggcgccgacggagtgggtaattcctcgggaaattggcattgcgattccacatggatgggcgacagagtcatcaccaccagcacccgaacctgggccctgcccacctacaacaaccatctgtacaagcaaatatccagccagtctggagccagcaacgacaatcactactttggctacagcaccccctgggggtattttgacttcaacagattccactgccacttttcaccacgtgactggcaaagactcatcaacaacaactggggattccgacccaagagactcaacttcaagctctttaacattcaagtcaaagaggtcacgcagaatgacggtacgacgacgattgccaataaccttaccagcacggttcaggtgtttactgactcggagtaccagctcccgtacgtcctcggctcggcgcatcaaggatgcctcccgccgttcccagcagacgtcttcatggtgccacagtatggatacctcaccctgaacaacgggagtcaggcagtaggacgctcttcattttactgcctagagtactttccttctcagatgctgcgtaccggaaacaactttaccttcagctacacctttgaggacgttcctttccacagcagctacgctcacagccagagtttggaccgtctcatgaatcctctcatcgaccagtacctgtattacttgagcagaacaaacactccaagcggaaccaccacgcagtccaggcttcagttttctcaggccggagcgagtgacattcaggaccagtctaggaactggcttcctggaccctgttaccgtcagcagcgagtatcaaagacatctgcggataacaacaacagtgaatactcgtggactggagctaccaagtaccacctcaatggcagagactctctggtgaatccgggcccggccatggccagccacaaagacgatgaagaaaagttttttcctcagagcggggttcttatctttgggaagcaaggctcagagaaaacaaatgtggatattgaaaaggtcatgattacagacgaagaggaaatcaggaccaccaatcccgtggctacggagcagtatggttctgtatctaccaacctccagagcggcaacacacaagcagctaccgcagatgtcaacacacaaggcgttcttccaggcatggtcgggcaagacagagacgtgtacctgcaggggcctacttgggcaaagattccacacacggacggacattttcacccctctcccctcatgggcggatttggacttaaacaccctcctccacagattctcatcaagaacaccccggtacctgcgaatccttcgaccaccttcagtgcggcaaagtttgcttccttcattacacagtactccacggggcaggtcagcgtggagatcgagtgggagctgcagaaggagaacagcaaacgctggaatcccgagatccagtacacttccaactacaacaagtctgttaatgtggactttactgtggacactaatggcgtgtattcagagcctcgccccattggcaccagatacctgactcgtaatctgtaa

SEQ ID NO: 227 - protein, 735 aa, Adeno-associated virus
MAADGYLPDWLEDTLSEGIRQWWKLKPGPPPPKPAERHKDDSRGLVLPGYKYLGPFNGLDKGEPVNEADAAALEHDKAYDRQLDSGDNPYLKYNHADAEFQERLKEDTSFGGNLGRAVFQAKKRVLEPLSLVEEPVKTAPGKKRPVEHSPAEPDSSSGTGKSGNQPARKRLNFGQTGDSDSVPDPQPLGQPPAAPSGLGTNTMATGSGAPMADNNEGADGVGNSSGNWHCDSTWMGDRVITTSTRTWALPTYNNHLYKQISSQSGASNDNHYFGYSTPWGYFDFNRFHCHFSPRDWQRLINNNWGFRPKRLNFKLFNIQVKEVTQNDGTTTIANNLTSTVQVFTDSEYQLPYVLGSAHQGCLPPFPADVFMVPQYGYLTLNNGSQAVGRSSFYCLEYFPSQMLRTGNNFTFSYTFEDVPFHSSYAHSQSLDRLMNPLIDQYLYYLSRTNTPSGTTTQSRLQFSQAGASDIQDQSRNWLPGPCYRQQRVSKTSADNNNSEYSWTGATKYHLNGRDSLVNPGPAMASHKDDEEKFFPQSGVLIFGKQGSEKTNVDIEKVMITDEEEIRTTNPVATEQYGSVSTNLQSGNTQAATADVNTQGVLPGMVGQDRDVYLQGPTWAKIPHTDGHFHPSPLMGGFGLKHPPPQILIKNTPVPANPSTTFSAAKFASFITQYSTGQVSVEIEWELQKENSKRWNPEIQYTSNYNKSVNVDFTVDTNGVYSEPRPIGTRYLTRNL

SEQ ID NO: 228 - DNA, 2208 bp, Adeno-associated virus
  source 1..2208: mol_type = genomic DNA
atggctgccgatggttatcttccagattggctcgaggacactctctctgaaggaataagacagtggtggaagctcaaacctggcccaccaccaccaaagcccgcagagcggcataaggacgacagcaggggtcttgtgcttcctgggtacaagtacctcggacccttcaacggactcgacaagggagagccggtcaacgaggcagacgccgcggccctcgagcacgacaaggcctacgaccggcagctcgacagcggagacaacccgtacctcaagtacaaccacgccgacgcagagtttcaggagcgccttaaagaagatacgtcttttgggggcaacctcggacgagcagtcttccaggcaaaaaagagggttctggaacctctgggcctggttgaggagcctgttaagacggctccgggaaaaaagaggccggtagagcactctcctgcagagccagattcctcctccggaactggaaagtcgggcaaccagcctgcaagaaagagattgaatttcggtcagactggagactcagactccgtacctgacccccagcctctcggacagccaccagcagccccctctggtctgggaactaatacgatggctacaggcagtggcgcaccaatggcagacaataacgagggcgccgacggagtgggtaattcctcgggaaattggcattgcgattccacatggatgggcgacagagtcatcaccaccagcacccgaacctgggccctgcccacctacaacaaccatctgtacaagcaaatatccagccagtctggagccagcaacgacaatcactactttggctacagcaccccctgggggtattttgacttcaacagattccactgccacttttcaccacgtgactggcaaagactcatcaacaacaactggggattccgacccaagagactcaacttcaagctctttaacattcaagtcaaagaggtcacgcagaatgacggtacgacgacgattgccaataaccttaccagcacggttcaggtgtttactgactcggagtaccagctcccgtacgtcctcggctcggcgcatcaaggatgcctcccgccgttcccagcagacgtcttcatggtgccacagtatggatacctcaccctgaacaacgggagtcaggcagtaggacgctcttcattttactgcctagggtactttccttctcagatgctgcgtaccggaaacaactttaccttcagctacacctttgaggacgttcctttccacagcagctacgctcacagccagagtttggaccgtctcatgaatcctctcatcgaccagtacctgtattacttgagcagaacaaacactccaagcggaaccaccacgcagtccaggcttcagttttctcaggccggagcgagtgacattcgggaccagtctaggaactggcttcctggaccctgttaccgtcagcagcgagtatcaaagacatctgcggataacaacaacagtgaatactcgtggactggagctaccaagtaccacctcaatggcagagactctctggtgaatccgggcccggccatggccagccacaaagacgatgaagaaaagttttttcctcagagcggggttcttatctttgggaagcaaggcccagagaaaacaaatgtggatattgaaaaggtcatgattacagacgaagaggaaatcaggaccaccaatcccgtggctacggagcagtatggttctgtatctaccaacctccagagcggcaacacacaagcagctaccgcagatgtcaacacacaaggcgttcttccaggcatggtctggcaagacagagacgtgtacctgcaggggcctatttgggcaaagattccacacacggacggacattttcacccctctcccctcatgggcggatttggacttaaacaccctcctccacagattctcatcaagaacaccccggtacctgcgaatccttcgaccaccttcagtgcggcaaagtttgcttccttcattacacagtactccacggggcaggtcagcgtggagatcgagtgggagctgcagaaggagaacagcaaacgctggaatcccgagatccagtacacttccaactacaacaagtctgttaatgtggactttactgtggacactaatggcgtgtattcagagcctcgccccattggcaccagatacctgactcgtaatctgtaa

SEQ ID NO: 229 - protein, 735 aa, Adeno-associated virus
MAADGYLPDWLEDTLSEGIRQWWKLKPGPPPPKPAERHKDDSRGLVLPGYKYLGPFNGLDKGEPVNEADAAALEHDKAYDRQLDSGDNPYLKYNHADAEFQERLKEDTSFGGNLGRAVFQAKKRVLEPLGLVEEPVKTAPGKKRPVEHSPAEPDSSSGTGKSGNQPARKRLNFGQTGDSDSVPDPQPLGQPPAAPSGLGTNTMATGSGAPMADNNEGADGVGNSSGNWHCDSTWMGDRVITTSTRTWALPTYNNHLYKQISSQSGASNDNHYFGYSTPWGYFDFNRFHCHFSPRDWQRLINNNWGFRPKRLNFKLFNIQVKEVTQNDGTTTIANNLTSTVQVFTDSEYQLPYVLGSAHQGCLPPFPADVFMVPQYGYLTLNNGSQAVGRSSFYCLGYFPSQMLRTGNNFTFSYTFEDVPFHSSYAHSQSLDRLMNPLIDQYLYYLSRTNTPSGTTTQSRLQFSQAGASDIRDQSRNWLPGPCYRQQRVSKTSADNNNSEYSWTGATKYHLNGRDSLVNPGPAMASHKDDEEKFFPQSGVLIFGKQGPEKTNVDIEKVMITDEEEIRTTNPVATEQYGSVSTNLQSGNTQAATADVNTQGVLPGMVWQDRDVYLQGPIWAKIPHTDGHFHPSPLMGGFGLKHPPPQILIKNTPVPANPSTTFSAAKFASFITQYSTGQVSVEIEWELQKENSKRWNPEIQYTSNYNKSVNVDFTVDTNGVYSEPRPIGTRYLTRNL

SEQ ID NO: 230 - protein, 735 aa, Adeno-associated virus
MAADGYLPDWLEDTLSEGIRQWWKLKPGPPPPKPAERHKDDSRGLVLPGYKYLGPFNGLDKGEPVNEADAAALEHDKAYDRQLDSGDNPYLKYNHADAEFQERLKEDTSFGGNLGRAVFQAKKRVLEPLGLVEEPVKTAPGKKRPVEHSPAEPDSSSGTGKSGNQPARKRLNFGQTGDSDSVPDPQPLGQPPAAPSGLGTNTMATGSGAPMADNNEGADGVGNSSGNWHCDSTWMGDRVITTSTRTWALPTYNNHLYKQISSQSGASNDNHYFGYSTPWGYFDFNRFHCHFSPRDWQRLINNNWGFRPKRLNFKLFNIQVKEVTQNDGTTTIANNLTSTVQVFTDSEYQLPYVLGSAHQGCLPPFPADVFMVPQYGYLTLNNGSQAVGRSSFYCLEYFPSQMLRTGNNFTFSYTFEDVPFHSSYAHSQSLDRLMNPLIDQYLYYLSRTNTPSGTTTQSRLQFSQAGASDIRDQSRNWLPGPCYRQQRVSKTSADNNNSEYSWTGATKYHLNGRDSLVNPGPAMASHKDDEEKFFPQSGVLIFGKQGPEKTNVDIEKVMITDEEEIRTTNPVATEQYGSVSTNLQSGNTQAATADVNTQGVLPGMVWQDRDVYLQGPIWAKIPHTDGHFHPSPLMGGFGLKHPPPQILIKNTPVPANPSTTFSAAKFASFITQYSTGQVSVEIEWELQKENSKRWNPEIQYTSNYNKSVNVDFTVDTNGVYSEPRPIGTRYLTRNL

SEQ ID NO: 231 - protein, 735 aa, Adeno-associated virus; identical to SEQ ID NO: 230

SEQ ID NO: 232 - DNA, 2211 bp, Adeno-associated virus
  source 1..2211: mol_type = genomic DNA
atggctgccgatggttatcttccagattggctcgaggacactctctctgaaggaataagacagtggtggaagctcaaacctggcccaccaccaccaaagcccgcagagcggcataaggacgacagcaggggtcttgtgcttcctgggtacaagtacctcggacccttcaacggactcgacaagggggagccggtcaacgaggcagacgccgcggccctcgagcacgacaaggcctacgaccggcagctcgacagcggagacaacccgtacctcaagtacaaccacgccgacgcagagtttcaggagcgccttaaagaagatacgtcttttgggggcaacctcggacgagcagtcttccaggcgaaaaagagggttcttgaacctctgcggcctggtttgaggaaacctgttaagacggctccgggaaaaaagaggccggtagagcactctcctgtggagccagactcctcctcgggaaccggaaaagcgggccagcagcctgcaagaaaaagattaaattttggtcagactggagacgcagactccgtacctgacccccagcctctcggacagccaccagcagccccctctggtctgggatctactacaatggctacaggcagtggcgcaccaatggcagacaataacgagggtgccgatggagtgggtaattcctcaggaaattggcattgcgattcccaatggctggacgacagagtcatcgccaccagcacccgaacctgggccctgcccacatacaacaaccacctctacaagcaaatctccagccaatcaggagcctgcaacgacaaccactactttggctacagcaccccctgggggtattttgacttcaacagattccactgccacttttcaccacgtgactggcaaagactcatcaacagcaactggggattccggcccaaaagactcaacttcaagctctttaatattcaagtcaaagaggtcacgcagaatgacggtacgacgacgattgccaataaccttaccagcacggttcaggtgtttactgactcggagtaccagctcccgtacgtcccgggctcggcgcatcaaggatgcctcccgccgtttccagcggacgtcttcatggtcccacagtatggatacctcaccctgaacaacgggagtcaggcggtaggacgctcttccttttactgcctggagtactttccttctcagatgctgcgtactggaaacaactttcagttcagctacacttttgaagacgtgcctttccacagcagctacgctcactgccagagtctggatcggctgatgaatcctctgatcgaccagtacctgtattatctgaacaagacacaaacaaatagtggaactcttcagcagtctcggctactgtttagccaagctggaccaaccaacatgtctcttcaagctaaaaactggctgcctggaccttgctacagacagcagcgtctgtcaaaacaggcaaacgacaataacaactgcaactttccctggactgcagctacaaagtatcatctaaatggccgggactcgttggttaatccaggaccagctatggccagtcacaaggatgacgaagaaaagtttttccccatgcatggaaccctgatatttggtaaacaaggaacaaatgccaacgacgcggatttggaaaatgtcatgattacagatgaagaagaaatcaggcccaccaatcccgtggctacggagcagtacgggactgtgtcaaataatttgcaaaactcaaacactggtccaactacaggaactgtcaatcaccaaggagcgttacctggtatggtgtggcaggatcgagacgtgtacctgcagggacccatttgggccaagattcctcacaccgatggacactttcatccttctccactgatgggaggttttggactcaaacacccgcctcctcagatcatgatcaaaagcactcccgttccagccaatcctcccacaaacttcagttctgccaagtttgcttcttccatcacacagtattccacgggacaggtcagcgtggagatcgagtgggagctgcagaaggagaacagcaaacgctggaatcccgaaattcagtacacttccaactacaacaagtctgttaatgtggactttactgtggacactaatggtgtgtattcagagcctcgccccattggcaccagatacctgactcgtaatctgtaa

SEQ ID NO: 233 - protein, 736 aa, Adeno-associated virus
MAADGYLPDWLEDTLSEGIRQWWKLKPGPPPPKPAERHKDDSRGLVLPGYKYLGPFNGLDKGEPVNEADAAALEHDKAYDRQLDSGDNPYLKYNHADAEFQERLKEDTSFGGNLGRAVFQAKKRVLEPLRPGLRKPVKTAPGKKRPVEHSPVEPDSSSGTGKAGQQPARKRLNFGQTGDADSVPDPQPLGQPPAAPSGLGSTTMATGSGAPMADNNEGADGVGNSSGNWHCDSQWLDDRVIATSTRTWALPTYNNHLYKQISSQSGACNDNHYFGYSTPWGYFDFNRFHCHFSPRDWQRLINSNWGFRPKRLNFKLFNIQVKEVTQNDGTTTIANNLTSTVQVFTDSEYQLPYVPGSAHQGCLPPFPADVFMVPQYGYLTLNNGSQAVGRSSFYCLEYFPSQMLRTGNNFQFSYTFEDVPFHSSYAHCQSLDRLMNPLIDQYLYYLNKTQTNSGTLQQSRLLFSQAGPTNMSLQAKNWLPGPCYRQQRLSKQANDNNNCNFPWTAATKYHLNGRDSLVNPGPAMASHKDDEEKFFPMHGTLIFGKQGTNANDADLENVMITDEEEIRPTNPVATEQYGTVSNNLQNSNTGPTTGTVNHQGALPGMVWQDRDVYLQGPIWAKIPHTDGHFHPSPLMGGFGLKHPPPQIMIKSTPVPANPPTNFSSAKFASSITQYSTGQVSVEIEWELQKENSKRWNPEIQYTSNYNKSVNVDFTVDTNGVYSEPRPIGTRYLTRNL

SEQ ID NO: 234 - DNA, 2208 bp, Adeno-associated virus
  source 1..2208: mol_type = genomic DNA
atggctgccgatggttatcttccagattggctcgaggacactctctctgaaggaataagacagtggtggaagctcaaacctggcccaccaccaccaaagcccgcagagcggcataaggacgacagcaggggtcttgtgcttcctgggtacaagtacctcggacccttcaacggactcgacaagggagagccggtcaacgaggcagacgccgcggccctcgagcacgacaaggcctacgaccggcagctcgacagcggagacaacccgtacctcaagtacaaccacgccgacgcggagtttcaggagcgccttaaagaggatacgtcttttgggggcaacctcggacgagcagtcttccaggcaaaaaagagggttctggaacctctgggcctggttgaggagcctgttaagacggctccgggaaaaaagaggccggtagagcactctcctgcagagccagattcctcctccggaactggaaagtcgggcaaccagcctgcaagaaagagattgaatttcggtcagactggagactcagactccgtacctgacccccagcctctcggacagccaccagcagccccctctggtctgggaactaatacgatggctacaggcagtggcgcaccaatggcagacaataacgagggcgccgacggagtgggtaattcctcgggaaattggcattgcgattccacatggatgggcgacagagtcatcaccaccagcacccgaacctgggccctgcccacctacaacaaccatctgtacaagcaaatatccagccagtctggagccagcaacgacaatcactactttggctacagcaccccctgggggtattttgacttcaacagattccactgccacttttcaccacgtgactggcaaagactcatcaacaacaactggggattccgacccaagagactcaacttcaagctctttaacattcaagtcaaagaggtcacgcagaatgacggtacgacgacgattgccaataaccttaccagcacggttcaggtgtttactgactcggagtaccagctcccgtacgtcctcggctcggcgcatcaaggatgcctcccgccgttcccagcagacgtcttcatggtgccacagtatggatacctcaccctgaacaacgggagtcaggcagtaggacgctcttcattttactgcctagagtactttccttctcagatgctgcgtaccggaaacagctttaccttcagctacacctttgaggacgttcctttccacagcagctacgctcacagccagagtttggaccgtctcatgaatcctctcatcgaccagtacctgtattacttgagcagaacaaacactccaagcggaaccaccacgcagtccaggcttcagttttctcaggccggagcgagtgacattcgggaccagtctaggaactggcttcctggaccctgttaccgtcagcagcgagtatcaaagacatctgcggataacaacaacagtgaatactcgtggactggagctaccaagtaccacctcaatggcagagactctctggtgaatccgggcccggccatggccagccacaaagacgatgaagaaaagttctttcctcagagcggggttcttatctttgggaagcaaggctcagagaaaacaaatgtggatattgaaaaggtcatgattacagacgaagaggaaatcaggaccaccaatcccgtggctacggagcagtatggttctgtatctaccaacctccagagcggcaacacacaagcagctaccgcagatgtcaacacacaaggcgttcttccaggcatggtctggcaagacagagacgtgtacctgcaggggcctatttgggcaaagattccacacacggacggacattttcacccctctcccctcatgggcggatttggacttaaacaccctcctccacagattctcatcaagaacaccccggtacctgcgaatccttcgaccaccttcagtgcggcaaagtttgcttccttcattacacagtactccacggggcaggtcagcgtggagatcgagtgggagctgcagaaggagaacagcaaacgctggaatcccgagatccagtacacttccaactacaacaagtctgttaatgtggactttactgtggacactaatggcgtgtattcagagcctcgccccattggcaccagatacctgactcgtaatctgtaa

SEQ ID NO: 235 - protein, 735 aa, Adeno-associated virus
MAADGYLPDWLEDTLSEGIRQWWKLKPGPPPPKPAERHKDDSRGLVLPGYKYLGPFNGLDKGEPVNEADAAALEHDKAYDRQLDSGDNPYLKYNHADAEFQERLKEDTSFGGNLGRAVFQAKKRVLEPLGLVEEPVKTAPGKKRPVEHSPAEPDSSSGTGKSGNQPARKRLNFGQTGDSDSVPDPQPLGQPPAAPSGLGTNTMATGSGAPMADNNEGADGVGNSSGNWHCDSTWMGDRVITTSTRTWALPTYNNHLYKQISSQSGASNDNHYFGYSTPWGYFDFNRFHCHFSPRDWQRLINNNWGFRPKRLNFKLFNIQVKEVTQNDGTTTIANNLTSTVQVFTDSEYQLPYVLGSAHQGCLPPFPADVFMVPQYGYLTLNNGSQAVGRSSFYCLEYFPSQMLRTGNSFTFSYTFEDVPFHSSYAHSQSLDRLMNPLIDQYLYYLSRTNTPSGTTTQSRLQFSQAGASDIRDQSRNWLPGPCYRQQRVSKTSADNNNSEYSWTGATKYHLNGRDSLVNPGPAMASHKDDEEKFFPQSGVLIFGKQGSEKTNVDIEKVMITDEEEIRTTNPVATEQYGSVSTNLQSGNTQAATADVNTQGVLPGMVWQDRDVYLQGPIWAKIPHTDGHFHPSPLMGGFGLKHPPPQILIKNTPVPANPSTTFSAAKFASFITQYSTGQVSVEIEWELQKENSKRWNPEIQYTSNYNKSVNVDFTVDTNGVYSEPRPIGTRYLTRNL

SEQ ID NO: 236 - DNA, 2211 bp, Adeno-associated virus; identical to SEQ ID NO: 126
  source 1..2211: mol_type = genomic DNA

SEQ ID NO: 237 - protein, 736 aa, Adeno-associated virus
MAADGYLPDWLEDTLSEGIRQWWKLKPGPPPPKPAERHKDDSRGLVLPGYKYLGPGNGLDKGEPVNAADAAALEHDKAYDQQLKAGDNPYLKYNHADAEFQERLKEDTSFGGNLGRAVFQAKKRLLEPLGLVEEAAKTAPGKKRPVEQSPQEPDSSAGIGKSGSQPAKKKLNFGQTGDTESVPDPQPIGEPPAAPSGVGSLTMASGGGAPVADNNEGADGVGSSSGNWHCDSQWLGDRVITTSTRTWALPTYNNHLYKQISNSTSGGSSNDNAYFGYSTPWGYFDFNRFHCHFSPRDWQRLINNNWGFRPKRLNFKLFNIQVKEVTDNNGVKTIANNLTSTVQVFTDSDYQLPYVLGSAHEGCLPPFPADVFMIPQYGYLTLNDGGQAVGRSSFYCLEYFPSQMLRTGNNFQFSYEFENVPFHSSYAHSQSLDRLMNPLIDQYLYYLSKTINGSGQNQQTLKFSVAGPSNMAVQGRNYIPGPSYRQQRVSTTVTQNNNSEFAWPGASSWALNGRNSLMNPGPAMASHKEGEDRFFPLSGSLIFGKQGTGRDNVDADKVMITNEEEIKTTNPVATESYGQVATNHQSAQAQAQTGWVQNQGILPGMVWQDRDVYLQGPIWAKIPHTDGNFHPSPLMGGFGMKHPPPQILIKNTPVPADPPTAFNKDKLNSFITQYSTGQVSVEIEWELQKENSKRWNPEIQYTSNYYKSNNVEFAVSTEGVYSEPRPIGTRYLTRNL

SEQ ID NO: 238 - DNA, 2211 bp, Adeno-associated virus
  source 1..2211: mol_type = genomic DNA
atggctgccgatggttatcttccagattggctcgaggacactctctctgaaggaataagacagtggtggaagctcaaacctggcccaccaccaccaaagcccgcagagcggcataaggacgacagcaggggtcttgtgcttcctgggtacaagtacctcggacccggcaacggactcgacaagggggagccggtcaacgcagcagacgcggcggccctcgagcacgacaaggcctacgaccagcagctcaaggccggagacaacccgtacctcaagtacaaccacgccgacgccgagttccaggagcggctcaaagaagatacgtcttttgggggcaacctcgggcgagcagtcttccaggccaaaaagaggcttcttgaacctcttggtctggttgaggaagcggctaagacggctcctggaaagaagaggcctgtagagcagtctcctcaggaaccggactcctccgcgggtattggcaaatcgggttcacagcccgctaaaaagaaactcaatttcggtcagactggcgacacagagtcagtccccgaccctcaaccaatcggagaacctcccgcagccccctcaggtgtgggatctcttacaatggcttcaggtggtggcgcaccagtggcagacaataacgaaggtgccgatggagtgggtagttcctcgggaaattggcattgcgattcccaatggctgggggacagagtcatcaccaccagcacccgaacctgggccctgcccacctacaacaatcacctctacaagcaaatctccaacagcacatctggaggatcttcaaatgacaacgcctacttcggctacagcaccccctgggggtattttgacttcaacagattccactgccacttctcaccacgtgactggcagcgactcatcaacaacaactggggattccggcctaagcgactcaacttcaagctcttcaacattcaggtcaaagaggttacggacaacaatggagtcaagaccatcgccaataaccttaccagcacggtccaggtcttcacggactcagactatcagctcccgtacgtgctcgggtcggctcacgagggctgcctcccgccgttcccagcggacgttttcatgattcctcagtacgggtatctgacgcttaatgatgggagccaggccgtgggtcgttcgtccttttactgcctggaatatttcccgtcgcaaatgctaagaacgggtaacaacttccagttcagctacgagtttgagaacgtacctttccatagcagctacgctcacagccaaagcctggaccgactaatgaatccactcatcgaccaatacttgtactatctctcaaagactattaacggttctggacagaatcaacaaacgctaaaattcagcgtggccggacccagcaacatggctgtccagggaagaaactacatacctggacccagctaccgacaacaacgtgtctcaaccactgtgactcaaaacaacaacagcgaatttgcttggcctggagcttcttcttgggctctcaatggacgtaatagcttgatgaatcctggacctgctatggccagccacaaagaaggagaggaccgtttctttcctttgtctggatctttaatttttggcaaacaaggaactggaagagacaacgtggatgcggacaaagtcatgataaccaacgaagaagaaattaaaactactaacccggtagcaacggagtcctatggacaagtggccacaaaccaccagagtgcccaagcacaggcgcagaccggctgggttcaaaaccaaggaatacttccgggtatggtttggcaggacagagatgtgtacctgcaaggacccatttgggccaaaattcctcacacggacggcaactttcacccttctccgctaatgggagggtttggaatgaagcacccgcctcctcagatcctcatcaaaaacacacctgtacctgcggatcctccaacggctttcaataaggacaagctgaactctttcatcacccagtattctactggccaagtcagcgtggagattgagtgggagctgcagaaggaaaacagcaagcgctggaacccggagatccagtacacttccaactattacaagtctaataatgttgaatttgctgttaatactgaaggtgtatatagtgaaccccgccccattggcaccagatacctgactcgtaatctgtaa

SEQ ID NO: 239 - protein, 736 aa, Adeno-associated virus
MAADGYLPDWLEDTLSEGIRQWWKLKPGPPPPKPAERHKDDSRGLVLPGYKYLGPGNGLDKGEPVNAADAAALEHDKAYDQQLKAGDNPYLKYNHADAEFQERLKEDTSFGGNLGRAVFQAKKRLLEPLGLVEEAAKTAPGKKRPVEQSPQEPDSSAGIGKSGSQPAKKKLNFGQTGDTESVPDPQPIGEPPAAPSGVGSLTMASGGGAPVADNNEGADGVGSSSGNWHCDSQWLGDRVITTSTRTWALPTYNNHLYKQISNSTSGGSSNDNAYFGYSTPWGYFDFNRFHCHFSPRDWQRLINNNWGFRPKRLNFKLFNIQVKEVTDNNGVKTIANNLTSTVQVFTDSDYQLPYVLGSAHEGCLPPFPADVFMIPQYGYLTLNDGSQAVGRSSFYCLEYFPSQMLRTGNNFQFSYEFENVPFHSSYAHSQSLDRLMNPLIDQYLYYLSKTINGSGQNQQTLKFSVAGPSNMAVQGRNYIPGPSYRQQRVSTTVTQNNNSEFAWPGASSWALNGRNSLMNPGPAMASHKEGEDRFFPLSGSLIFGKQGTGRDNVDADKVMITNEEEIKTTNPVATESYGQVATNHQSAQAQAQTGWVQNQGILPGMVWQDRDVYLQGPIWAKIPHTDGNFHPSPLMGGFGMKHPPPQILIKNTPVPADPPTAFNKDKLNSFITQYSTGQVSVEIEWELQKENSKRWNPEIQYTSNYYKSNNVEFAVNTEGVYSEPRPIGTRYLTRNL

SEQ ID NO: 240 - DNA, 2208 bp, Adeno-associated virus
  source 1..2208: mol_type = genomic DNA
atggctgccgatggttatcttccagattggctcgaggacactctctctgaaggaataagacagcggtggaagctcaaacctggcccaccaccaccagagcccgcagagcggcataaggacgacagcaggggtcttgtgcttcctgggtacaagtacctcggacccttcaacggactcgacaagggagagccggtcaacgaggcagacgccgcggccctcgagcacgacaaagcctacgaccggcagctcgacagcggagacaacccgtacctcaagtacaaccacgccgacgcggagtttcaggagcgccttaaagaagatacgtcttttgggggcaacctcggacgagcagtcttccaggcgaaaaagagggtacttgaacctctgggcctggttgaggaacctgttaagacggctccgggaaaaaagaggccggtagagcactctcctgtggagccagactcctcctcgggaaccggaaaggcgggccagcagcctgcaagaaaaagattgaattttggtcagactggagacgcagactcagtacctgacccccagcctctcggacagccaccagcagccccctctggtctgggaactaatacgatggctacaggcagtggcgcaccaatggcagacaataacgagggcgccgacggagtgggtaattcctcgggaaattggcattgcgattccacatggatgggcgacagagtcatcaccaccagcacccgaacctgggccctgcccacctacaacaaccacctctacaaacaaatttccagccaatcaggagcctcgaacgacaatcactactttggctacagcaccccttgggggtattttgacttcaacagattccactgccacttttcaccacgtgactggcaaagactcatcaacaacaactggggattccgacccaagagactcaacttcaagctctttaacattcaagtcaaagaggtcacgcagaatgacggtacgacgacgattgccaataaccttaccggcacggttcaggtgtttactgactcggagtaccagctcccgtacgtcctcggctcggcgcatcaaggatgcctcccgccgttcccagcagacgtcttcatggtgccacagtatggatacctcaccctgaacaacgggagtcaggcagtaggacgctcttcattttactgcctggagtactttccttctcagatgctgcgtaccggaaacaactttaccttcagctacacttttgaggacgttcctttccacagcagctacgctcacagccagagtctgggccgtctcatgaatcctctcatcgaccagtacctgtattacttgagcagaacaaacactccaagtggaaccaccacgcagtcaaggcttcagttttctcaggccggagcgagtgacattcgggaccagtctaggaactggcttcctggaccctgttaccgccagcagcgagtatcaaagacatctgcggataacaacaacagtgaatactcgtggactggagctaccaagtaccacctcaatggcagagactctctggtgaatccgggcccggccatggcaagccacaaggacgatgaagaaaagttttttcctcagagcggggttctcatctttgggaagcaaggctcagagaaaacaaatgtggacattgaaaaggtcatgattacagacgaagaggaaatcaggacaaccaatcccgtggctacggagcagtatggttctgtatctaccaacctccagagaggcaacagacaagcagctaccgcagatgtcaacacacaaggcgttcttccaggcatggtctggcaggacagagatgtgtaccttcaggggcccatctgggcaaagattccacacacggacggacattttcacccctctcccctcatgggtggattcggacttaaacaccctcctccacagattctcatcaagaacaccccggtacctgcgaatccttcgaccaccttcagtgcggcaaagtttgcttccttcatcacacagtactccacgggacaggtcagcgtggagatcgagtgggagctgcagaaggaaaacagcaaacgctggaatcccgaaattcagtacacttccaactacaacaagtctgttaatgtggactttactgtggacactaatggcgtgtattcagagcctcgccccattggcaccagatacctgactcgtaatctgtaa

SEQ ID NO: 241 - protein, 735 aa, Adeno-associated virus
MAADGYLPDWLEDTLSEGIRQRWKLKPGPPPPEPAERHKDDSRGLVLPGYKYLGPFNGLDKGEPVNEADAAALEHDKAYDRQLDSGDNPYLKYNHADAEFQERLKEDTSFGGNLGRAVFQAKKRVLEPLGLVEEPVKTAPGKKRPVEHSPVEPDSSSGTGKAGQQPARKRLNFGQTGDADSVPDPQPLGQPPAAPSGLGTNTMATGSGAPMADNNEGADGVGNSSGNWHCDSTWMGDRVITTSTRTWALPTYNNHLYKQISSQSGASNDNHYFGYSTPWGYFDFNRFHCHFSPRDWQRLINNNWGFRPKRLNFKLFNIQVKEVTQNDGTTTIANNLTGTVQVFTDSEYQLPYVLGSAHQGCLPPFPADVFMVPQYGYLTLNNGSQAVGRSSFYCLEYFPSQMLRTGNNFTFSYTFEDVPFHSSYAHSQSLGRLMNPLIDQYLYYLSRTNTPSGTTTQSRLQFSQAGASDIRDQSRNWLPGPCYRQQRVSKTSADNNNSEYSWTGATKYHLNGRDSLVNPGPAMASHKDDEEKFFPQSGVLIFGKQGSEKTNVDIEKVMITDEEEIRTTNPVATEQYGSVSTNLQRGNRQAATADVNTQGVLPGMVWQDRDVYLQGPIWAKIPHTDGHFHPSPLMGGFGLKHPPPQILIKNTPVPANPSTTFSAAKFASFITQYSTGQVSVEIEWELQKENSKRWNPEIQYTSNYNKSVNVDFTVDTNGVYSEPRPIGTRYLTRNL

SEQ ID NO: 242 - DNA, 2208 bp, Adeno-associated virus
  source 1..2208: mol_type = genomic DNA
atggctgccgatggttatcttccagattggctcgaggacactctctctgaaggaataagacagcggtggaagctcaaacctggcccaccaccaccagagcccgcagagcggcataaggacgacagcaggggtcttgtgcttcctgggtacaagtacctcggacccttcaacggactcgacaagggagagccggtcaacgaggcagacgccgcggccctcgagcacgacaaagcctacgaccggcagctcgacagcggagacaacccgtacctcaagtacaaccacgccgacgcggagtttcaggagcgccttaaagaagatacgtcctttgggggcaacctcggacgagcagtcttccaggcgaaaaagagggtacttgaacctctgggcctggttgaggaacctgttaagacggctccgggaaaaaagaggccggtagagcactctcctgtggagccagactcctcctcgggaaccggaaaggcgggccagcagcctgcaagaaaaagattgaattttggtcagactggagacgcagactcagtacctgacccccagcctctcggacagccaccagcagccccctctggtctgggaactaatacgatggctacaggcagtggcgcaccaatggcagacaataacgagggcgccgacggagtgggtaattcctcgggaaattggcattgcgattccacatggatgggcgacagagtcatcaccaccagcacccgaacctgggccctgcccacctacaacaaccacctctacaaacaaatttccagccaatcaggagcctcgaacgacaatcactactttggctacagcaccccttgggggtattttgacttcaacagattccactgccacttttcaccacgtgactggcaaagactcatcaacaacaactggggattccgacccaagagactcaacttcaagctctttaacattcaagtcaaagaggtcacgcagaatgacggtacgacgacgattgccaataaccttaccagcacggttcaggtgtttactgactcggagtaccagctcccgtacgtcctcggctcggcgcatcaaggatgcctcccgccgttcccagcagacgtcttcatggtgccacagtatggatacctcaccctgaacaacgagagtcaggcagtaggacgctcttcattttactgcctggagtactttccttctcagatgctgcgtaccggaaacaactttaccttcagctacacttttgaggacgttcctttccacagcagctacgctcacagccagagtctgggccgtctcatgaatcctctcatcgaccagtacctgtattacttgagcagaacaaacactccaagtggaaccaccacgcagtcaaggcttcagttttctcaggccggagcgagtgacattcgggaccagtctaggaactggcttcctggaccctgttaccgccagcagcgagtatcaaagacatctgcggataacaacaacagtgaatactcgtggactggagctaccaagtaccacctcaatggcagagactctctggtgaatccgggcccggccatggcaagccacaaggacgatgaagaaaagttttttcctcagagcggggttctcatctttgggaagcaaggctcagagaaaacaaatgtggacattgaaaaggtcatgattacagacgaagaggaaatcaggacaaccaatcccgtggctacggagcagtatggttctgtatctaccaacctccagagaggcaacagacaagcagctaccgcagatgtcaacacacaaggcgttcttccaggcatggtctggcaggacagagatgtgtaccttcaggggcccatctgggcaaagattccacacacggacggacattttcacccctctcccctcatgggtggattcggacttaaacaccctcctccacagattctcatcaagaacaccccggtacctgcgaatccttcgaccaccttcagtgcggcaaagtttgcttccttcatcacacagtactccacgggacaggtcagcgtggagatcgagtgggagctgcagaaggaaaacagcaaacgctggaatcccgaaattcagtacacttccaactacaacaagtctgttaatgtggactttactgtggacactaatggcgtgtattcagagcctcgccccattggcaccagatacctgactcgtaatctgtaa

SEQ ID NO: 243 - protein, 735 aa, Adeno-associated virus
MAADGYLPDWLEDTLSEGIRQRWKLKPGPPPPEPAERHKDDSRGLVLPGYKYLGPFNGLDKGEPVNEADAAALEHDKAYDRQLDSGDNPYLKYNHADAEFQERLKEDTSFGGNLGRAVFQAKKRVLEPLGLVEEPVKTAPGKKRPVEHSPVEPDSSSGTGKAGQQPARKRLNFGQTGDADSVPDPQPLGQPPAAPSGLGTNTMATGSGAPMADNNEGADGVGNSSGNWHCDSTWMGDRVITTSTRTWALPTYNNHLYKQISSQSGASNDNHYFGYSTPWGYFDFNRFHCHFSPRDWQRLINNNWGFRPKRLNFKLFNIQVKEVTQNDGTTTIANNLTSTVQVFTDSEYQLPYVLGSAHQGCLPPFPADVFMVPQYGYLTLNNESQAVGRSSFYCLEYFPSQMLRTGNNFTFSYTFEDVPFHSSYAHSQSLGRLMNPLIDQYLYYLSRTNTPSGTTTQSRLQFSQAGASDIRDQSRNWLPGPCYRQQRVSKTSADNNNSEYSWTGATKYHLNGRDSLVNPGPAMASHKDDEEKFFPQSGVLIFGKQGSEKTNVDIEKVMITDEEEIRTTNPVATEQYGSVSTNLQRGNRQAATADVNTQGVLPGMVWQDRDVYLQGPIWAKIPHTDGHFHPSPLMGGFGLKHPPPQILIKNTPVPANPSTTFSAAKFASFITQYSTGQVSVEIEWELQKENSKRWNPEIQYTSNYNKSVNVDFTVDTNGVYSEPRPIGTRYLTRNL

SEQ ID NO: 244 - DNA, 2208 bp, Adeno-associated virus
  source 1..2208: mol_type = genomic DNA
atggctgccgatggttatcttccagattggctcgaggacactctctctgaaggaataagacagcggtggaagctcaaacctggcccaccaccaccagagcccgcagagcggcataaggacgacagcaggggtcttgtgcttcctgggtacaagtacctcggacccttcaacggactcgacaagggagagccggtcaacgaggcagacgccgcggccctcgagcacgacaaagcctacgaccggcagctcgacagcggagacaacccgtacctcaagtacaaccacgccgacgcggagtttcaggagcgccttaaagaagatacgtcttttgggggcaacctcggacgagcagtcttccaggcgaaaaagagggtacttgaacctctgggcctggttgaggaacctgttaagacggctccgggaaaaaagaggccggtagagcactctcctgtggagccagactcctcctcgggaaccggaaaggcgggccagcagcctgcaagaaaaagattgaattttggtcagactggagacgcagactcagtacctgacccccagcctctcggacagccaccagcagccccctctggtctgggaactaatacgatggctacaggcagtggcgcaccaatggcagacaataacgagggcgccgacggagtgggtaattcctcgggaaattggcattgcgattccacatggatgggcgacagagtcatcaccaccagcacccgaacctgggccctgcccacctacaacaaccacctctacaaacaaatttccagccaatcaggagcctcgaacgacaatcactactttggctacagcaccccttgggggtattttgacttcaacagattccactgccacttttcaccacgtgactggcaaagactcatcaacaacaactggggattccgacccaagagactcaacttcaagctctttaacattcaagtcaaagaggtcacgcagaatgacggtacgacgacgattgccaataaccttaccagcacggttcaggtgtttactgactcggagtaccagctcccgtacgtcctcggctcggcgcatcaaggatgcctcccgccgttcccagcagacgtcttcatggtaccacagtatggatacctcaccctgaacaacgggagtcaggcagtaggacgctcttcattttactgcctggagtactttccttctcagatgctgcgtaccggaaacaactttaccttcagctacacttttgaggacgttcctttccacagcagctacgctcacagccagagtctgggccgtctcatgaatcctctcatcgaccagtacctgtattacttgagcagaacaaacactccaagtggaaccaccacgcagtcaaggcttcagttttctcaggccggagcgagtgacattcgggaccagtctaggaactggcttcctggaccctgttaccgccagcagcgagtatcaaagacatctgcggataacaacaacagtgaatactcgtggactggagctaccaagtaccacctcaatggcagagactctctggtgaatccgggcccggccatggcaagccacaaggacgatgaagaaaagttttttcctcagagcggggttctcatctttgggaagcaaggctcagagaaaacaaatgtggacattgaaaaggtcatgattacagacgaagaggaaatcaggacaaccaatcccgtggctacggagcagtatggttctgtatctaccaacctccagagaggcaacagacaagcagctaccgcagatgtcaacacacaaggcgttcttccaggcatggtctggcaggacagagatgtgtaccttcaggggcccatctgggcaaagattccacacacggacggacattttcacccctctcccctcatgggtggattcggacttaaacaccctcctccacagattctcatcaagaacaccccggtacctgcgaatccttcgaccaccttcagtgcggcaaagtttgcttccttcatcacacagtactccacgggacaggtcagcgtggagatcgagtgggagctgcagaaggaaaacagcaaacgctggaatcccgaaattcagtacacttccaactacaacaagtctgttaatgtggactttactgtggacactaatggcgtgtattcagagcctcgccccattggcaccagatacctgactcgtaatctgtaa

SEQ ID NO: 245 - protein, 735 aa, Adeno-associated virus
MAADGYLPDWLEDTLSEGIRQRWKLKPGPPPPEPAERHKDDSRGLVLPGYKYLGPFNGLDKGEPVNEADAAALEHDKAYDRQLDSGDNPYLKYNHADAEFQERLKEDTSFGGNLGRAVFQAKKRVLEPLGLVEEPVKTAPGKKRPVEHSPVEPDSSSGTGKAGQQPARKRLNFGQTGDADSVPDPQPLGQPPAAPSGLGTNTMATGSGAPMADNNEGADGVGNSSGNWHCDSTWMGDRVITTSTRTWALPTYNNHLYKQISSQSGASNDNHYFGYSTPWGYFDFNRFHCHFSPRDWQRLINNNWGFRPKRLNFKLFNIQVKEVTQNDGTTTIANNLTSTVQVFTDSEYQLPYVLGSAHQGCLPPFPADVFMVPQYGYLTLNNGSQAVGRSSFYCLEYFPSQMLRTGNNFTFSYTFEDVPFHSSYAHSQSLGRLMNPLIDQYLYYLSRTNTPSGTTTQSRLQFSQAGASDIRDQSRNWLPGPCYRQQRVSKTSADNNNSEYSWTGATKYHLNGRDSLVNPGPAMASHKDDEEKFFPQSGVLIFGKQGSEKTNVDIEKVMITDEEEIRTTNPVATEQYGSVSTNLQRGNRQAATADVNTQGVLPGMVWQDRDVYLQGPIWAKIPHTDGHFHPSPLMGGFGLKHPPPQILIKNTPVPANPSTTFSAAKFASFITQYSTGQVSVEIEWELQKENSKRWNPEIQYTSNYNKSVNVDFTVDTNGVYSEPRPIGTRYLTRNL

SEQ ID NO: 246 - DNA, 2208 bp, Adeno-associated virus
  source 1..2208: mol_type = genomic DNA
atggctgccgatggttatcttccagattggctcgaggacactctctctgaaggaataagacagcggtggaagctcaaacctggcccaccaccaccagagcccgcagagcggcataaggacgacagcaggggtcttgtgcttcctgggtacaagtacctcggacccttcaacggactcgacaagggagagccggtcaacgaggcagacgccgcggccctcgagcacgacaaagcctacgaccggcagctcgacagcggagacaacccgtacctcaagtacaaccacgccgacgcggagtttcaggagcgccttaaagaagatacgtcttttgggggcaacctcggacgagcagtcttccaggcgaaaaagagggtactcgaacctctgggcctggttgaggaacctgttaagacggctccgggaaaaaagaggccggtagagcactctcctgtggagccagactcctcctcgggaaccggaaaggcgggccagcagcctgcaagaaaaagattgaattttggtcagactggagacgcagactcagtacctgacccccagcctctcggacagccaccagcagccccctctggtctgggaactaatacgatggctacaggcagtggcgcaccaatggcagacaataacgagggcgccgacggagtgggtaattcctcgggaaattggcattgcgattccacatggatgggcgacagagtcatcaccaccagcacccgaacctgggccctgcccacctacaacaaccacctctacaaacaaatttccagccaatcaggagcctcgaacgacaatcactactttggctacagcaccccttgggggtattttgacttcaacagattccactgccacttttcaccacgtgactggcaaagactcatcaacaacaactggggattccgacccaagagactcaacttcaagctctttaacattcaagtcaaagaggtcacgcagaatgacggtacgacgacgattgccaataaccttaccagcacggttcaggtgtttactgactcggagtaccagctcccgtacgtcctcggctcggcgcatcaaggatgcctcccgccgttcccagcagacgtcttcatggtgccacagtatggatacctcaccctgaacaacgggagtcaggcagcaggacgctcttcattttactgcctggagtactttccttctcagatgctgcgtaccggaaacaactttaccttcagctacacttttgaggacgttcctttccacagcagctacgctcacagccagagtctgggccgtctcatgaatcctctcatcgaccagtacctgtattacttgagcagaacaaacactccaagtggaaccaccacgcagtcaaggcttcagttttctcaggccggagcgagtgacattcgggaccagtctaggaactggcttcctggaccctgttaccgccagcagcgagtatcaaagacatctgcggataacaacaacagtgaatactcgtggactggagctaccaagtaccacctcaatggcagagactctctggtgaatccgggcccggccatggcaagccacaaggacgatgaagaaaagttttttcctcagagcggggttctcatctttgggaagcaaggctcagagaaaacaaatgtggacattgaaaaggtcatgattacagacgaagaggaaatcaggacaaccaatcccgtggctacggagcagtatggttctgtatctaccaacctccagagaggcaacagacaagcagctaccgcagatgtcaacacacaaggcgttcttccaggcatggtctggcaggacagagatgtgtaccttcaggggcccatctgggcaaagattccacacacggacggacattttcacccctctcccctcatgggtggattcggacttaaacaccctcctccacagattctcatcaagaacaccccggtacctgcgaatccttcgaccaccttcagtgcggcaaagtttgcttccttcatcacacagtactccacgggacaggtcagcgtggagatcgagtgggagctgcagaaggaaaacagcaaacgctggaatcccgaaattcagtacacttccaactacaacaagtccgttaatgtggactttactgtggacactaatggcgtgtattcagagcctcgccccattggcaccagatacctgactcgtaatctgtaa

SEQ ID NO: 247 - protein, 735 aa, Adeno-associated virus
MAADGYLPDWLEDTLSEGIRQRWKLKPGPPPPEPAERHKDDSRGLVLPGYKYLGPFNGLDKGEPVNEADAAALEHDKAYDRQLDSGDNPYLKYNHADAEFQERLKEDTSFGGNLGRAVFQAKKRVLEPLGLVEEPVKTAPGKKRPVEHSPVEPDSSSGTGKAGQQPARKRLNFGQTGDADSVPDPQPLGQPPAAPSGLGTNTMATGSGAPMADNNEGADGVGNSSGNWHCDSTWMGDRVITTSTRTWALPTYNNHLYKQISSQSGASNDNHYFGYSTPWGYFDFNRFHCHFSPRDWQRLINNNWGFRPKRLNFKLFNIQVKEVTQNDGTTTIANNLTSTVQVFTDSEYQLPYVLGSAHQGCLPPFPADVFMVPQYGYLTLNNGSQAAGRSSFYCLEYFPSQMLRTGNNFTFSYTFEDVPFHSSYAHSQSLGRLMNPLIDQYLYYLSRTNTPSGTTTQSRLQFSQAGASDIRDQSRNWLPGPCYRQQRVSKTSADNNNSEYSWTGATKYHLNGRDSLVNPGPAMASHKDDEEKFFPQSGVLIFGKQGSEKTNVDIEKVMITDEEEIRTTNPVATEQYGSVSTNLQRGNRQAATADVNTQGVLPGMVWQDRDVYLQGPIWAKIPHTDGHFHPSPLMGGFGLKHPPPQILIKNTPVPANPSTTFSAAKFASFITQYSTGQVSVEIEWELQKENSKRWNPEIQYTSNYNKSVNVDFTVDTNGVYSEPRPIGTRYLTRNL

SEQ ID NO: 248 - protein, 738 aa, Adeno-associated virus; identical to SEQ ID NO: 90

SEQ ID NO: 249 - DNA, 2217 bp, Adeno-associated virus
  source 1..2217: mol_type = genomic DNA
atggctgctgacggttatcttccagattggctcgaggacaacctctctgagggcattcgcgagtggtgggacctgaaacctggagcccccaagcccaaggccaaccagcagaagcaggacgacggccggggtctggtgcttcctggctacaagtacctcggacccttcaacggactcgacaagggggagcccgtcaacgcggcggacgcagcggccctcgagcacgacaaggcctacgaccagcagctcaaagcgggtgacaatccgtacctgcggtataaccacgccgacgccgagtttcaggagcgtctgcaagaagatacgtcttttgggggcaacctcgggcgagcagtcttccaggccaagaagcgggttctcgaacctctcggtctggttgaggaagctgctaagacggctcctggaaagaagagaccggtagaaccgtcacctcagcgttcccccgactcctccacgggcatcggcaagaaaggccagcagcccgctaaaaagagactgaactttggtcagactggcgactcagagtcagtccccgaccctcaaccaatcggagaaccaccagcaggcccctctggtctgggatctggtacaatggctgcaggcggtggcgctccaatggcagacaataacgaaggcgccgacggagtgggtagttcctcaggaaattggcattgcgattccacatggctgggcgacagagtcatcaccaccagcacccgaacctgggccctgcccacctacaacaaccacctctacaagcaaatatccaatgggacatcgggaggaagcaccaacgacaacacctacttcggctacagcaccccctgggggtattttgacttcaacagattccactgccacttctcaccacgtgactggcagcgactcatcaacaacaactggggattccggccaaaaagactcagcttcaagctcttcaacatccaggtcaaggaggtcacgcagaatgaaggcaccaagaccatcgccaataaccttaccagcacgattcaggtatttacggactcggaataccagctgccgtacgtcctcggctccgcgcaccagggctgcctgcctccgttcccggcggacgtcttcatgattccccagtacggctaccttacactgaacaatggaagtcaagccgtaggccgttcctccttctactgcctggaatattttccatctcaaatgctgcgaactggaaacaattttgaattcagctacaccttcgaggacgtgcctttccacagcagctacgcacacagccagagcttggaccgactgatgaatcctctcatcgaccagtacctgtactacttatccagaactcagtccacaggaggaactcaaggtacccagcaattgttattttctcaagctgggcctgcaaacatgtcggctcaggctaagaactggctacctggaccttgctaccggcagcagcgagtctctacgacactgtcgcaaaacaacaacagcaactttgcttggactggtgccaccaaatatcacctgaacggaagagactctttggtaaatcccggtgtcgccatggcaacccacaaggacgacgaggaacgcttcttcccgtcgagtggagtcctgatgttcggaaaacagggtgctggaagagacaatgtggactacagcagcgttatgctaaccagcgaagaagaaattaaaaccactaaccccgtagccacagaacaatacggtgtggtggctgacaacttgcagcaaaccaatacagggcctattgtgggaaatgtcaacagccaaggagccttacctggcatggtctggcagaaccgagacgtgtacctgcagggtcccatctgggccaagattcctcacacggacggcaacttccacccttcaccgctaatgggaggatttggactgaagcacccacctcctcagatcctgatcaagaacacgccggtacctgcggatcctccaacaacgttcagccaggcgaaattggcttccttcattacgcagtacagcaccggacaggtcagcgtggaaatcgagtgggagctgcagaaggagaacagcaaacgctggaacccagagattcagtacacttcaaactactacaaatctacaaatgtggactttgctgtcaatacagagggaacttattctgagcctcgccccattggtactcgttacctcacccgtaatctgtaa

SEQ ID NO: 250 - protein, 738 aa, Adeno-associated virus
MAADGYLPDWLEDNLSEGIREWWDLKPGAPKPKANQQKQDDGRGLVLPGYKYLGPFNGLDKGEPVNAADAAALEHDKAYDQQLKAGDNPYLRYNHADAEFQERLQEDTSFGGNLGRAVFQAKKRVLEPLGLVEEAAKTAPGKKRPVEPSPQRSPDSSTGIGKKGQQPAKKRLNFGQTGDSESVPDPQPIGEPPAGPSGLGSGTMAAGGGAPMADNNEGADGVGSSSGNWHCDSTWLGDRVITTSTRTWALPTYNNHLYKQISNGTSGGSTNDNTYFGYSTPWGYFDFNRFHCHFSPRDWQRLINNNWGFRPKRLSFKLFNIQVKEVTQNEGTKTIANNLTSTIQVFTDSEYQLPYVLGSAHQGCLPPFPADVFMIPQYGYLTLNNGSQAVGRSSFYCLEYFPSQMLRTGNNFEFSYTFEDVPFHSSYAHSQSLDRLMNPLIDQYLYYLSRTQSTGGTQGTQQLLFSQAGPANMSAQAKNWLPGPCYRQQRVSTTLSQNNNSNFAWTGATKYHLNGRDSLVNPGVAMATHKDDEERFFPSSGVLMFGKQGAGRDNVDYSSVMLTSEEEIKTTNPVATEQYGVVADNLQQTNTGPIVGNVNSQGALPGMVWQNRDVYLQGPIWAKIPHTDGNCHPSPLMGGFGLKHPPPQILIKNTPVPADPPTTFSQAKLASFITQYSTGQVSVEIEWELQKENSKRWNPEIQYTSNYYKSTNVDFAVNTEGTYSEPRPIGTRYLTRNL

SEQ ID NO: 251 - protein, 738 aa, Adeno-associated virus
MAADGYLPDWLEDNLSEGIREWWDLKPGAPKPKANQQKQDDGRGLVLPGYKYLGPFNGLDKGEPVNAADAAALEHDKAYDQQLKAGDNPYLRYNHADAEFQERLQEDTSFGGNLGRAVFQAKKRVLEPLGLVEEGAKTAPGKKRPVEPSPQRSPDSSTGIGKKGQQPARKRLNFGRTGDSESVPDPQPIGEPPAAPSSVGSGTMAAGGGAPMADNNEGADGVGSSSGNWHCDSTWLGDRVITTSTRTWALPTYNNHLYKQISNGTSGGSTNDNTYFGYSTPWGYLDFNRFHCHFSPRDWQRLINNNWGFRPKRLSFKLFNIQVKEVTQNEGTKTIANNLASTIQVFTDSEYQPPYVLGSAHQGCLPPFPADVFMIPQYGYLTLNNGSQAVGRSSFYCLEYFPSQMLRTGNNFSFSYTFEDVPFHSSYAHSQSLDRLMNPLIDQYLYYLSRTQSTGGTAGTQQLLFSRAGPSNMSAQARNWLPGPCYRQQRVSTTLSQNNNSNFAWTGATKYHLNGRDSLVNPGVAMATNKDDEDRFFPSSGILMFGKQGAGKDNVDYSNVMLTSEEEIKTTNPVATEQYGVVADNLQQQNTAPTVGAVNSQGALPGMVWQNRDVYLQGPIWAKIPHTDGNFHPSPLMGGFGLKHPPPQILIKNTPVPADPPTAFNQAKLNSFIAQYSTGQVSVEIEWELQKENSKRWNPEIQYTSNYYKSTNADFAVNTEGVYSEPRPIGTRYLTRNL

SEQ ID NO: 252 - DNA, 2217 bp, Adeno-associated virus
  source 1..2217: mol_type = genomic DNA
atggctgccgatggttatcttccagattggctcgaggacaacctctctgagggcattcgcgagtggtgggacctgaaacctggagccccgaaacccaaagccaaccagcaaaagcaggacgacggccggggtctggtgcttcctggctacaagtacctcggacccttcaacggactcgacaagggggagcccgtcaacgcggcggacgcagcggccctcgagcacgacaaggcctacgaccagcagctcaaagcgggtgacaatccgtacctgcggtataatcacgccgacgccgagtttcaggagcgtctgcaagaagatacgtcttttgggggcaacctcgggcgagcagtcttccaggccaagaagcgggttctcgaacctctcggtctggttgaggaaggcgctaagacggctcctggaaagaagagaccggtagagccgtcaccacagcgttcccccgactcctccacgggcatcggcaagaaaggccagcagcccgccagaaagagactcaatttcggtcggactggcgactcagagtcagtccccgaccctcaacctatcggagaacctccagcagcgccctctagtgtgggatctggtacaatggctgcaggcggtggcgcaccaatggcagacaataacgaaggtgccgacggagtgggtagttcctcgggaaattggcattgcgattccacatggctgggcgacagagttatcaccaccagcacccgaacctgggccctgcccacctacaacaaccacctctacaagcaaatctccaacgggacctcgggaggcagcaccaacgacaacacctactttggctacagcaccccctgggggtatcttgactttaacagattccactgccacttctcaccacgtgactggcagcgactcatcaacaacaactggggattccggcccaagagactcagcttcaagctcttcaacatccaggtcaaagaggtcacgcagaatgaaggcaccaagaccatcgccaataacctcgccagcaccatccaggtgtttacggactcggaataccagccgccgtacgtcctcggctctgcccaccagggctgcctgcctccgttcccggcggacgtcttcatgattcctcagtacggctacctgactctcaacaacggtagtcaggccgtgggacgttcctccttctactgcctggagtacttcccctctcagatgctgagaacgggcaacaacttttccttcagctacactttcgaggacgtgcctttccacagcagctacgcgcacagccagagtttggacaggctgatgaatcctctcatcgaccagtacctgtactacctgtcaagaacccagtctacgggaggcacagcgggaacccagcagttgctgttttctcgggccgggcctagcaacatgtcggctcaggccagaaactggctgcctggaccctgctacagacagcagcgcgtctccacgacactgtcgcaaaacaacaacagcaactttgcctggactggtgccaccaagtatcatctgaacggcagagactctctggtgaatccgggcgtcgccatggcaaccaacaaggacgacgaggaccgcttcttcccatccagcggcatcctcatgtttggcaagcagggagctggaaaagacaacgtggactatagcaacgtgatgctaaccagcgaggaagaaatcaagaccaccaaccccgtggccacagaacagtatggcgtggtggctgataacctacagcagcaaaacaccgctcctactgtgggggccgtcaacagccagggagccttacctggcatggtctggcagaaccgggacgtgtacctgcagggtcctatttgggccaagattcctcacacagatggcaactttcacccgtctcctttaatgggcggctttggacttaaacatccgcctcctcagatcctcatcaaaaacactcctgttcctgcggatcctccaacagcgttcaaccaggccaagctgaattctttcatcgcgcagtacagcaccggacaagtcagcgtggagatcgagtgggagctgcagaaggagaacagcaagcgctggaacccagagattcagtatacttccaactactacaaatctacaaatgcggactttgctgttaatactgagggtgtttactctgagcctcgccccattggcactcgttacctcacccgtaatctgtaa

SEQ ID NO: 253 - DNA, 2208 bp, Adeno-associated virus
  source 1..2208: mol_type = genomic DNA
atggctgccgatggttatcttccagattggctcgaggacactctctctgaaggaataagacagtggtggaagctcaaacctggcccaccaccaccaaagcccgcagagcggcataaggacgacagcaggggtcttgtgcttcctgggtacaagtacctcggacccttcaacggactcgacaagggggagccggtcaacgaggcagacgccgcggccctcgagcacgacaaggcctacgaccggcagctcgacagcggagacaacccgtacctcaagtacaaccacgccgacgcagagtttcaggagcgccttaaagaagatacgtcttttgggggcaacctcggacgagcagtcttccaggcgaaaaagagggttcttgaacctctgggcctggttgaggagcctgttaagacggctccgggaaaaaagaggccggtagagcactctcctgtggagccagactcctcctcgggaaccggaaaagcgggccagcagcctgcaagaaaaagattaaattttggtcagactggagacgcagactccgtacctgacccccagcctctcggacagccaccagcagccccctctggtctgggatctactacaatggctacaggcagtggcgcaccaatggcagacaataacgagggtgccgatggagtgggtaattcctcaggaaattggcattgcgattcccaatggctgggcgacagagtcatcaccaccagcacccgaacctgggccctgcccacatacaacaaccacctctacaagcaaatctccagccaatcaggagccagcaacgacaaccactactttggctacagcaccccctgggggtattttgacttcaacagattccactgccacttttcaccacgtgactggcaaagactcgtcaacaacaaccggggattccggcccaaaagactcaacttcaagctctttaatattcaagtcaaagaggtcacgcagaatgacggtacgacgacgattgccaataaccttaccagcacggttcaggtgtttactgactcggagtaccagctcccgtacgtcctgggctcggcgcatcaaggatgcctcccgccgtttccagcggacgtcttcatggtcccacagtatggatacctcaccctgaacaacgggagtcaggcggtaggacgctcttccttttactgcctggagtactttccttctcagatgctgcgtactggaaacaactttcagttcagctacacttttgaagacgtgcctttccacagcagctacgctcacagccagagtctggatcggctgatgaatcctctgatcgaccagtacctgtattatctgaacaagacacaaacaaatagtggaactcttcagcagtctcggctactgtttagccaagctggaccaaccaacatgtctcttcaagctaaaaactggctgcctggaccttgctacagacagcagcgtctgtcaaaacaggcaaacgacaacaacaacagcaactttccctggactgcagctacaaagtatcatctaaatggccgggactcgttggttaatccaggaccagctatggccagtcacaaggatgacgaagaaaagtttttccccatgcatggaaccctgatatttggtaaacaaggaacaaatgccaacgacgcggatttggaaaatgtcatgattacagatgaagaagaaatcagggccaccaatcccgtggctacggagcagtacgggactgtgtcaaataatttgcaaaactcaaacactggtccaactactggaactgtcaatcaccaaggagcgttacctggtatggtgtggcaggatcgagacgtgtacctgcagggacccatttgggccaagattcctcacaccgatggacactttcatccttctccactgatgggaggttttggactcaaacacccgcctcctcagatcatgatcaaaaacactcccgttccagccaatcctcccacaaacttcagttctgccaagtttgcttctttcatcacacagtattccacgggacaggtcagcgtggagatcgagtgggagctgcagaaggagaacagcaaacgctggaatcccgaaattcagtacacttccaactacaacaagtctgttaatgtggactttactgtggacactaatggtgtgtattcagagcctcgccccattggcaccagatacctgactcgtaatctgtaa

SEQ ID NO: 254 - protein, 735 aa, Adeno-associated virus
MAADGYLPDWLEDTLSEGIRQWWKLKPGPPPPKPAERHKDDSRGLVLPGYKYLGPFNGLDKGEPVNEADAAALEHDKAYDRQLDSGDNPYLKYNHADAEFQERLKEDTSFGGNLGRAVFQAKKRVLEPLGLVEEPVKTAPGKKRPVEHSPVEPDSSSGTGKAGQQPARKRLNFGQTGDADSVPDPQPLGQPPAAPSGLGSTTMATGSGAPMADNNEGADGVGNSSGNWHCDSQWLGDRVITTSTRTWALPTYNNHLYKQISSQSGASNDNHYFGYSTPWGYFDFNRFHCHFSPRDWQRLVNNNRGFRPKRLNFKLFNIQVKEVTQNDGTTTIANNLTSTVQVFTDSEYQLPYVLGSAHQGCLPPFPADVFMVPQYGYLTLNNGSQAVGRSSFYCLEYFPSQMLRTGNNFQFSYTFEDVPFHSSYAHSQSLDRLMNPLIDQYLYYLNKTQTNSGTLQQSRLLFSQAGPTNMSLQAKNWLPGPCYRQQRLSKQANDNNNSNFPWTAATKYHLNGRDSLVNPGPAMASHKDDEEKFFPMHGTLIFGKQGTNANDADLENVMITDEEEIRATNPVATEQYGTVSNNLQNSNTGPTTGTVNHQGALPGMVWQDRDVYLQGPIWAKIPHTDGHFHPSPLMGGFGLKHPPPQIMIKNTPVPANPPTNFSSAKFASFITQYSTGQVSVEIEWELQKENSKRWNPEIQYTSNYNKSVNVDFTVDTNGVYSEPRPIGTRYLTRNL

SEQ ID NO: 255 - protein, 738 aa, Adeno-associated virus
MAADGYLPDWLEDNLSEGIREWWDLKPGAPKPKANQQKQDDGRGLVLPGYKYLGPFNGLDKGEPVNAADAAALEHDKAYDQQLKAGDNPYLRYNHADAEFQERLQEDTSFGGNLGRAVFQAKKRVLEPLGLVEEAAKTAPGKKRPVEPSPQRSPDSSTGIGKKGQQPAKKRLSFGQTGDSESVPDPQPIGEPPAGPSGLGSGTMAAGGGAPMADNNEGADGVGSSSGNWHCDSTWLGDRVITTSTRTWALPTYNNHLYKQISNGTSGGSTNDNTYFGYSTPWGYFDFNRFHCHFSPRDWQRLINNNWGFRPKRLSFKLFNIQVKEVTQNEGTKTIANNLTSTIQVFTDSEYQLPYVLGSAHQGCLPPFPADVFMIPQYGYLTLNNGSQAVGRSSFYCLEYFPSQMLRTGNNSEFSYTFEDVPFHSSYAHSQSLDRLMNPLIDQYLYYLSRTQSTGGTQGTQQLLFSQAGPANMSAQAKNWLPGPCYRQQRVSTTLSQNNNSNFAWTGATKYHLNGRDSLVNPGVAMATHKDDEERFFPSSGVLMFGKQGAGRDNVDYSSVMLTSEEEIKTTNPVATEQYGVVADNLQQTNTGPIVGNVNSQGALPGMVWQNRDVYLQGPIWAKIPHTDGNFHPSPLMGGFGLKHPPPQILIKNTPVPADPPTTFSQAKLASFITQYSTGQVSVEIEWELQKENSKRWNPEIQYTSNYYKSTNVDFAVNTEGTYSEPRPIGTRYLTRNL

SEQ ID NO: 256 - DNA, 2217 bp, Adeno-associated virus
  source 1..2217: mol_type = genomic DNA
atggctgctgacggttatcttccagattggctcgaggacaacctctctgagggcattcgcgagtggtgggacctgaaacctggagcccccaagcccaaggccaaccagcagaagcaggacgacggccggggtctggtgcttcctggctacaagtacctcggacccttcaacggactcgacaagggggagcccgtcaacgcggcggacgcagcggccctcgagcacgacaaggcctacgaccagcagctcaaagcgggtgacaatccgtacctgcggtataaccacgccgacgccgagtttcaggagcgtctgcaagaagatacgtcttttgggggcaacctcgggcgagcagtcttccaggccaagaagcgggttctcgaacctctcggtctggttgaggaagctgctaagacggctcctggaaagaagagaccggtagaaccgtcacctcagcgttcccccgactcctccacgggcatcggcaagaaaggccagcagcccgctaaaaagagactgagctttggtcagactggcgactcagagtcagtccccgaccctcaaccaatcggagaaccaccagcaggcccctctggtctgggatctggtacaatggctgcaggcggtggcgctccaatggcagacaataacgaaggcgccgacggagtgggtagttcctcaggaaattggcattgcgattccacatggctgggcgacagagtcatcaccaccagcacccgaacctgggccctgcccacctacaacaaccacctctacaagcaaatatccaatgggacatcgggaggaagcaccaacgacaacacctacttcggctacagcaccccctgggggtattttgacttcaacagattccactgccacttctcaccacgtgactggcagcgactcatcaacaacaactggggattccggccaaaaagactcagcttcaagctcttcaacatccaggtcaaggaggtcacgcagaatgaaggcaccaagaccatcgccaataaccttaccagcacgattcaggtatttacggactcggaataccagctgccgtacgtcctcggctccgcgcaccagggctgcctgcctccgttcccggcggacgtcttcatgattccccagtacggctaccttacactgaacaatggaagtcaagccgtaggccgttcctccttctactgcctggaatattttccatctcaaatgctgcgaactggaaacaattctgaattcagctacaccttcgaggacgtgcctttccacagcagctacgcacacagccagagcttggaccgactgatgaatcctctcatcgaccagtacctgtactacttatccagaactcagtccacaggaggaactcaaggtacccagcaattgttattttctcaagctgggcctgcaaacatgtcggctcaggctaagaactggctacctggaccttgctaccggcagcagcgagtctctacgacactgtcgcaaaacaacaacagcaactttgcttggactggtgccaccaaatatcacctgaacggaagagactctttggtaaatcccggtgtcgccatggcaacccacaaggacgacgaggaacgcttcttcccgtcgagtggagtcctgatgtttggaaaacagggtgctggaagagacaatgtggactacagcagcgttatgctaaccagcgaagaagaaattaaaaccactaaccctgtagccacagaacaatacggtgtggtggctgacaacttgcagcaaaccaatacagggcctattgtgggaaatgtcaacagccaaggagccttacctggcatggtctggcagaaccgagacgtgtacctgcagggtcccatctgggccaagattcctcacacggacggcaacttccacccttcaccgctaatgggaggatttggactgaagcacccacctcctcagatcctgatcaagaacacgccggtacctgcggatcctccaacaacgttcagccaggcgaaattggcttccttcattacgcagtacagcaccggacaggtcagcgtggaaatcgagtgggagctgcagaaggagaacagcaaacgctggaacccagagattcagtacacttcaaactactacaaatctacaaatgtggactttgctgtcaatacagagggaacttattctgagcctcgccccattggtactcgttacctcacccgtaatctgtaa

SEQ ID NO: 257 - protein, 738 aa, Adeno-associated virus
MAADGYLPDWLEDNLSEGIREWWDLKPGAPKPKANQQKQDDGRGLVLPGYKYLGPFNGLDKGEPVNAADAAALEHDKAYDQQLKAGDNPYLRYNHADAEFQERLQEDTSFGGNLGRAVFQAKKRVLEPLGPVEEAAKTAPGKKRPVEPPPQRSPDSSTGIGKKGQQPAKKRLNFGQTGDSESVPDPQPIGEPPAGPSGLGSGTMAAGGGAPMADNNEGADGVGSSSGNWHCDSTWLGDRVITTSTRTWALPTYNNHLYKQISNGTSGGSTNDNTYFGYSTPWGYFDFNRFHCHFSPRDWQRLINNNWGFRPKRLSFKLFNIQVKEVTQNEGTKTVANNLTSTIQVFTDSEYQLPYVLGSAHQGCLPPFPADVFMIPQYGYLTLNNGSQAVGRSSFYCLEYFPSQMLRTGNNFEFSYTFEDVPFHSSYAHSQSLDRLMNPLIDQYLYYLSRTQSTGGTQGTQQLLFSQAGPANMSAQAKNWLPGPCYRQQRVSTTLSQNNNSNFAWTGATKYHLNGRDSLVNPGVAMATHKDDEERFFPSSGVLMFGKQGAGRDNVDYSSVMLTSEEEIKTTNPVATEQYGVVADNLQQTNTGPIVGNVNSQGALPGMVWQNRDVYLQGPIWAKIPHTDGNFHPSPLMGGFGLKHPPPQILIKNTPVPADPPTTFSQAKLASFITQYSTGQVSVEIEWELQKENSKRWNPEIQYTSNYYKSTNVDFAVNTEGTYSEPRPIGTRYLTRNL

SEQ ID NO: 258 - DNA, 2217 bp, Adeno-associated virus
  source 1..2217: mol_type = genomic DNA
atggctgctgacggttatcttccagattggctcgaggacaacctctctgagggcattcgcgagtggtgggacctgaaacctggagcccccaagcccaaggccaaccagcagaagcaggacgacggccggggtctggtgcttcctggctacaagtacctcggacccttcaacggactcgacaagggggagcccgtcaacgcggcggacgcagcggccctcgagcacgacaaggcctacgaccagcagctcaaagcgggtgacaatccgtacctgcggtataaccacgccgacgccgagtttcaggagcgtctacaagaagatacgtcttttgggggcaacctcgggcgagcagtcttccaggccaagaagcgggttctcgaacctctcggtccggttgaggaagctgctaagacggctcctggaaagaagagaccggtagaaccgccacctcagcgttcccccgactcctccacgggcatcggcaagaaaggccagcagcccgctaaaaagagactgaactttggtcagactggcgactcagagtcagtccccgaccctcaaccaatcggagaaccaccagcaggcccctctggtctgggatctggtacaatggctgcaggcggtggcgctccaatggcagacaataacgaaggcgccgacggagtgggtagttcctcaggaaattggcattgcgattccacatggctgggcgacagagtcatcaccaccagcacccgaacctgggccctgcccacctacaacaaccacctctacaagcaaatatccaatgggacatcgggaggaagcaccaacgacaacacctacttcggctacagcaccccctgggggtattttgacttcaacagattccactgccacttctcaccacgtgactggcagcgactcatcaacaacaactggggattccggccaaaaagactcagcttcaagctcttcaacatccaggtcaaggaggtcacgcagaatgaaggcaccaagaccgtcgccaataaccttaccagcacgattcaggtatttacggactcggaataccagctgccgtacgtcctcggctccgcgcaccagggctgcctgcctccgttcccggcggacgtcttcatgattccccagtacggctaccttacactgaacaatggaagtcaagccgtaggccgttcctccttctactgcctggaatattttccatctcaaatgctgcgaactggaaacaattttgaattcagctacaccttcgaggacgtgcctttccacagcagctacgcacacagccagagcttggaccgactgatgaatcctctcatcgaccagtacctgtactacttatccagaactcagtccacaggaggaactcaaggtacccagcaattgttattttctcaagctgggcctgcaaacatgtcggctcaggctaagaactggctacctggaccttgctaccggcagcagcgagtctctacgacactgtcgcaaaacaacaacagcaactttgcttggactggtgccaccaaatatcacctgaacggaagagactctttggtaaatcccggtgtcgccatggcaacccacaaggacgacgaggaacgcttcttcccgtcgagtggagtcctgatgtttggaaaacagggtgctggaagagacaatgtggactacagcagcgttatgctaaccagcgaagaagaaattaaaaccactaaccctgtagccacagaacaatacggtgtggtggctgacaacttgcagcaaaccaatacagggcctattgtgggaaatgtcaacagccaaggagccttacctggcatggtctggcagaaccgagacgtgtacctgcagggtcccatctgggccaagattcctcacacggacggcaacttccacccttcaccgctaatgggaggatttggactgaagcacccacctcctcagatcctgatcaagaacacgccggtacctgcggatcctccaacaacgttcagccaggcgaaattggcttccttcattacgcagtacagcaccggacaggtcagcgtggaaatcgagtgggagctgcagaaggagaacagcaaacgttggaacccagagattcagtacacttcaaactactacaaatctacaaatgtggactttgctgtcaatacagagggaacttattctgagcctcgccccattggtactcgttacctcacccgtaatctgtaa

SEQ ID NO: 259 - protein, 738 aa, Adeno-associated virus
MAADGYLPDWLEDNLSEGIREWWDLKPGAPKPKANQQKQDDGRGLVLPGYKYLGPFNGLDKGEPVNAADAAALEHDKAYDQQLKAGDNPYLRYNHADAEFQERLQEDTSFGGNLGRAVFQAKKRVLEPLGLVEEAAKTAPGKKRPVEPSPQRSPDSSTGIGKKGQQPAKKRLNFGQTGDSESVPDPQPIGEPPAGPSGLGSGTMAAGGGAPMADNNEGADGVGSSSGNWHCDSTWLGDRVITTSTRTWALPTYNNHLYKQISNGTSGGSTNDNTYFGYSTPWGYFDFNRFHCHFSPRDWQRLINNNWGFRPKRLSFKLFNIQVKEVTQNEGTKTIANNLTSTIQVFTDSEYQLPYVLGSAHQGCLPPFPADVFMIPQYGYLTLNNGSQAVGRSSFYCLEYFPSQMLRTGNNFEFSYTFEDVPFHSSYAHSQSLDRLMNPLIDQYLYYLSRTQSTGGTQGTQQLLFSQAGPANMSAQAKNWLPGPCYRQQRVSTTLSQSNNSNFAWTGATKYHLNGRDSLVNPGVAMATHKDDEERFFPSSGVLMFGKQGAGRDNVDYSSVMLTSEEEIKTTNPVATEQYGVVADNLQQTNTGPIVGNVNSQGALPGMVWQNRDVYLQGPIWAKIPHTDGNFHPSPLMGGLGLKHPPPQILIKNTPVPADPPTTFSQAKLASFITQYSTGQVSVEIEWELQKENSKRWNPEIQYTSNYYKSTNVDFAVNTEGTYSEPRPIGTRYLTRNL

SEQ ID NO: 260 - DNA, 2217 bp, Adeno-associated virus
  source 1..2217: mol_type = genomic DNA
atggctgctgacggttatcttccagattggctcgaggacaacctctctgagggcattcgcgagtggtgggacctgaaacctggagcccccaagcccaaggccaaccagcagaagcaggacgacggccggggtctggtgcttcctggctacaagtacctcggacccttcaacggactcgacaagggggagcccgtcaacgcggcggacgcagcggccctcgagcacgacaaggcctacgaccagcagctcaaagcgggtgacaatccgtacctgcggtataaccacgccgacgccgagtttcaggagcgtctgcaagaagatacgtcttttgggggcaacctcgggcgagcagtcttccaggccaagaagcgggttctcgaacctctcggtctggttgaggaagcggctaagacggctcctggaaagaagagaccggtagaaccgtcacctcagcgttcccccgactcctccacgggcatcggcaagaaaggccagcagcccgctaaaaagagactgaactttggtcagactggcgactcagagtcagtccccgaccctcaaccaatcggagaaccaccagcaggcccctctggtctgggatctggtacaatggctgcaggcggtggcgctccaatggcagacaataacgaaggcgccgacggagtgggtagttcctcaggaaattggcattgcgattccacatggctgggcgacagagtcatcaccaccagcacccgaacctgggccctgcccacctacaacaaccacctctacaagcaaatatccaatgggacatcgggaggaagcaccaacgacaacacctacttcggctacagcaccccctgggggtattttgacttcaacagattccactgccacttctcaccacgtgactggcagcgactcatcaacaacaactggggattccggccaaaaagactcagcttcaagctcttcaacatccaggtcaaggaggtcacgcagaatgaaggcaccaagaccatcgccaataaccttaccagcacgattcaggtatttacggactcggaataccagctgccgtacgtcctcggctccgcgcaccagggctgcctgcctccgttcccggcggacgtcttcatgattccccagtacggctaccttacactgaacaatggaagtcaagccgtaggccgttcctccttctactgcctggaatattttccatctcaaatgctgcgaactggaaacaattttgaattcagctacaccttcgaggacgtgcctttccacagcagctacgcacacagccagagcttggaccgactgatgaatcctctcatcgaccagtacctgtactacttatccagaactcagtccacaggaggaactcaaggtacccagcaattgttattttctcaagctgggcctgcaaacatgtcggctcaggctaagaactggctacctggaccttgctaccggcagcagcgagtctctacgacactgtcgcaaagcaacaacagcaactttgcttggactggtgccaccaaatatcacctgaacggaagagactctttggtaaatcccggtgtcgccatggcaacccacaaggacgacgaggaacgcttcttcccgtcgagtggagtcctgatgtttggaaaacagggtgctggaagagacaatgtggactacagcagcgttatgctaaccagcgaagaagaaattaaaaccactaaccctgtagccacagaacaatacggtgtggtggctgacaacttgcagcaaaccaatacagggcctattgtgggaaatgtcaacagccaaggagccttacctggcatggtctggcagaaccgagacgtgtacctgcagggtcccatctgggccaagattcctcacacggacggcaacttccacccttcaccgctaatgggaggacttggactgaagcacccacctcctcagatcctgatcaagaacacgccggtacctgcggatcctccaacaacgttcagccaggcgaaattggcttccttcattacgcagtacagcaccggacaggtcagcgtggaaatcgagtgggagctgcagaaggagaacagcaaacgctggaacccagagattcagtacacttcaaactactacaaatctacaaatgtggactttgctgtcaatacagagggaacttattctgagcctcgccccattggtactcgttacctcacccgtaatctgtaa

SEQ ID NO: 261 - protein, 737 aa, Adeno-associated virus
MAADGYLPDWLEDNLSEGIREWWDLKPGAPKPKANQQKQDDGRGLVLPGYKYLGPFNGLDKGEPVNAADAAALEHDKAYDQQLKAGDNPYPRYNHADAEFQERLQEDTPFGGNLGRAVFQAKKRVLEPLGLVEEAAKTAPGKKRPVEPSPQRSPDSSTGIGKKGQQPAKKRLNFGQTGDSESVPDPQPIGEPPAGPSGLGSGTMAAGGGAPMADNNEGADGVGNASGNWHCDSTWLGDRVITTSTRTWALPTYNNHLYKQISSASTGASNDNHYFGYSTPWGYFDFNRFHCHFSPRDWQRLINNNWGFRPKRLNFKLFNIQVKEVTTNDGVTTIANNLTSTVQVFSDSEYQLPYVLGSAHQGCLPPFPADVFMIPQYGYLTLNNGSQAVGRSSFYCLEYFPSQMLRTGNNFTFSYTFEEVPLHSSYAHSQSLDRLMNPLIVQYLYYLNRTQNQSGSAQNKDLLFSRGSPAGMSVQPKNWLPGPCYRQQRVSKTKTDNNNSNFTWTGASKYNLNGRESIINPGTAMASHKDDEDKFFPMSGVMIFGKESAGASNTALDNVMITDEEEIKATNPVATERFGTVAVNFQSSSTDPATGDVHAMGALPGMVWQDRDVYLQGPIWAKIPHTDGHFHPSPLMGGFGLKNPPPQILIKNTPVPANPPAEFSATKFASFITQYSTGQVSVEIEWELQKENSKRWNPEVQYTSNYAKSASVDFTVDNNGLYTEPRPIGTRYLTRPL

SEQ ID NO: 262 - protein, 737 aa, Adeno-associated virus
MAADGYLPDWLEDNLSEGIREWWDLKPGAPKPKANQQKQDDGRGLVLPGYKYLGPFNGLDKGEPVNAADAAALEHDKAYDQQLKAGDNPYPRYNHADAEFQERLQEDTSFGGNLGRAVFQAKKRVLEPLGLVEEAAKTAPGKKRPVEPSPQRSPDSSTGIGKKGQQPAKKRLNFGQTGDSESVPDPQPIGEPPAGPSGLGSGTMAAGGGAPMADNNEGADGVGNASGNWHCDSTWLGDRVITTSTRTWALPTYNNHLYKQISSASTGASNDNHYFGYSTPWGYFDFNRFHCHFSPRDWQRLINNNWGFRPKRLNFKLFNIQVKEVTTNDGVTTIANNLTSTVQVFSDSEYQLPYVLGSAHQGCLPPFPADVFMIPQYGYLTLNNGSQAVGRSSFYCLEYFPSQMLRTGNNFTFSYTFEEVPLHSSYAHSQSLDRLMNPLIDQYLYYLNRTQNQSGSAQNKDLLFSRGSPAGMSVQPKNWLPGPCYRQQRVSKTKTDNNNSNFTWTGASKYNLNGRESIINPGTAMASHKDDEDKFFPMSGVMIFGKESAGASNTALDNVMITDEEEIKATNPVATERFGTVAVNFQSSSTDPATGDVHAMGALPGMVWQDRDVYLQGPIWAKIPHTDGHFHPSPLMGGFGLKNPPPQILIKNTPVPANPPAEFSATKFASFITQYSTGQVSVEIEWELQKENSKRWNPEVQYTSNYAKSASVDFTVDNNGLYTEPRPIGTRYLTRPL

SEQ ID NO: 263 - DNA, 2214 bp, Adeno-associated virus
  source 1..2214: mol_type = genomic DNA
atggctgctgacggttatcttccagattggctcgaggacaacctctctgagggcattcgcgagtggtgggacctgaaacctggagcccccaagcccaaggccaaccagcagaagcaggacgacggccggggtctggtgcttcctggctacaagtacctcggacccttcaacggactcgacaagggggagcccgtcaacgcggcggacgcagcggccctcgagcacgacaaggcctacgaccagcagctcaaagcgggtgacaatccgtacccgcggtataaccacgccgacgccgagtttcaggagcgtctgcaagaagatacgccttttgggggcaacctcgggcgagcagtcttccaggccaagaagcgggttctcgaacctctcggtctggttgaggaagctgctaagacggctcctggaaagaagagaccggtagaaccgtcacctcagcgttcccccgactcctccacgggcatcggcaagaaaggccagcagcccgctaaaaagagactgaactttggtcagactggcgactcagagtcagtccccgaccctcaaccaatcggagaaccaccagcaggcccctctggtctgggatctggtacaatggctgcaggcggtggcgctccaatggcagacaataacgaaggcgccgacggagtgggtaatgcctcaggaaattggcattgcgattccacatggctgggcgacagagtcatcaccaccagcacccgcacctgggccttgcccacctacaataaccacctctacaagcaaatctccagtgcttcaacgggggccagcaacgacaaccactacttcggctacagcaccccctgggggtattttgatttcaacagattccactgccacttttcaccacgtgactggcagcgactcatcaacaacaattggggattccggcccaagagactcaacttcaaactcttcaacatccaagtcaaggaggtcacgacgaatgatggcgtcacaaccatcgctaataaccttaccagcacggttcaagtcttctcggactcggagtaccagcttccgtacgtcctcggctctgcgcaccagggctgcctccctccgttcccggcggacgtgttcatgattccgcaatacggctacctgacgctcaacaatggcagccaagccgtgggacgttcatccttttactgcctggaatatttcccttctcagatgctgagaacgggcaacaactttaccttcagctacacctttgaggaagtgcctctccacagcagctacgcgcacagccagagcctggaccggctgatgaatcctctcatcgtccaatacctgtattacctgaacagaactcaaaatcagtccggaagtgcccaaaacaaggacttgctgttcagccgtgggtctccagctggcatgtctgttcagcccaaaaactggctacctggaccctgttatcggcagcagcgcgtttctaaaacaaaaacagacaacaacaacagcaattttacctggactggtgcttcaaaatataacctcaatgggcgtgaatccatcatcaaccctggcactgctatggcctcacacaaagacgacgaagacaagttctttcccatgagcggtgtcatgatttttggaaaagagagcgccggagcttcaaacactgcattggacaatgtcatgattacagacgaagaggaaattaaagccactaaccctgtggccaccgaaagatttgggaccgtggcagtcaatttccagagcagcagcacagaccctgcgaccggagatgtgcatgctatgggagcattacctggcatggtgtggcaagatagagacgtgtacctgcagggtcccatttgggccaaaattcctcacacagatggacactttcacccgtctcctcttatgggcggctttggactcaagaacccgcctcctcagatcctcatcaaaaacacgcctgttcctgcgaatcctccggcggagttttcagctacaaagtttgcttcattcatcacccaatactccacaggacaagtgagtgtggaaattgaatgggagctgcagaaagaaaacagcaagcgctggaatcccgaagtgcagtacacatccaattatgcaaaatctgccagcgttgattttactgtggacaacaatggactttatactgagcctcgccccattggcacccgttaccttacccgtcccctgtaa

SEQ ID NO: 264 - protein, 736 aa, Adeno-associated virus
MAADGYLPDWLEDTLSEGIRQWWKLRPGPPPPKPAERHKDDSRGLVLPGYKYLGPFNGLDKGEPVNEADAAALEHDKAYDRQLDSGDNPYLKYNHADAEFQERLKEDTSFGGNLGRAVFQAKKRVLEPLGLVEEGAETAPGKKRPVEQSPQGPDSSSGIGKTGQQPAKKRLNFGQTGDSESVPDPQPLGEPPATPAAVGPTTMASGGGAPMADNNEGADGVGNASGNWHCDSTWLGDRVITTSTRTWALPTYNNHLYKQISSASTGASNDNHYFGYSTPWGYFDFNRFHCHFSPRDWQRLINNNWGFRPKRLNFKLFNIQVKEVTTNDGVTTIANNLTSTVQVFSDSEYQLPYVLGSAHQGCLPPFPADVFMIPQYGYLTLNNGSQAVGRSSFYCLEYFPSQMLRTGNNFTFSYTFEEVPFHSSYAHSQSLDRLMNPLIDQYLYYPNRTQNQSGSAQNKDLLFSRGSPAGMSVQPKNWLPGPCYRQQRVSKTKTDNNNSNFTWTGASKYNLNGRESIINPGTAMASHKDDEDKFFPMSGVMIFGKESAGASNTALDNVMITDEEEIKATNPVATERFGTVAVNFQSSSTDPATGDVHAMGALPGMVWQGRDVYLQGPIWAKIPHTDGHFHPSPLMGGFGLKNPPPQILIKNTPVPANPPAEFSATKFASFITQYSTGQVSVEIEWELQKENSKRWNPEVQYTSNYAKSANVDFTVDNNGLYTEPRPIGTRYLTRPL

SEQ ID NO: 265 - DNA, 2211 bp, Adeno-associated virus
  source 1..2211: mol_type = genomic DNA
atggctgccgatggttatcttccagattggctcgaggacactctctctgaaggaataagacagtggtggaagctcagacctggcccaccaccaccaaagcccgcagagcggcataaggacgacagcaggggtcttgtgcttcctgggtacaagtacctcggacccttcaacggactcgacaagggagagccggtcaacgaggcagacgccgcggccctcgagcacgacaaagcctacgaccggcagctcgacagcggagacaacccgtacctcaagtacaaccacgccgacgcggagtttcaggagcgccttaaagaagatacgtcttttgggggcaacctcgggcgagcagtcttccaggccaagaagcgggttctcgaacctctcggtctggttgaggaaggcgctgagacggctcctggaaagaaacgtccggtagagcagtcgccacaagggccagactcctcctcgggcatcggcaagacaggccagcagcccgctaaaaagagactcaattttggtcagactggcgactcagagtcagtccccgatccacaacctctcggagaacctccagcaacccccgctgctgtgggacctactacaatggcttcaggcggtggcgcaccaatggcagacaataacgaaggcgccgacggagtgggtaatgcctcaggaaattggcattgcgattccacatggctgggcgacagagtcatcaccaccagcacccgcacctgggccttgcccacctacaataaccacctctacaagcaaatctccagtgcttcaacgggggccagcaacgacaaccactacttcggctacagcaccccctgggggtattttgatttcaacagattccactgccacttttcaccacgtgactggcagcgactcatcaacaacaattggggattccggcccaagagactcaacttcaaactcttcaacatccaagtcaaggaggtcacgacgaatgatggcgtcacaaccatcgctaataaccttaccagcacggttcaagtcttctcggactcggagtaccagcttccgtacgtcctcggctctgcgcaccagggctgcctccctccgttcccggcggacgtgttcatgattccgcaatacggctacctgacgctcaacaatggcagccaagccgtgggacgttcatccttttactgcctggaatatttcccttctcagatgctgagaacgggcaacaactttaccttcagctacacctttgaggaagtgcctttccacagcagctacgcgcacagccagagcctggaccggctgatgaatcctctcatcgaccaatacctgtattacccgaacagaactcaaaatcagtccggaagtgcccaaaacaaggacttgctgtttagccgtgggtctccagctggcatgtctgttcagcccaaaaactggctacctggaccctgttatcggcagcagcgcgtttctaaaacaaaaacagacaacaacaacagcaattttacctggactggtgcttcaaaatataacctcaatgggcgtgaatccatcatcaaccctggcactgctatggcctcacacaaagacgacgaagacaagttctttcccatgagcggtgtcatgatttttggaaaagagagcgccggagcttcaaacactgcattggacaatgtcatgattacagacgaagaggaaattaaagccactaaccctgtggccaccgaaagatttgggaccgtggcagtcaatttccagagcagcagcacagaccctgcgaccggagatgtgcatgctatgggagcattacctggcatggtgtggcaaggtagagacgtgtacctgcagggtcccatttgggccaaaattcctcacacagatggacactttcacccgtctcctcttatgggcggctttggactcaagaacccgcctcctcagatcctcatcaaaaacacgcctgttcctgcgaatcctccggcggagttttcagctacaaagtttgcttcattcatcacccaatactccacaggacaagtgagtgtggaaattgaatgggagctgcagaaagaaaacagcaagcgctggaatcccgaagtgcagtacacatccaattatgcaaaatctgccaacgttgattttactgtggacaacaatggactttatactgagcctcgccccattggcacccgttaccttacccgtcccctgtaa

SEQ ID NO: 266 - protein, 736 aa, Adeno-associated virus
MAADGYLPDWLEDTLSEGIRQWWKLRPGPPPPKPAERHKDDSRGLVLPGYKYLGPFNGLDKGEPVNEADAAALEHDKAYDRQLDSGDNPYLKYNHADAEFQERLKEDTSFGGNLGRAVFQAKKRVLEPLGLVEEGAKTAPGKKRPVEQSPQGPDSSSGIGKTGQQPAKKRLNFGQTGDSESVPDPQPLGEPPATPAAVGPTTMASGGGAPMADNNEGADGVGNASGNWHCDSTWLGDRVITTSTRTWALPTYNNHLYKQISSASTGASNDNHYFGYSTPWGYFDFNRFHCHFSPRDWQRLINNNWGFRPKRLNFKLFNIQVKEVTTNDGVTTIANNLTSTVQVFSDSEYQLPYVLGSAHQGCLPPFPADVFMIPQYGYLTLNNGSQAVGRSSFYCLEYFPSQMLRTGNNFTFSYTFEEVPFHSSYAHSQSLDRLMNPLIDQYLYYPNRTQNQSGSAQNKDLLFSRGSPAGMSVQPKNWLPGPCYRQQRVSKTKTDNNNSNFTWTGASKYNLNGRESIINPGTAMASHKDDEDKFFPMSGVMIFGKESAGASNTALDNVMITDEEEIKATNPVATERFGTVAVNFQSSSTDPATGDVHAMGALPGMVWQGRDVYLQGPIWAKIPHTDGHFHPSPLMGGFGLKNPPPQILIKNTPVPANPPAEFSATKFASFITQYSTGQVSVEIEWELQKENSKRWNPEVQYTSNYAKSANVDFTVDNNGLYTEPRPIGTRYLTRPL

SEQ ID NO: 267 - protein, 736 aa, Adeno-associated virus
MAADGYLPDWLEDTLSEGIRQWWKLRPGPPPPKPAERHKDDSRGLVLPGYKYLGPFNGLDKGEPVNEADAAALEHDKAYDRQLDSGDNPYLKYNHADAEFQERLKEDTSFGGNLGRAVFQAKKRVLEPLGLVEEGAKTAPGKKRPVEQSPQGPDSSSGIGKTGQQPAKKRLNFGQTGDSESVPDPQPLGEPPATPAAVGPTTMASGGGAPMADNNEGADGVGNASGNWHCDSTWLGDRVITTSTRTWALPTYNNHLYKQISSASTGASNDNHYFGYSTPWGYFDFNRFHCHFSPRDWQRLINNNWGFRPKRLNFKLFNIQVKEVTTNDGVTTIANNLTSTVQVFSDSEYQLPYVLGSAHQGCLPPFPADVFMIPQYGYLTLNNGSQAVGRSSFYCLEYFPSQMLRTGNNFTFSYTFEEVPFHSSYAHSQSLDRLMNPLIDQYLYYLNRTQNQSGSAQNKDLLFSRGSPAGMSVQPKNWLPGPCYRQQRVSKTKTDNNNSNFTWTGASKYNLNGRESIINPGTAMASHKDDEDKFFPMSGVMIFGKESAGASNTALDNVMITDEEEIKATNPVATERFGTVAVNFQSSSTDPATGDVHAMGALPGMVWQGRDVYLQGPIWAKIPHTDGHFHPSPLMGGFGLKNPPPQILIKNTPVPANPPAEFSATKFASFITQYSTGQVSVEIEWELQKENSKRWNPEVQYTSNYAKSANVDFTVDNNGLYTEPRPIGTRYLTRPL

SEQ ID NO: 268 - protein, 736 aa, Adeno-associated virus
MAADGYLPDWLEDTLSEGIRQWWKLRPGPPPPKPAERHKDDSRGLVLPGYKYLGPFNGLDKGEPVNEADAAALEHDKAYDRQLDSGDNPYLKYNHADAEFQERLKEDTSFGGNLGRAVFQAKKRVLEPLGLVEEGAKTAPGKKRPVEQSPQGPDSSSGIGKTGQQPAKKRLNFGQTGDSESVPDPQPLGEPPATPAAVGPTTMASGGGAPMADNNEGADGVGNASGNWHCDSTWLGDRVITTSTRTWALPTYNNHLYKQISSASTGASNDNHYFGYSTPWGYFDFNRFHCHFSPRDWQRLINNNWGFRPKRLNFKLFNIQVKEVTTNDGVTTIANNLTSTVQVFSDSEYQLPYVLGSAHQGCLPPFPADVFMIPQYGYLTLNNGSQAVGRSSFYCLEYFPSQMLRTGNNFTFSYTFEEVPFHSSYAHSQSLDRLMNPLIDQYLYYLNRTQNQSGSAQNKDLLFSRGSPAGMSVQPKNWLPGPCYRQQRVSKTKTDNNNSNFTWTGASKYNLNGRESIINPGTAMASHKDDEDKFFPMSGVMIFGKESAGASNTALDNVMITDEEEIKATNPVATERFGTVAVNFQSSSTDPATGDVHAMGALPGMVWQDRDVYLQGPIWAKIPHTDGHFHPSPLMGGFGLKNPPPQILIKNTPVPANPPAEFSATKFASFITQYSTGQVSVEIEWELQKENSKRWNPEVQYTSNYAKSANVDFTVDNNGLYTEPRPIGTRYLTRPL

SEQ ID NO: 269 - DNA, 2208 bp, Adeno-associated virus
  source 1..2208: mol_type = genomic DNA
atggctgccgatggctatcttccagattggctcgaggacactctctctgaaggaataagacagtggtggaagctcaaacctggcccaccaccaccaaagcccgcagagcggcatagggacgacagcaggggtcttgtgcttcctgggtacaagtacctcggacccttcaacggactcgacaagggagagccggtcaacgaggcagacgccgcggccctcgagcacgacaaagcctacgaccggcagctcgacagcggagacaacccgtacctcaagtacaaccacgccgacgcggagtttcaggagcgccttaaagaagatacgtcttttgggggcaacctcggacgagcagtcttccaggcgaaaaagagggttcttgaacctctgggcctggttgaggaacctgttaagacggctccgggaaaaaagaggccggtagagcactctcctgtggagccagactcctcctcgggaaccggaaaggcgggccagcagcctgcaagaaaaagattgaattttggtcagactggagacgcagactcagtacctgacccccagcctctcggacagccaccagcagccccctctggtctgggaactaatacgatggctacaggcagtggcgcaccaatggcagacaataacgagggcgccgacggagtgggtaattcctcgggaaattggcattgcgattccacatggatgggcgacagagtcatcaccaccagcacccgaacctgggccctgcccacctacaacaaccacctctacaaacaaatttccagccaatcaggagcctcgaacgacaatcactactttggctacagcaccccttgggggtattttgacttcaacagattccactgccacttttcaccacgtgactggcaaagactcatcaacaacaactggggattccgacccaagagactcaacttcaagctctttaacattcaagtcaaagaggtcacgcagaatgacggtacgacgacgattgccaataaccttaccagcacggttcaggtgtttactgactcggggtaccagctcccgtacgtcctcggctcggcgcatcaaggatgcctcccgccgttcccagcagacgtcttcatggtgccacagtatggataccccaccctgaacaacgggagtcaggcagtaggacgctcttcattttactgcctggagtactttccttctcagatgctgcgtaccggaaacaactttaccttcagctacacttttgaggacgttcctttccacagcagctacgctcacagccagagtctggaccgtctcatgaatcctctcatcgaccagtacctgtattacttgagcacaacaaacactccaagtggaaccaccacgcagtcaaggcttcagttttctcaggccggagcgagtgacattcgggaccagtctaggaactggcttcctggaccctgttaccgccagcagcgagtatcaaagacatctgcggataacaacaacagtgaatactcgtggactggagctaccaagtaccacctcaatggcagagactctctggtgaatccgggcccggccgtggcaagccacaaggacgatgaagaaaagttttttcctcagagcggggttctcatctttgggaagcaaggctcagagaaaacaaatgtggacattgaaaaggtcatgattacagacgaagaggaaatcaggacaaccaatcccgtggctacggagcagtatggttctgtatctaccaacctccagagaggcaacagacaagcagctaccgcagatgtcaacacacaaggcgttcttccaggcatggtctggcaggacagagatgtgtaccttcaggggcccatctgggcaaagattccacacacggacggacattttcacccctctcccctcatgggtggattcggacttaaacaccctcctccacagattctcatcaagaacaccccggtacctgcgaatccttcgaccaccttcagtgcggcaaagtttgcttccttcatcacacagtactccacgggacaggtcagcgtggagatcgagtgggagctgcagaaggaaaacagcaaacgctggaatcccgaaattcagtacacttccaactacaacaagtctgttaatgtggactttactgtggacactaatggcgtgtattcagagcctcgccccattggcaccagatacctgactcgtaatctgtaa

SEQ ID NO: 270 - protein, 735 aa, Adeno-associated virus
MAADGYLPDWLEDTLSEGIRQWWKLKPGPPPPKPAERHRDDSRGLVLPGYKYLGPFNGLDKGEPVNEADAAALEHDKAYDRQLDSGDNPYLKYNHADAEFQERLKEDTSFGGNLGRAVFQAKKRVLEPLGLVEEPVKTAPGKKRPVEHSPVEPDSSSGTGKAGQQPARKRLNFGQTGDADSVPDPQPLGQPPAAPSGLGTNTMATGSGAPMADNNEGADGVGNSSGNWHCDSTWMGDRVITTSTRTWALPTYNNHLYKQISSQSGASNDNHYFGYSTPWGYFDFNRFHCHFSPRDWQRLINNNWGFRPKRLNFKLFNIQVKEVTQNDGTTTIANNLTSTVQVFTDSGYQLPYVLGSAHQGCLPPFPADVFMVPQYGYPTLNNGSQAVGRSSFYCLEYFPSQMLRTGNNFTFSYTFEDVPFHSSYAHSQSLDRLMNPLIDQYLYYLSTTNTPSGTTTQSRLQFSQAGASDIRDQSRNWLPGPCYRQQRVSKTSADNNNSEYSWTGATKYHLNGRDSLVNPGPAVASHKDDEEKFFPQSGVLIFGKQGSEKTNVDIEKVMITDEEEIRTTNPVATEQYGSVSTNLQRGNRQAATADVNTQGVLPGMVWQDRDVYLQGPIWAKIPHTDGHFHPSPLMGGFGLKHPPPQILIKNTPVPANPSTTFSAAKFASFITQYSTGQVSVEIEWELQKENSKRWNPEIQYTSNYNKSVNVDFTVDTNGVYSEPRPIGTRYLTRNL

SEQ ID NO: 271 - DNA, 2211 bp, Adeno-associated virus
  source 1..2211: mol_type = genomic DNA
atggctgccgacggttatcttccagattggctcgaggacactctctctgaaggaataagacagtggtggaagctcaaacctggcccaccaccaccaaagcccgcagagcggcataaggacgacagcaggggtcttgtgcttcctgggtacaagtacctcggacccttcaacggactcgacaagggagagccggtcaacgaggcagacgccgcggccctcgagcacgacaaagcctacgaccggcagctcgacagcggagacaacccgtacctcaagtacaaccacgccgacgcggagtttcaggagcgccttaaagaagatacgtcttttgggggcaacctcgggcgggcagtcttccaggccaagaagcgggttctcgaacctctcggtctggttgaggaaggcgctaagacggctcctggaaagaaacgtccggtagagcagtcgccacaagagccagactccccctcgggcatcggcaagacaggccagcagcccgctaaaaagagactcaattttggtcagactggcgactcagagtcagtccccgatccacaacctctcggagaacctccagcaacccccgctgctgtgggacctactacaatggcttcaggcggtggcgcaccaatggcagacaataacgaaggcgccgacggagtgggtaatgcctcaggaaattggcactgcgattccacatggctgggcgacagagtcatcaccaccagcacccgcacctgggccttgcccacctacaataaccacctctacaagcaaatctccagtgcttcaacgggggccagcaacgacaaccactacttcggctacagcaccccctgggggtattttgatttcaacagattccactgccacttttcaccacgtgactggcagcgactcatcaacaacaattggggattccggcccaagagactcaacttcaaactcttcaacatccaagtcaaggaggtcacgacgaatgatggcgtcacaaccatcgctaataaccttaccagcacggttcaagtcttctcggactcggagtaccagcttccgtacgtcctcggctctgcgcaccagggccgcctccctccgttcccggcggacgtgttcatgattccgcaatacggctacctgacgctcaacaatggcagccaagccgtgggacgttcatcctcttactgcctggaatatttcccttctcagatgctgagaacgggcaacaactttaccttcagctacacctttgaggaagtgcctctccacagcagctgcgcgcacagccagagcctggaccggctgatgaatcctctcatcgaccaatacctgtattacctgaacagaactcaaaatcagtccggaagtgcccaaaacagggacttgctgttcagccgtgggtctccagctggcatgtctgttcagcccaaaaactggctacctggaccctgttatcggcagcagcgcgtttctaaaacaaaaacagacaacaacaacagcaattttacctggactggtgcttcaaaatataacctcaatgggcgtgaatccatcatcaaccctggcactgctatggcctcacacaaagacgacgaagacaagttctttcccatgagcggtgtcatgatttttggaaaagagagcgccggagcttcaaacactgcattggacaatgtcatgattacagacgaagaggaaattaaagccactaaccctgtggccaccgaaagatttgggaccgtggcagtcaatttccagagcagcagcacagaccctgcgaccggagatgtgcatgctatgggagcattacctggcatggtgtggcaagatagagacgtgtacctgcagggtcccatttgggccaaaattcctcacacagatggacactttcacccgtctcctcttatgggcggctttggactcaagaacccgcctcctcagatcctcatcaaaaacacgcctgttcctgcgaatcctccggcggagttttcagctacaaagtttgcttcattcatcacccaatactccgcaggacaagtgagtgtggaaattgaatgggagctgcagaaagaaaacagcaagcgctggaatcccgaagtgcagtacacatccaattatgcaaaatctgccaacgttgattttactgtggacaacaatggactttatactgagcctcgccccattggcacccgttaccttacccgtcccctgtaa

SEQ ID NO: 272 - protein, 736 aa, Adeno-associated virus
MAADGYLPDWLEDTLSEGIRQWWKLKPGPPPPKPAERHKDDSRGLVLPGYKYLGPFNGLDKGEPVNEADAAALEHDKAYDRQLDSGDNPYLKYNHADAEFQERLKEDTSFGGNLGRAVFQAKKRVLEPLGLVEEGAKTAPGKKRPVEQSPQEPDSPSGIGKTGQQPAKKRLNFGQTGDSESVPDPQPLGEPPATPAAVGPTTMASGGGAPMADNNEGADGVGNASGNWHCDSTWLGDRVITTSTRTWALPTYNNHLYKQISSASTGASNDNHYFGYSTPWGYFDFNRFHCHFSPRDWQRLINNNWGFRPKRLNFKLFNIQVKEVTTNDGVTTIANNLTSTVQVFSDSEYQLPYVLGSAHQGRLPPFPADVFMIPQYGYLTLNNGSQAVGRSSSYCLEYFPSQMLRTGNNFTFSYTFEEVPLHSSCAHSQSLDRLMNPLIDQYLYYLNRTQNQSGSAQNRDLLFSRGSPAGMSVQPKNWLPGPCYRQQRVSKTKTDNNNSNFTWTGASKYNLNGRESIINPGTAMASHKDDEDKFFPMSGVMIFGKESAGASNTALDNVMITDEEEIKATNPVATERFGTVAVNFQSSSTDPATGDVHAMGALPGMVWQDRDVYLQGPIWAKIPHTDGHFHPSPLMGGFGLKNPPPQILIKNTPVPANPPAEFSATKFASFITQYSAGQVSVEIEWELQKENSKRWNPEVQYTSNYAKSANVDFTVDNNGLYTEPRPIGTRYLTRPL

SEQ ID NO: 273 - protein, 736 aa, Adeno-associated virus
MAADGYLPDWLEDTLSEGIRQWWKLKPGPPPPKPAERHKDDSRGLVLPGYKYLGPFNGLDKGEPVNEADAAALEHDKAYDRQLDSGDNPYLKYNHADAEFQERLKEDTSFGGNLGRAVFQAKKRVLEPLGLVEEGAKTAPGKKRPVEQSPQEPDSSSGIGKTGQQPAKKRLNFGQTGDSESVPDPQPLGEPPATPAAVGPTTMASGGGAPMADNNEGADGVGNASGNWHCDSTWLGDRVITTSTRTWALPTYNNHLYKQISSASTGASNDNHYFGYSTPWGYFDFNRFHCHFSPRDWQRLINNNWGFRPKRLNFKLFNIQVKEVTTNDGVTTIANNLTSTVQVFSDSEYQLPYVLGSAHQGCLPPFPADVFMIPQYGYLTLNNGSQAVGRSSFYCLEYFPSQMLRTGNNFTFSYTFEEVPLHSSCAHSQSLDRLMNPLIDQYLYYLNRTQNQSGSAQNRDLLFSRGSPAGMSVQPKNWLPGPCYRQQRVSKTKTDNNNSNFTWTGASKYNLNGRESIINPGTAMASHKDDEDKFFPMSGVMIFGKESAGASNTALDNVMITDEEEIKATNPVATERFGTVAVNFQSSSTDPATGDVHAMGALPGMVWQDRDVYLQGPIWAKIPHTDGHFHPSPLMGGFGLKNPPPQILIKNTPVPANPPAEFSATKFASFITQYSTGQVSVEIEWELQKENSKRWNPEVQYTSNYAKSANVDFTVDNNGLYTEPRPIGTRYLTRPL

SEQ ID NO: 274 - DNA, 2208 bp, Adeno-associated virus
  source 1..2208: mol_type = genomic DNA
atggctgccgatggctatcttccagattggctcgaggacactctctctgaaggaataagacagtggtggaagctcaaacctggcccaccaccaccaaagcccgcagagcggcatagggacgacagcaggggtcttgtgcttcctgggtacaagtacctcggacccttcaacggactcgacaagggagagccggtcaacgaggcagacgccgcggccctcgagcacgacaaagcctacgaccggcagctcgacagcggagacaacccgtacctcaagtacaaccacgccgacgcggagtttcaggagcgccttaaagaagatacgtcttttgggggcaacctcggacgagcagtcttccaggcgaaaaagagggttcttgaacctctgggcctggttggggaacctgttaagacggctccgggaaaaaagaggccggtagagcactctcctgtggagccagactcctcctcgggaaccggaaaggcgggccagcagcctgcaagaaaaagattgaattttggtcagactggagacgcagactcagtacctgacccccagcctctcggacagccaccagcagccccctctggtctgggaactaatacgatggctacaggcagtggcgcaccaatggcagacaataacgagggcgccgacggagtgggtaattcctcgggaaattggcattgcgattccacatggatgggcgacagagtcatcaccaccagcacccgaacctgggccctgcccacctacaacaaccacctctacaaacaaatttccagccaatcaggagcctcgaacgacagtcactactttggctacagcaccccttgggggtattttgacttcaacagattccactgccacttttcaccacgtgactggcaaagactcatcaacaacaactggggattccgacccaagagactcaacttcaagctctttaacattcaagtcaaagaggtcacgcagaatgacggtacgacgacgattgccaataaccttaccagcacggttcaggtgtttactgactcggagtaccagctcccgtacgtcctcggctcggcgcatcaaggatgcctcccgccgttcccagcagacgtcttcatggtgccacagtatggatacctcaccctgaacaacgggagtcaggcagtaggacgctcttcattttactgcctggagtactttccttctcagatgctgcgtaccggaaacaactttaccttcagctacacttttgaggacgttcctttccacagcagctacgctcacagccagagtctggaccgtctcatgaatcctctcatcgaccagtacctgtattacttgagcacaacaaacactccaagtggaaccaccacgcagtcaaggctccagttttctcaggccggagcgagtgacattcgggaccagtctaggaactggcttcctggaccctgttaccgccagcagcgagtatcaaagacatctgcggataacaacaacagtgaatactcgtggactggagctaccaagtaccacctcaatggcagagactctctggtgaatccgggcccggccatggcaagccacaaggacaatgaagaaaagttttttcctcagagcggggttctcatctttgggaagcaaggctcagagaaaacaaatgtggacattgaaaaggtcatgattacagacgaagaggaaatcaggacaaccaatcccgtggctacggagcagtatggttctgtatctaccaacctccagagaggcaacagacaagcagctaccgcagatgtcaacacacaaggcgttcttccaggcatggtctggcaggacagagatgtgtaccttcaggggcccatctgggcaaagattccacacacggacggacattttcacccctctcccctcatgggtggattcggacttaaacaccctcctccacagattctcatcaagaacaccccggtacctgcgaatccttcgaccaccttcagtgcggcaaagtttgcttccttcatcacacagtactccacgggacaggtcagcgtggagatcgagtgggagctgcagaaggaaaacagcaaacgctggaatcccgaaattcagtacacttccaactacaacaagtctgttaatgtggactttactgtggacactaatggcgtgtattcagagcctcgccccattggcaccagatacctgactcgtaatctgtaa

SEQ ID NO: 275 - protein, 735 aa, Adeno-associated virus
MAADGYLPDWLEDTLSEGIRQWWKLKPGPPPPKPAERHRDDSRGLVLPGYKYLGPFNGLDKGEPVNEADAAALEHDKAYDRQLDSGDNPYLKYNHADAEFQERLKEDTSFGGNLGRAVFQAKKRVLEPLGLVGEPVKTAPGKKRPVEHSPVEPDSSSGTGKAGQQPARKRLNFGQTGDADSVPDPQPLGQPPAAPSGLGTNTMATGSGAPMADNNEGADGVGNSSGNWHCDSTWMGDRVITTSTRTWALPTYNNHLYKQISSQSGASNDSHYFGYSTPWGYFDFNRFHCHFSPRDWQRLINNNWGFRPKRLNFKLFNIQVKEVTQNDGTTTIANNLTSTVQVFTDSEYQLPYVLGSAHQGCLPPFPADVFMVPQYGYLTLNNGSQAVGRSSFYCLEYFPSQMLRTGNNFTFSYTFEDVPFHSSYAHSQSLDRLMNPLIDQYLYYLSTTNTPSGTTTQSRLQFSQAGASDIRDQSRNWLPGPCYRQQRVSKTSADNNNSEYSWTGATKYHLNGRDSLVNPGPAMASHKDNEEKFFPQSGVLIFGKQGSEKTNVDIEKVMITDEEEIRTTNPVATEQYGSVSTNLQRGNRQAATADVNTQGVLPGMVWQDRDVYLQGPIWAKIPHTDGHFHPSPLMGGFGLKHPPPQILIKNTPVPANPSTTFSAAKFASFITQYSTGQVSVEIEWELQKENSKRWNPEIQYTSNYNKSVNVDFTVDTNGVYSEPRPIGTRYLTRNL

SEQ ID NO: 276 - protein, 737 aa, Adeno-associated virus
RMAADGYLPDWLEDNLSEGIREWWDLKPGAPKPKANQQKQDDGRGLVLPGYKYLGPFNGLDKGEPVNAADAAALEHDKAYDQQLKAGDNPYLRYNHADAEFQERLQEDTSFGGNLGRAVFQAKKRVLEPLGLVEEGAKTAPGKKRPVEQSPQEPDSSSGIGKTGQQPAKKRLNFGQTGDSESVPDPQPLGEPPATPAAVGPTTMASGGGAPMADNNEGADGVGNASGNWHCDSTWLGDRVITTSTRTWALPTYNNHLYKQISSTSTGASNDNHYFGYGTPWGYFDFNRFHCHFSPRDWQRLINNNWGFRPKRLNFKLFNIQVEEVTTNDGVTTIANNLTSTVQVFSDSEYQLPYVLGSAHQGCLPPFPADVFMIPQYGYLTLNNGSQAVGRSSFYCLEYFPSQMLRTGNNFTFSYTFEEVPFHSSYAHSQSLDRLMNPLIDQYLYYLNRTQNQSGSAQNKDLLFSRGSPAGMSVQPKNWLPGPCYRQQRVSKTKTDNNNSNFTWTGASKYNLNGRESIINPGTAVASHKDDEDKFFPMSGVMIFGKESAGASSTALDNVMITDEEEIKATNPVATERFGTVAVNFQSSSTDPATGDVHAMGALPGMVWQDRDVYLQGPIWAKIPHTDGHFHPSPLMGGFGLKNPPPQILIKNTPVPANPPAEFSATKFASFITQYSTGQVSVEIEWELQKENSKRWNPEVQYTSNYAKSANVDFTVDNNGLYTEPRPIGTRYLTRPL

SEQ ID NO: 277 - protein, 736 aa, Adeno-associated virus
MAADGYLPDWLEDNLSEGIREWWDLKPGAPKPKANQQKQDDGRGLVLPGYKYLGPFNGLDKGEPVNAADAAALEHDKAYDQQLKAGDNPYLRYNHADAEFQERLQEDTSFGGNLGRAVFQAKKRVLEPLGLVEEGAKTAPGKKRPVEQSPQEPDSSSGIGKTGQQPAKKRLNFGQTGDSESVPDPQPLGEPPATPAAVGPTTMASGGGAPMADNNEGADGVGNASGNWHCDSTWLGDRVITTSTRTWALPTYNNHLYKQISSTSTGASNDNHYFGYGTPWGYFDFNRFHCHFSPRDWQRLINNNWGFRPKRLNFKLFNIQVEEVTTNDGVTTIANNLTSTVQVFSDSEYQLPYVLGSAHQGCLPPFPADVFMIPQYGYLTLNNGSQAVGRSSFYCLEYFPSQMLRTGNNFTFSYTFEEVPFHSSYAHSQSLDRLMNPLIDQYLYYLNRTQNQSGSAQNKDLLFSRGSPAGMSVQPKNWLPGPCYRQQRVSKTKTDNNNSNFTWTGASKYNLNGRESIINPGTAVASHKDDEDKFFPMSGVMIFGKESAGASSTALDNVMITDEEEIKATNPVATERFGTVAVNFQSSSTDPATGDVHAMGALPGMVWQDRDVYLQGPIWAKIPHTDGHFHPSPLMGGFGLKNPPPQILIKNTPVPANPPAEFSATKFASFITQYSTGQVSVEIEWELQKENSKRWNPEVQYTSNYAKSANVDFTVDNNGLYTEPRPIGTRYLTRPL

SEQ ID NO: 278 - DNA, 2211 bp, Adeno-associated virus
  source 1..2211: mol_type = genomic DNA
atggctgccgatggttatcttccagattggctcgaggacaacctctctgagggcattcgcgagtggtgggacttgaaacctggagccccgaagcccaaagccaaccagcaaaagcaggacgacggccggggtctggtgcttcctggctacaagtacctcggacccttcaacggactcgacaagggggagcccgtcaacgcggcggacgcagcggccctcgagcacgacaaggcctacgaccagcagctcaaagcgggtgacaatccgtacctgcggtataaccacgccgacgccgagtttcaggagcgtctgcaagaagatacgtcttttgggggcaacctcgggcgagcagtcttccaggccaagaagcgggttctcgaacctctcggtctggttgaggaaggcgctaagacggctcctggaaagaaacgtccggtagagcagtcgccacaagagccagactcctcctcgggcatcggcaagacaggccagcagcccgctaaaaagagactcaattttggccagactggcgactcagagtcagtccccgatccacaacctctcggagaacctccagcaacccccgctgctgtgggacctactacaatggcttcaggcggtggcgcaccaatggcagacaataacgaaggcgccgacggagtgggtaatgcctcaggaaattggcattgcgattccacatggctgggcgacagagtcatcaccaccagcacccgcacctgggccttgcccacctacaataaccacctctacaagcaaatctccagtacttcaacgggggccagcaacgacaaccactacttcggctacggcaccccctgggggtattttgatttcaacagattccactgccacttttcaccacgtgactggcagcgactcatcaacaacaattggggattccggcccaagagactcaacttcaaactcttcaacatccaagtcgaggaggtcacgacgaatgatggcgtcacaaccatcgctaataaccttaccagcacggttcaagtcttctcggactcggagtaccagcttccgtacgtcctcggctctgcgcaccagggctgcctccctccgttcccggcggacgtgttcatgattccgcaatacggctacctgacgctcaacaatggcagccaagccgtgggacgttcatccttttactgcctggaatatttcccttctcagatgctgagaacgggcaacaactttaccttcagctacacctttgaggaagtgcctttccacagcagctacgcgcacagccagagcctggaccggctgatgaatcctctcatcgaccaatacctgtattacctgaacagaacacaaaatcagtccggaagtgcccaaaacaaggacttgctgtttagccgtgggtctccagctggcatgtctgttcagcccaaaaactggctacctggaccctgttatcggcagcagcgcgtttctaaaacaaaaacagacaacaacaacagcaattttacctggactggtgcttcaaaatataacctcaatgggcgtgaatccatcatcaaccctggcaccgctgtggcctcacacaaagacgacgaagacaagttctttcccatgagcggtgtcatgatttttggaaaagagagcgccggagcttcaagcactgcattggacaatgtcatgattacagacgaagaggaaattaaagccactaaccctgtggccaccgaaagatttgggaccgtggcagtcaatttccagagcagcagcacagaccctgcgaccggagatgtgcatgctatgggagcattacctggcatggtgtggcaagatagagacgtgtacctgcagggtcccatttgggccaaaattcctcacacagatggacactttcacccgtctcctcttatgggcggctttggactcaagaacccgcctcctcagatcctcatcaaaaacacgcctgttcctgcgaatcctccggcggagttttcagctacaaagtttgcttcattcatcacccaatactccacaggacaagtgagtgtggaaattgaatgggagctgcagaaagaaaacagcaagcgctggaatcccgaagtgcagtacacatccaattatgcaaaatctgccaacgttgattttactgtggacaacaatggactttatactgagcctcgccccattggcacccgttaccttacccgtcccctgtaa

SEQ ID NO: 279 - protein, 737 aa, Adeno-associated virus
RMAADGYLPDWLEDNLSEGIREWWDLKPGAPKPKANQQKQDDGRGLVLPGYKYLGPFNGLDKGEPVNAADAAALEHDKAYDQQLKAGDNPYLRYNHADAEFQERLQEDTSFGGNLGRAVFQAKKRVLEPLGLVEEGAKTAPGKKRPVEQSPQEPDSSSGIGKTGQQPAKKRLNFGQTGDSESVPDPQPLGEPPATPAAVGPTTMASGGGAPMADNNEGADGVGNASGNWHCDSTWLGDRVITTSTRTWALPTYNNHLYKQISSTSTGASNDNHYFGYSTPWGYFDFNRFHCHFSPRDWQRLINNNWGFRPKRLNFKLFNIQVEEVTTNDGVTTIANNLTSTVQVFSDSEYQLPYVLGSAHQGCLPPFPADVFMIPQYGYLTLNNGSQAVGRSSFYCLEYFPSQMLRTGNNFTFSYTFEEVPFHSSYAHSQSLDRLMNPLIDQYLYYLNRTQNQSGSAQNKDLLFSRGSPAGMSVQPKNWLPGPCYRQQRVSKTKTDNNNSNFTWTGASKYNLNGRESIINPGTAVASHKDDEDKFFPMSGVMIFGKESAGASSTALDNVMITDEEEIKATNPVATERFGTVAVNFQSSSTDPATGDVHAMGALPGMVWQDRDVYLQGPIWAKIPHTDGHFHPSPLMGGFGLKNPPPQILIKNTPVPANPPAEFSATKFASFITQYSTGQVSVEIEWELQKENSKRWNPEVQYTSNYAKSANVDFTVDNNGLYTEPRPIGTRYLTRPL

SEQ ID NO: 280 - protein, 737 aa, Adeno-associated virus
RMAADGYLPDWLEDNLSEGIREWWDLKPGAPKPKANQQKQDDGRGLVLPGYKYLGPFNGLDKGEPVNAADAAALEHDKAYDQQLKAGDNPYLRYNHADAEFQERLQEDTSFGGNLGRAVFQAKKRVLEPLGLVEEGAKTAPGKKRPVEQSPQEPDSSSGIGKTGQQPAKKRLNFGQTGDSESVPDPQPLGEPPATPAAVGPTTMASGGGAPMADNNEGADGVGNASGNWHCDSTWLGDRVITTSTRTWALPTYNNHLYKQISSTSTGASNDNHYFGYSTPWGYFDFNRFHCHFSPRDWQRLINNNWGFRPKRLNFKLFNIQVKEVTTNDGVTTIANNLTSTVQVFSDSEYQLPYVLGSAHQGCLPPFPADVFMIPQYGYLTLNNGSQAVGRSSFYCLEYFPSQMLRTGNNFTFSYTFEEVPFHSSYAHSQSLDRLMNPLIDQYLYYLNRTQNQSGSAQNKDLLFSRGSPAGMSVQPKNWLPGPCYRQQRVSKTKTDNNNSNFTWTGASKYNLNGRESIINPGTAVASHKDDEDKFFPMSGVMIFGKESAGASSTALDNVMITDEEEIKATNPVATERFGTVAVNFQSSSTDPATGDVHAMGALPGMVWQDRDVYLQGPIWAKIPHTDGHFHPSPLMGGFGLKNPPPQILIKNTPVPANPPAEFSATKFASFITQYSTGQVSVEIEWELQKENSKRWNPEVQYTSNYAKSANVDFTVDNNGLYTEPRPIGTRYLTRPL

SEQ ID NO: 281 - protein, 737 aa, Adeno-associated virus
RMAADGYLPDWLEDNLSEGIREWWDLKPGAPKPKANQQKQDDGRGLVLPGYKYLGPFNGLDKGEPVNAADAAALEHDKAYDQQLKAGDNPYLRYNHADAEFQERLQEDTSFGGNLGRAVFQAKKRVLEPLGLVEEGAKTAPGKKRPVEQSPQEPDSSSGIGKTGQQPAKKRLNFGQTGDSESVPDPQPLGEPPATPAAVGPTTMASGGGAPMADNNEGADGVGNASGNWHCDSTWLGDRVITTSTRTWALPTYNNHLYKQISSTSTGASNDNHYFGYSTPWGYFDFNRFHCHFSPRDWQRLINNNWGFRPKRLNFKLFNIQVKEVTTNDGVTTIANNLTSTVQVFSDSEYQLPYVLGSAHQGCLPPFPADVFMIPQYGYLTLNNGSQAVGRSSFYCLEYFPSQMLRTGNNFTFSYTFEEVPFHSSYAHSQSLDRLMNPLIDQYLYYLNRTQNQSGSAQNKDLLFSRGSPAGMSVQPKNWLPGPCYRQQRVSKTKTDNNNSNFTWTGASKYNLNGRESIINPGTAVASHKDDEDKFFPMSGVMIFGKESAGANSTALDNVMITDEEEIKATNPVATERFGTVAVNFQSSSTDPATGDVHAMGALPGMVWQDRDVYLQGPIWAKIPHTDGHFHPSPLMGGFGLKNPPPQILIKNTPVPANPPAEFSATKFASFITQYSTGQVSVEIEWELQKENSKRWNPEVQYTSNYAKSANVDFTVDNNGLYTEPRPIGTRYLTRPL

SEQ ID NO: 282 - DNA, 2208 bp, Adeno-associated virus
  source 1..2208: mol_type = genomic DNA
atggctgccgatggttatcttccagattggctcaaggacactctctctgaaggaataagacagtggtggaagctcaaacctggcccaccaccaccaaagcccgcagagcggcataaggacgacagcgggggtcttgtgcttcctgggtacaagtacctcggacccttcaacggactcgacaagggagagccggtcaacgaggcagacgccgcggccctcgagtacgacaaggcctacgaccggcagctcgacagcggagacaacccgtacctcaagtacaaccacgccgacgcggagtttcaggagcgccttaaagaagatacgtcttttgggggcaacctcggacgagcagtcttccaggcgaaaaagagggttcttgaacctctgggcctggttgaggaacctgttaagacggctccgggaaaaaagaggccggtagagcactctcctgtggagccagactcctcctcgggaacaggaaaagcgggccagcagcctgcgagaaagagattgaattttggtcagactggagacgcagactccgtacctgacccccagcctctcggacagccaccagcagccccctctggtctgggaactaatacgatggctacaggcagtggcgcaccaatggcagacaataacgagggcgccgacggagtgggtaattcctcgggaagttggcattgcgattccacatggatgggcgacagagtcatcaccaccagcacccgaacctgggctctgcccacctacaacaaccatctgtacaagcagatctccagccaatcaggagccagcaacgacaaccactactttggctacagcaccccttgggggtattttgacttcaacagattccactgccacttttcaccacgtgactggcaaagactcatcaacaacaactggggattccggcccaagagactcaacttcaagctctttaacattcaagtcaaggaggtcacgcagaatgacggtacgacgacgattgccaataaccttaccagcacggttcaggtgtttactgactcggagtaccagctcccgtacgtccccggctcggcgcatcaaggatgcctcccgccgttcccagcagacgtcttcatggtgccacagtatggatacctcaccctgaacaacgggagtcaggcagtaggacgctcttcattttactgcctggagtactttccttctcagatgcttcgtaccggaaacaactttaccttcagctacacctttgaggatgttcctttccacagcagctacgctcacagccagagtttggaccgtctcatgaatcctctcatcgaccagtacctgtattacttgagcagaacaaacactccaagcggaaccaccacgcagtccaggcttcagttttctcaggccggagcaagtgacattcgggaccagtctaggaactggcttcctggaccctgttaccgccagcagcgagtatcaaagacagctgcggacaacaacaacagtgaatactcgtggactggagctaccaagtaccacctcaatggcagagactctctggtgaatccgggcccggccatggccagccacaaggacgatgaagaaaagttttttcctcaaagcggggttctcatctttgggaagcaaggctcagagaaaacaaatgtggacattgaaaaggtcatgattacagacgaagaggaaatcagaaccaccaatcccgtggccacggagcagtatggttctgtatctaccaacctccagagcggcaacacacaagcagctactgcagatgtcaacacacaaggcgttcttccaggcatggtctggcaggacagagacgtgcacctgcaggggcctatctgggcaaagattccacacacggacggacattttcacccctctcccctcatgggcggatttggacttaaacaccctcctccacagattctcatcaagaacaccccggtacctgcaaatccttcgaccaccttcagtgcggcaaagtttgcttccttcatcacacagtattccacagggcaggtcagcgtggagatcgagtgggagctgcagaaggagaacagcaaacgctggaaccccgagatccagtacacttccaactacaacaaatctgttaatgtggactttactgtggacactaatggtgtgtattcagagcctcgccccattggcaccagatacctgactcgtaatctgtaa

SEQ ID NO: 283 - protein, 735 aa, Adeno-associated virus
MAADGYLPDWLKDTLSEGIRQWWKLKPGPPPPKPAERHKDDSGGLVLPGYKYLGPFNGLDKGEPVNEADAAALEYDKAYDRQLDSGDNPYLKYNHADAEFQERLKEDTSFGGNLGRAVFQAKKRVLEPLGLVEEPVKTAPGKKRPVEHSPVEPDSSSGTGKAGQQPARKRLNFGQTGDADSVPDPQPLGQPPAAPSGLGTNTMATGSGAPMADNNEGADGVGNSSGSWHCDSTWMGDRVITTSTRTWALPTYNNHLYKQISSQSGASNDNHYFGYSTPWGYFDFNRFHCHFSPRDWQRLINNNWGFRPKRLNFKLFNIQVKEVTQNDGTTTIANNLTSTVQVFTDSEYQLPYVPGSAHQGCLPPFPADVFMVPQYGYLTLNNGSQAVGRSSFYCLEYFPSQMLRTGNNFTFSYTFEDVPFHSSYAHSQSLDRLMNPLIDQYLYYLSRTNTPSGTTTQSRLQFSQAGASDIRDQSRNWLPGPCYRQQRVSKTAADNNNSEYSWTGATKYHLNGRDSLVNPGPAMASHKDDEEKFFPQSGVLIFGKQGSEKTNVDIEKVMITDEEEIRTTNPVATEQYGSVSTNLQSGNTQAATADVNTQGVLPGMVWQDRDVHLQGPIWAKIPHTDGHFHPSPLMGGFGLKHPPPQILIKNTPVPANPSTTFSAAKFASFITQYSTGQVSVEIEWELQKENSKRWNPEIQYTSNYNKSVNVDFTVDTNGVYSEPRPIGTRYLTRNL

SEQ ID NO: 284 - DNA, 2208 bp, Adeno-associated virus
  source 1..2208: mol_type = genomic DNA
atggctgccgatggttatcttccagattggctcgaggacactctctctgaaggaataagacagtggtggaagctcaaacctggcccaccaccaccaaagcccgcagagcggcataaggacgacagcaggggtcttgtgcttcctgggtacaagtacctcggacccttcaacggactcgacaagggggagccggtcaacgaggcagacgccgcggccctcgagcacgacaaggcctacgaccggcagctcgacagcggagacaacccgtacctcaagtacaaccacgccgacgcagagtttcaggagcgccttaaagaagatacgtcttttgggggcaacctcggacgagcagtcttccaggcgaaaaagagggttcttgaacctctgggcctggttgaggaacctgttaagacggctccgggaaaaaagaggccggtagagcactctcctgtggagccagactcctcctcgggaaccggaaaagcgggccagcagcctgcaagaaaaagattaaattttggtcagactggagacgcagactccgtacctgacccccagcctctcggacagccaccagcagccccctctggtctgggatctactacaatggctacaggcagtggcgcaccaatggcagacaataacgagggtgccgatggagtgggtaattcctcaggaaattggcattgcgattcccaatggctgggcgacagagtcatcaccaccagcacccgaacctgggccctgcccacatacaacaaccacctctacaagcaaatctccagccaatcaggagccagcaacgacaaccactactttggctacagcaccccctgggggtattttgacttcaacagattccactgccacttttcaccacgtgactggcaaagactcatcaacaacaactggggattccggcccaaaagactcaacttcaagctctttaatattcaagtcaaagaggtcacgcagaatgacggtacgacgacgattgccaataaccttaccagcacggttcaggtgtttactgactcggagtaccagctcccgtacgtcctgggctcggcgcatcaaggatgcctcccgccgtttccagcggacgtcttcatggtcccacagtatggatacctcaccctgaacaacgggagtcaggcggtaggacgctcttccttttactgcctggagtactttccttctcagatgctgcgtactggaaacaactttcagttcagctacacttttgaagacgtgcctttccacagcagctacgctcacagccagagtctggatcggctgatgaatcctctgatcgaccagtacctgtattatctgaacaagacacaaacaaatagtggaactcttcagcagtctcggctactgtttagccaagctggaccaaccaacatgtctcttcaagctaaaaactggctgcctggaccttgctacagacagcagcgtctgtcaaaacaggcaaacgacaacaacaacagcaactttccctggactgcagctacaaagtatcatctaaatggccgggactcgttggttaatccaggaccagctatggccagtcgcaaggatgacgaagaaaagtttttccccatgcatggaaccctgatatttggtaaacaaggaacaaatgccaacgacgcggatttggaaaatgtcatgattacagatgaagaagaaatcagggccaccaatcccgtggctacggagcagtacgggactgtgtcaaataatttgcaaaactcaaacactggtccaactactggaactgtcaatcaccaaggagcgttacctggtatggtgtggcaggatcgagacgtgtacctgcagggacccatttgggccaagattcctcacaccgatggacactttcatccttctccactgatgggaggttttggactcaaacacccgcctcctcagatcatgatcaaaaacactcccgttccagccaatcctcccacaaacttcagttctgccaagtttgcttctttcatcacacagtattccacgggacaggtcagcgtggagatcgagtgggagctgcagaaggagaacagcaaacgctggaatcccgaaattcagtacacttccaactacaacaagtctgttaatgtggactttactgtggacactaatggtgtgtattcagagcctcgccccattggcaccagatacctgactcgtaatctgtaa

SEQ ID NO: 285 - protein, 735 aa, Adeno-associated virus
MAADGYLPDWLEDTLSEGIRQWWKLKPGPPPPKPAERHKDDSRGLVLPGYKYLGPFNGLDKGEPVNEADAAALEHDKAYDRQLDSGDNPYLKYNHADAEFQERLKEDTSFGGNLGRAVFQAKKRVLEPLGLVEEPVKTAPGKKRPVEHSPVEPDSSSGTGKAGQQPARKRLNFGQTGDADSVPDPQPLGQPPAAPSGLGSTTMATGSGAPMADNNEGADGVGNSSGNWHCDSQWLGDRVITTSTRTWALPTYNNHLYKQISSQSGASNDNHYFGYSTPWGYFDFNRFHCHFSPRDWQRLINNNWGFRPKRLNFKLFNIQVKEVTQNDGTTTIANNLTSTVQVFTDSEYQLPYVLGSAHQGCLPPFPADVFMVPQYGYLTLNNGSQAVGRSSFYCLEYFPSQMLRTGNNFQFSYTFEDVPFHSSYAHSQSLDRLMNPLIDQYLYYLNKTQTNSGTLQQSRLLFSQAGPTNMSLQAKNWLPGPCYRQQRLSKQANDNNNSNFPWTAATKYHLNGRDSLVNPGPAMASRKDDEEKFFPMHGTLIFGKQGTNANDADLENVMITDEEEIRATNPVATEQYGTVSNNLQNSNTGPTTGTVNHQGALPGMVWQDRDVYLQGPIWAKIPHTDGHFHPSPLMGGFGLKHPPPQIMIKNTPVPANPPTNFSSAKFASFITQYSTGQVSVEIEWELQKENSKRWNPEIQYTSNYNKSVNVDFTVDTNGVYSEPRPIGTRYLTRNL

SEQ ID NO: 286 - DNA, 2208 bp, Adeno-associated virus
  source 1..2208: mol_type = genomic DNA
atggctgccgatggttatcttccagattggctcgaggacactctctctgaaggaataagacagtggtggaagctcaaacctggcccaccaccaccaaagcccgcagagcggcataaggacgacagcaggggtcttgtgcttcctgggtacaagtacctcggacccttcaacggactcgacaagggagagccggtcaacgaggcagacgccgcggccctcgagcacgacaaagcctacgaccggcagctcgacagcggagacaacccgtacctcaagtacaaccacgccgacgcggagtttcaggagcgccttaaagaagatacgtcttttgggggcaacctcggacgagcagtcttccaggcgaaaaagagggttcttgaacctctgggcctggttggggaacctgtcaagacggctccaggaaaaaagaggccggtagagcactctcctgtggagccagactcctcctcgggaaccggaaaggcgggccagcagcctgcaagaaaaagattgaattttggtcagactggagacgcagactcagtacctgacccccagcctctcggacagccaccagcagccccctctggtctgggaactaatacgatggctacaggcagtggcgcaccaatggcagacaataacgagggcgccgacggagtgggtaattcctcgggaaattggcattgcgattccacatggatgggcgacagagtcatcaccaccagcacccgaacctgggccctgcccacctacaacaaccacctctacaaacaaatttccagccaatcaggagcctcgaacgacaatcactactttggctacagcaccccttgggggtattttgacttcaacagattccactgccacttttcaccacgtgactggcaaagactcatcaacaacaactggggattccgacccaagagactcaacttcaagctctttaacattcaagtcaaagaggtcacgcagaatgacggtacgacgacgattgccaataaccttaccagcacggttcaggtgtttactgactcggagtaccagctcccgtacgtcctcggctcggcgcatcaaggatgcctcccgccgttcccagcagacgtcttcatggtgccacagtatggatacctcaccctgaacaacgggagtcaggcagtaggacgctcttcattttactgcctggagtactttccttctcagatgctgcgtaccggaaacaactttaccttcagctacacttttgaggacgttcctttccacagcggctacgctcacagccagagtctggaccgtctcatgaatcctctcatcgaccagtacctgtattacttgagcacaacaaacactccaagtggaaccaccacgcagtcaaggcttcagttttctcaggccggagcgagtgacattcgggaccagtctaggaactggcttcctggaccctgttaccgccagcagcgagtatcaaagacatctgcggataacaacaacagtgaatactcgtggactggagctaccaagtaccacctcaatggcagagactctctggtgaatccgggcccggccatggcaagccacaaggacaatgaagaaaagttttttcctcagagcggggttctcatctttgggaagcaaggctcagagaaaacaaatgtggacattgaaaaggtcatgattacagacgaagaggaaatcaggacaaccaatcccgtggctacggagcagtacggttctgtatctaccaacctccagagaggcaacagacaagcagctaccgcagatgtcaacacacaaggcgttcttccaggcatggtctggcaggacagagatgtgtaccttcaggggcccatctgggcaaagattccacacacggacggacattttcacccctctcccctcatgggtggattcggacttaaacaccctcctccacagattctcatcaagaacaccccggtacctgcgaatccttcgaccaccttcagtgcggcaaagtttgcttccttcatcacacagtactccacgggacaggtcagcgtggagatcgagtgggagctgcagaaggaaaacagcaaacgctggaatcccgaaattcagtacacttccaactacaacaagtctgttaatgtggactttactgtggacactaatggcgtgtattcagagcctcgccccattggcaccagatacctgactcgtaatctgtaa

SEQ ID NO: 287 - protein, 735 aa, Adeno-associated virus
MAADGYLPDWLEDTLSEGIRQWWKLKPGPPPPKPAERHKDDSRGLVLPGYKYLGPFNGLDKGEPVNEADAAALEHDKAYDRQLDSGDNPYLKYNHADAEFQERLKEDTSFGGNLGRAVFQAKKRVLEPLGLVGEPVKTAPGKKRPVEHSPVEPDSSSGTGKAGQQPARKRLNFGQTGDADSVPDPQPLGQPPAAPSGLGTNTMATGSGAPMADNNEGADGVGNSSGNWHCDSTWMGDRVITTSTRTWALPTYNNHLYKQISSQSGASNDNHYFGYSTPWGYFDFNRFHCHFSPRDWQRLINNNWGFRPKRLNFKLFNIQVKEVTQNDGTTTIANNLTSTVQVFTDSEYQLPYVLGSAHQGCLPPFPADVFMVPQYGYLTLNNGSQAVGRSSFYCLEYFPSQMLRTGNNFTFSYTFEDVPFHSGYAHSQSLDRLMNPLIDQYLYYLSTTNTPSGTTTQSRLQFSQAGASDIRDQSRNWLPGPCYRQQRVSKTSADNNNSEYSWTGATKYHLNGRDSLVNPGPAMASHKDNEEKFFPQSGVLIFGKQGSEKTNVDIEKVMITDEEEIRTTNPVATEQYGSVSTNLQRGNRQAATADVNTQGVLPGMVWQDRDVYLQGPIWAKIPHTDGHFHPSPLMGGFGLKHPPPQILIKNTPVPANPSTTFSAAKFASFITQYSTGQVSVEIEWELQKENSKRWNPEIQYTSNYNKSVNVDFTVDTNGVYSEPRPIGTRYLTRNL

SEQ ID NO: 288 - DNA, 2208 bp, Adeno-associated virus
  source 1..2208: mol_type = genomic DNA
atggctgccgatggttatcttccagattggctcgaggacactctctctgaaggaataagacagtggtggaagctcaaacctggcccaccaccaccaaagcccgcagagcggcataaggacgacagcaggggtcttgtgcttcctgggtacaagtacctcggacccttcaacggactcgacaagggagagccggtcaacgaggcagacgccgcggccctcgagcacgacaaagcctacgaccggcagctcgacagcggagacaacccgtacctcaagtacaaccacgccgacgcggagtttcaggagcgccttaaagaagatacgtcttttgggggcaacctcggacgagcagtcttccaggcgaaaaagagggttcttgaacctctgggcctggttggggaacctgttaagacggctccgggaaaaaagaggccggtagagcactctcctgtggagccagactcctcctcgggaaccggaaaggcgggccagcagcctgcaagaaaaagattgaattttggtcagactggagacgcagactcagtacctgacccccagcctctcggacagccaccagcagccccctctggtctgggaactaatacgatggctacaggcagtggcgcaccaatggcagacaataacgagggcgccgacggagtgggtaattcctcgggaaatcggcattgcgattccacatggatgggcgacagagtcatcaccaccagcacccgaacctgggccctgcccacctacaacaaccacctctacagacaaatttccagccaatcaggagcctcgaacgacaatcactactttggctacagcaccccttgggggtattttgacttcaacagattccactgccacttttcaccacgtgactggcaaagactcatcaacaacaactggggattccgacccaagagactcaacttcaagctctttaacattcaagtcaaagaggtcacgcagaatgacggtacgacgacgattgccaataaccttaccagcacggttcaggtgtttactgactcggagtaccagctcccgtacgtcctcggctcggcgcatcaaggatgcctcccgccgttcccagcagacgtcttcatggtgccacagtatggatacctcaccctgagcaacgggagtcaggcagtaggacgctcttcattttactgcccggagtactttccttctcagatgctgcgtaccggaaacaactttaccttcagctacacttttgaggacgttcctttccacagcagctacgctcacagccagagtctggaccgtctcatgaatcctctcatcgaccagtacctgtattacttgagcacaacaaacactccaagtggaaccaccacgcagtcaaggcttcagttttctcaggccggagcgagtgacattcgggaccagtctaggaactggcttcctggaccctgttaccgccagcagcgagtatcaaagacatctgcggataacaacaacagtgaatactcgtggactggagctaccaagtaccacctcaatggcagagactctctggtgaatccgggcccggccatggcaagccacaaggacaatgaagaaaagttttttcctcagagcggggttctcatctttgggaagcaaggctcagagaaaacaaatgtggacattgaaaaggtcatgattacagacgaagaggaaatcaggacaaccaatcccgtggctacggagcagtatggttctgtatctaccaacctccagagaggcaacagacaagcagctaccgcagatgtcaacacacaaggcgttcttccaggcatggtctggcaggacagagatgtgtaccttcaggggcccatctgggcaaagattccacacacggacggacattttcacccctctcccctcatgggtggattcggacctaaacaccctcctccacagattctcatcaagaacaccccggtacctgcgaatccttcgaccaccttcagtgcggcaaagtttgcttccttcatcacacagtactccacgggacaggtcagcgtggagatcgagtgggagctgcagaaggaaaacagcaaacgctggaatcccgaaattcagtacacttccaactacaacaagtctgttaatgtggactttactgtggacactaatggcgtgtattcagagcctcgccccattggcaccagatacctgactcgtaatttgtaa

SEQ ID NO: 289 - protein, 735 aa, Adeno-associated virus
MAADGYLPDWLEDTLSEGIRQWWKLKPGPPPPKPAERHKDDSRGLVLPGYKYLGPFNGLDKGEPVNEADAAALEHDKAYDRQLDSGDNPYLKYNHADAEFQERLKEDTSFGGNLGRAVFQAKKRVLEPLGLVGEPVKTAPGKKRPVEHSPVEPDSSSGTGKAGQQPARKRLNFGQTGDADSVPDPQPLGQPPAAPSGLGTNTMATGSGAPMADNNEGADGVGNSSGNRHCDSTWMGDRVITTSTRTWALPTYNNHLYRQISSQSGASNDNHYFGYSTPWGYFDFNRFHCHFSPRDWQRLINNNWGFRPKRLNFKLFNIQVKEVTQNDGTTTIANNLTSTVQVFTDSEYQLPYVLGSAHQGCLPPFPADVFMVPQYGYLTLSNGSQAVGRSSFYCPEYFPSQMLRTGNNFTFSYTFEDVPFHSSYAHSQSLDRLMNPLIDQYLYYLSTTNTPSGTTTQSRLQFSQAGASDIRDQSRNWLPGPCYRQQRVSKTSADNNNSEYSWTGATKYHLNGRDSLVNPGPAMASHKDNEEKFFPQSGVLIFGKQGSEKTNVDIEKVMITDEEEIRTTNPVATEQYGSVSTNLQRGNRQAATADVNTQGVLPGMVWQDRDVYLQGPIWAKIPHTDGHFHPSPLMGGFGPKHPPPQILIKNTPVPANPSTTFSAAKFASFITQYSTGQVSVEIEWELQKENSKRWNPEIQYTSNYNKSVNVDFTVDTNGVYSEPRPIGTRYLTRNL

SEQ ID NO: 290 - DNA, 2205 bp, Adeno-associated virus
  source 1..2205: mol_type = genomic DNA
atggctgccgatggttatcttccagattggctcgaggacactctctctgaaggaataagacagtggtggaagctcaaacctggcccaccaccaccaaagcccgcagagcggcataaggacgacagcaggggtcttgtgcttcctgggtacaagtacctcggacccttcaacggactcgacaagggagagccggtcaacgaggcagacgccgcggccctcgagcacgacaaggcctacgaccggcagctcgacagcggagacaacccgtacctcaagtacaaccacgccgacgcggagtttcaggagcgtcttaaagaagatacgtcttttgggggcaacctcggacgagcagtcttccaggcgaaaaagagggttcttgaacctctgggcctggttgaggaacctgttaagacggctccgggaaaaaagaggccggtagagcactctcctgcggagccagactcctcctcgggaaccggaaaagcgggccagcagcctgcaagaaaaagactgaatttcggtcagactggagacgcagactccgtacctgacccccagcctctcagacagccaccagcagcccccacaagtttgggatctactacaatggctacaggcagtggcgcaccaatggcagacaataacgagggtgccgatggagtgggtaattcctcaggaaattggcattgcgattcccaatggctgggcgacagagtcatcaccaccagcacccgaacctgggccctgcccacctacaacaaccacctttacaagcaaatctccagccaatcaggagcctcaaacgacaaccactactttggctacagcaccccctgggggtattttgacttcaacagattccactgccacttttcaccacgtgactggcaaagactcatcaacaacaactggggattccgacccaagagactcaacttcaagctctttaacattcaagtcaaagaggtcacgcagaatgacggtacgacgacgattgccaataaccttaccagcacggttcaggtgtttactgactcggagtaccagctcccgtacgtcctcggctcggcgcatcaaggatgcctcccgccgtttccagcggacgtcttcatggtcccacagtatggatacctcaccctgaacaacgggagtcaggcggtaggacgctcttccttttactgcctggagtactttccttctcagatgctgcgtactggaaacaactttcagttcagctacacttttgaagacgtgcctttccacagcagctacgctcacagccagagtttggatcggctgatgaatcctctgatcgaccagtacctgtattatctaaacagaacacaaacagctagtggaactcagcagtctcggctactgtttagccaagctggacccacaagcatgtctcttcaagctaaaaactggctgcctggaccgtgttatcgccagcagcgtttgtcaaagcaggcaaacgacaacaacaacagcaactttccctggactggagctaccaagtactacctcaatggcagagactctttggtgaacccgggcccggccatggccagccacaaggacgatgaagaaaagtttttccccatgcatggaaccctaatatttggtaaagaaggaacaaatgctaccaacgcggaattggaaaatgtcatgattacagatgaagaggaaatcaggaccaccaatcccgtggctacagagcagtacggatatgtgtcaaataatttgcaaaactcaaatactgctgcaagtactgaaactgtgaatcaccaaggagcattacctggtatggtgtggcaggatcgagacgtgtacctgcagggacccatttgggccaagattcctcacaccgatggacactttcatccttctccactgatgggaggttttggactcaaacacccgcctcctcagattatgatcaaaaacactcccgttccagccaatcctcccacaaacttcagttctgccaagtttgcttccttcatcacacagtattccacgggacaggtcagcgtggagatcgagtgggagctgcagaaggagaacagcaaacgctggaatcccgaaattcagtacacttccaactacaacaaatctgttaatgtggactttactgtggacactaatggtgtgtattcagagcctcgccccattggcaccagatacctgactcgtaatctgtaa

SEQ ID NO: 291 - protein, 734 aa, Adeno-associated virus
MAADGYLPDWLEDTLSEGIRQWWKLKPGPPPPKPAERHKDDSRGLVLPGYKYLGPFNGLDKGEPVNEADAAALEHDKAYDRQLDSGDNPYLKYNHADAEFQERLKEDTSFGGNLGRAVFQAKKRVLEPLGLVEEPVKTAPGKKRPVEHSPAEPDSSSGTGKAGQQPARKRLNFGQTGDADSVPDPQPLRQPPAAPTSLGSTTMATGSGAPMADNNEGADGVGNSSGNWHCDSQWLGDRVITTSTRTWALPTYNNHLYKQISSQSGASNDNHYFGYSTPWGYFDFNRFHCHFSPRDWQRLINNNWGFRPKRLNFKLFNIQVKEVTQNDGTTTIANNLTSTVQVFTDSEYQLPYVLGSAHQGCLPPFPADVFMVPQYGYLTLNNGSQAVGRSSFYCLEYFPSQMLRTGNNFQFSYTFEDVPFHSSYAHSQSLDRLMNPLIDQYLYYLNRTQTASGTQQSRLLFSQAGPTSMSLQAKNWLPGPCYRQQRLSKQANDNNNSNFPWTGATKYYLNGRDSLVNPGPAMASHKDDEEKFFPMHGTLIFGKEGTNATNAELENVMITDEEEIRTTNPVATEQYGYVSNNLQNSNTAASTETVNHQGALPGMVWQDRDVYLQGPIWAKIPHTDGHFHPSPLMGGFGLKHPPPQIMIKNTPVPANPPTNFSSAKFASFITQYSTGQVSVEIEWELQKENSKRWNPEIQYTSNYNKSVNVDFTVDTNGVYSEPRPIGTRYLTRNL

SEQ ID NO: 292 - DNA, 3160 bp, Adeno-associated virus
  source 1..3160: mol_type = genomic DNA
acccttcactaaagggactagtcctgcaggtttaaacgaattcgcccttgctgcgtcaactggaccaatgagaactttcccttcaacgactgtgtcgacaagatggtgatttggtgggaggaggggaagatgaccgccaaggtcgtggagtcggccaaagccattctcggaggaagcaaggtgcgcgtggaccagaaatgcaagtcctcggcccagatagatccgactcccgtgatcgtcacctccaacaccaacatgtgcgccgtgattgacgggaactcaacgaccttcgaacaccagcagccgttgcaagaccggatgttcaaatttgaactcacccgccgtctggatcatgactttgggaaggtcaccaagcgggaagtcaaagactttttccggtgggcaaaggatcacgtggttgaggtggagcatgaattctacgtcaaaaagggtggagccaagaaaagacccgcccctagtgacgcagatataagtgagcccaaacgggtgcgcgagtcagttgcgcagccatcgacgtcagacgcggaagcttcgatcaactacgcggacaggtaccaaaacaaatgttctcgtcacgtgggcatgaatctgatgctgtttccctgcagacaatgcgagagaatgaatcaaaattcaaatatctgcttcactcacggacagaaagactgtttagagtgctttcccgtgtcagaatctcaacctgtttctgtcgtcaaaaaggcgtatcagaaactgtgctacattcatcatatcatgggaaaggtgccagacgcttgcactgcctgcgatctggtcaatgtggatttggatgactgcatctctgaacaataaatgatttaaatcaggtatggctgccgatggttatcttccagattggctcgaggacactctctctgaaggaataagacagtggtggaagctcaaacctggcccaccaccaccaaagcccgcagagcggcataaggacgacagcaggggtcttgtgcttcctgggtacaagtacctcggacccttcaacggactcgacaagggagagccggtcaacgaggcagacgccgcggccctcgagcacgacaaggcctacgaccggcagctcgacagcggagacaacccgtacctcaagtacaaccacgccgacgcggagtttcaggagcgtcttaaagaagatacgtcttttgggggcaacctcggacgagcagtcttccaggcgaaaaagagggttcttgaacctctgggcctggttgaggaacctgttaagacggctccgggaaaaaagaggccggtagagcactctcctgcggagccagactcctcctcgggaaccggaaaagcgggccagcagcctgcaagaaaaagactgaatttcggtcagactggagacgcagactccgtacctgacccccagcctctcagacagccaccagcagcccccacaagtttgggatctactacaatggctacaggcagtggcgcaccaatggcagacaataacgagggtgccgatggagtgggtaattcctcaggaaattggcattgcgattcccaatggctgggcgacagagtcatcaccaccagcacccgaacctgggccctgcccacctacaacaaccacctttacaagcaaatctccagccaatcaggagcctcaaacgacaaccactactttggctacagcaccccctgggggtattttgacttcaacagattccactgccacttttcaccacgtgactggcaaagactcatcaacaacaactggggattccgacccaagagactcaacttcaagctctttaacattcaagtcaaagaggtcacgcagaatgacggtacgacgacgattgccaataaccttaccagcacggttcaggtgtttactgactcggagtaccagctcccgtacgtcctcggctcggcgcatcaaggatgcctcccgccgtttccagcggacgtcttcatggtcccacagtatggatacctcaccctgaacaacgggagtcaggcggtaggacgctcttccttttactgcctggagtactttccttctcagatgctgcgtactggaaacaactttcagttcagctacacttttgaagacgtgcctttccacagcagctacgctcacagccagagtttggatcggctgatgaatcctctgatcgaccagtacctgtattatctaaacagaacacaaacagctagtggaactcagcagtctcggctactgtttagccaagctggacccacaagcatgtctcttcaagctaaaaactggctgcctggaccgtgttatcgccagcagcgtttgtcaaagcaggcaaacgacaacaacaacagcaactttccctggactggagctaccaagtactacctcaatggcagagactctttggtgaacccgggcccggccatggccagccacaaggacgatgaagaaaagtttttccccatgcatggaaccctaatatttggtaaagaaggaacaaatgctaccaacgcggaattggaaaatgtcatgattacagatgaagaggaaatcaggaccaccaatcccgtggctacagagcagtacggatatgtgtcaaataatttgcaaaactcaaatactgctgcaagtactgaaactgtgaatcaccaaggagcattacctggtatggtgtggcaggatcgagacgtgtacctgcagggacccatttgggccaagattcctcacaccgatggacactttcatccttctccactgatgggaggttttggactcaaacacccgcctcctcagattatgatcaaaaacactcccgttccagccaatcctcccacaaacttcagttctgccaagtttgcttccttcatcacacagtattccacgggacaggtcagcgtggagatcgagtgggagctgcagaaggagaacagcaaacgctggaatcccgaaattcagtacacttccaactacaacaaatctgttaatgtggactttactgtggacactaatggtgtgtattcagagcctcgccccattggcaccagatacctgactcgtaatctgtaattgcttgttaatcaataaaccgtttaattcgtttcagttgaactttggtctctgcgaagggcgaattcgcggccgctaaatcaatcg

SEQ ID NO: 293 - protein, 734 aa, Adeno-associated virus
MAADGYLPDWLEDTLSEGIRQWWKLKPGPPPPKPAERHKDDSRGLVLPGYKYLGPFNGLDKGEPVNEADAAALEHDKAYDRQLDSGDNPYLKYNHADAEFQERLKEDTSFGGNLGRAVFQAKKRVLEPLGLVEEPVKTAPGKKRPVEHSPAEPDSSSGTGKAGQQPARKRLNFGQTGDADSVPDPQPLGQPPAAPTSLGSTTMATGSGAPMADNNEGADGVGNSSGNWHCDSQWLGDRVITTSTRTWALPTYNNHLYKQISSQSGASNDNHYFGYSTPWGYFDFNRFHCRFSPRDWQRLINNNWGFRPKRLNFKLFNIQVKEVTQNDGTTTIANNLTSTVQVFTDSEYQLPYVLGSAHQGCLPPFPADVFMVPQYGYLTLNNGSQAVGRSSFYCLEYFPSQMLRTGNNFQFSYTFEDVPFHSSYAHSQGLDRLMNPLIDQYLYYLNRTQTASGTQQSRLLFSQAGPTSMSLQAKNWLPGPCYRQQRLSKQANDNNNSNFPWTGATKYHLNGGDSLVNPGPAMASHKDDEEKFFPMHGTLIFGKEGTNATNAELENVMITDEEEIRTTNPVATEQYGYVSNNLQNSNTAASTETVNHQGALPGMVWQDRDVYLRGPIWAKIPHADGHFHPSPLMGGFGLKHPPPQIMIKNTPVPANPPTNFSSAKFASFITQYSTGQVSVEIEWELQKENSKRWNPEIQYTSNYNKSVNVDFTVDTNGVYSEPRPIGTRYLTRNL

SEQ ID NO: 294 - DNA, 3157 bp, Adeno-associated virus
  source 1..3157: mol_type = genomic DNA
ctcactaagggactagtcctgcaggtttaaacgaattcgcccttgctgcgtcaactggaccaatgagaactttcccttcaacgactgtgtcgacaagatggtgatttggtgggaggaggggaagatgaccgccaaggtcgtggagtcggccaaagccactctcggaggaagcaaggtgcgcgtggaccagaaacgcaagtcctcggcccagatagatccgactcccgtgatcgtcacctccaacaccaacatgtgcgccgtgattgacgggaactcaacgaccttcgaacaccagcagccgttgcaagaccgaatgttcaaatttgaactcacccgccgtctggatcatgacttcgggaaggtcaccaagcaggaagtcaaagactttttccggtgggcaaaggatcacgtggttgaggtggagcatgaattctacgtcaaaaagggtggagccaagaaaagacccgcccctagtgacgcagatataagtgagcccaaacgggtgcgcgagtcagttgcgcagccatcgacgtcagacgcggaagcttcgatcaactacgcggacaggtaccaaaacaaatgttctcgtcacgtgggcatgaatctgatgctgtttccctgcagacaatgcgagagaatgaatcaaaattcaaatatctgcttcactcacggacagaaagactgtttagagtgctttcccgtgtcagaatctcaacctgtttctgtcgtcaaaaaggcgtatcagaaactgtgctacattcatcatatcatgggaaaggtgccagacgcttgcactgcctgcgatctggtcaatgtggatttggatgactgcatctctgaacaataaatgatttaaatcaggtatggctgccgatggttatcttccagattggctcgaggacactctctctgaaggaataagacagtggtggaagctcaaacctggcccaccaccaccaaagcccgcagagcggcataaggacgacagcaggggtcttgtgcttcctgggtacaagtacctcggacccttcaacggactcgacaagggagagccggtcaacgaggcagacgccgcggctctcgagcacgacaaggcctacgaccggcagctcgacagcggagacaacccgtacctcaagtacaaccacgccgacgcggagtttcaggagcgtcttaaagaagatacgtcttttgggggcaacctcggacgagcagtcttccaggcgaaaaagagggttcttgaacctctgggcctggttgaggaacctgttaagacggctccgggaaaaaagaggccggtagagcactctcctgcggagccagactcctcctcgggaaccggaaaagcgggccagcagcctgcaagaaaaagactgaatttcggtcagactggagacgcagactccgtacctgacccccagcctctcggacagccaccagcagcccccacaagtttgggatctactacaatggctacaggcagtggcgcaccaatggcagacaataacgagggtgccgatggagtgggtaattcctcaggaaattggcattgcgattcccaatggctgggcgacagagtcatcaccaccagcacccgaacctgggccctgcccacctacaacaaccacctttacaagcaaatctccagccaatcaggagcctcaaacgacaaccactactttggctacagcaccccctgggggtattttgacttcaacagattccactgccgcttttcaccacgtgactggcaaagactcatcaacaacaactggggattccgacccaagagactcaacttcaagctctttaacattcaagtcaaagaggtcacgcagaatgacggtacgacgacgattgccaataaccttaccagcacggttcaggtgtttactgactcggagtaccagctcccgtacgtcctcggctcggcgcatcaaggatgcctcccgccgtttccagcggacgtcttcatggtcccacagtatggatacctcaccctgaacaacgggagtcaggcggtaggacgctcttccttttactgcctggagtactttccttctcagatgctgcgtactggaaacaactttcagttcagctacacttttgaagacgtgcctttccacagcagctacgctcacagccagggtttggatcggctgatgaatcctctgatcgaccagtacctgtattatctaaacagaacacaaacagctagtggaactcagcagtctcggctactgtttagccaagctggacccacaagcatgtctcttcaagctaaaaactggctgcctggaccgtgttatcgccagcagcgtttgtcaaagcaggcaaacgacaacaacaacagcaactttccctggactggagctaccaagtaccacctcaatggcggagactctttggtgaacccgggcccggccatggccagccacaaggacgatgaagaaaagtttttccccatgcatggaaccctaatatttggtaaagaaggaacaaatgctaccaacgcggaattggaaaatgtcatgattacagatgaagaggaaatcaggaccaccaatcccgtggctacagagcagtacggatatgtgtcaaataatttgcaaaactcaaatactgctgcaagtactgaaactgtgaatcaccaaggagcattacctggtatggtgtggcaggatcgagacgtgtacctgcggggacccatttgggccaagattcctcacgccgatggacactttcatccttctccactgatgggaggttttggactcaaacacccgcctcctcagattatgatcaaaaacactcccgttccagccaatcctcccacaaacttcagttctgccaagtttgcttccttcatcacacagtattccacgggacaggtcagcgtggagatcgagtgggagctgcagaaggagaacagcaaacgctggaatcccgaaattcagtacacttccaactacaacaaatctgttaatgtggactttactgtggacactaatggtgtgtattcagagcctcgccccattggcaccagatacctgactcgtaatctgtaattgcttgttaatcaataaaccgtttaattcgtttcagttgaactttggtctctgcgaagggcgaattcgcggccgctaaattcaattcg

SEQ ID NO: 295 - protein, 734 aa, Adeno-associated virus
MAADGYLPDWLEDTLSEGIRQWWKLKPGPPPPKPAERHKDDSRGLVLPGYKYLGPFNGLDKGEPVNEADAAALEHDKAYDRQLDSGDNPYLKYNHADAEFQERLKEDTSFGGNLGRAVFQAKKRVLEPLGLVEEPVKTAPGKKRPVEHSPAEPDSSSGTGKAGQQPARKRLNFGQTGDADSVPDPQPLGQPPAAPTSLGSTTMATGSGAPMADNNEGADGVGNSSGNWHCDSQWLGDRVITTSTRTWALPTYNNHLYKQISSQSGASNDNHYFGYSTPWGYFDFNRFHCHFSPRDWQRLINNNWGFRPKRLNFKLFNIQVKEVTQNDGTTTIANNLTSTVQVFTDSEYQLPYVLGSAHQGCLPPFPADVFMVPQYGYLTLNNGSQAVGRSSFYCLECFPSQMLRTGNNFQFSYTFEDVPFHSSYAHSQSLDRLMNPLIDQYLYYLNRTQTASGTQQSRLLFSQAGPTSMSLQAKNWLPGPCYRQQRLSKQANDNNNSNFPWTGATKYHLNGRDSLVNPGPAMASHKDDEEKFFPMHGTLIFGKEGTNATNAELENVMITDEEEIRTTNPVATEQYGYVSNNLQNSNTAASTETVNHQGALPGMVWQDRDVYLQGPIWAKIPHTDGHFHPSPLMGGFGLKHPPPQIMIKNTPVPANPPTNFSSAKFASFITQYSTGQVSVEIEWELQKENSKRWNPEIQYTSNYNKSVNVDFTVDTNGVYSEPRPIGTRYLTRNL

SEQ ID NO: 296 - DNA, 2208 bp, Adeno-associated virus
  source 1..2208: mol_type = genomic DNA
atggctgccgatggttatcttccagattggctcgaggacactctctctgaaggaataagacagtggtggaagctcaaacctggcccaccaccaccaaagcccgcagagcggcataaggacgacagcaggggtcttgtgcttcctggatacaagtacctcggacccttcaacggactcgacaagggagagccggtcaacgaggcagacgccgcggccctcgagcacgacaaggcctacgaccggcagctcgacagcggagacaacccgtacctcaagtacaaccacgccgacgcggagtttcaggagcgccttaaagaagatacgtcttttgggggcaacctcggacgagcagtcttccaggcgaaaaagagggttcttgaacctctgggcctggttgaggaacctgttaagacggctccgggaaaaaagaggccggtagagcactctcctgtggagccagactcctcctcgggaaccggaaaagcgggcaaccagcctgcaagaaaaagattgaatttcggtcagactggagacgcagactccgtacctgacccccagcctctcggacagccaccagcatccccctctggtctgggaactaatacgatggctacaggcagtggcgcaccaatggcagacaataacgagggcgccgacggagtgggtaattcctcgggaaattggcattgcgattccacatggatgggcgacagagtcgtcaccaccagcacccgcacctgggccctgcccacctacaacaaccacctctacaagcagatttccagccaatcaggagccagcaacgacaaccactactttggctacagcaccccttgggggtattttgacttcaacagattccactgccacttttcgccacgcgactggcagagactcatcaacaacaactggggattccggcccaaaagactcaacttcaagctgtttaacattcaagtcaaggaggtcacgcagaatgacggtacgacgacgattgccaataaccttaccagcacggttcaggtgtttactgacttggagtaccagctcccgtacgtcctcggctcggcgcatcaaggatgcctcccgccgttcccagcagacgtcttcatggtgccacagtatggatacctcaccctgaacaacgggagtcaggcggtaggacgctcttccttttactgcctggagtactttccttctcagatgcttcgcaccggaaacaactttaccttcagctacacttttgaagacgttcctttccacagcagctacgctcacagtcaaagtctggaccgtctcatgaatcctctcatcgaccagtacctgtattacttgagcagaacaaacactccaagcggaaccactacgcagtccaggcttcagttttctcaggccggagcgagtgacattcgggaccagtctaggaactggcttcctggaccctgttaccgccagcagcgagtatcaaagacagctgcggataacaacaacagtgaatactcgtggactggagctaccaagtaccacctcaatggcagagactctctggtgaatccgggcccggccatggccagccacaaggacgatgaagaaaagttttttcctcaaagcggggttctcatctttgggaagcaaggctcagagaaaacaaatgtggacattgaaaaggtcatgattacagacgaagaggaaatcaggaccaccaatcccgtggctacggagcagtatggttctgtatctaccaacctccagagcggcaacacacaagcagctacctcagatgtcaacacacaaggcgttcttccaggcatggtctggcaggacagagacgtgtacctgcaggggcccatctgggcaaaaattccacacacggacggacattttcacccctctcccctcatgggcggatttggacttaaacaccctcctccacagattctcattaagaataccccggtacctgcgaatccttcgaccaccttcagcgcggcaaagtttgcttccttcatcacacagtattccacggggcaggtcagcgtggagatcgagtgggagctgcagaaggagaacagcaaacgctggaatcccgaaattcagtacacttccaactacaacaaatctgttaatgtggactttactgtggacactaatggggtgtattcagagcctcgccctattggcaccagatacctgactcgtaatctgtaa

SEQ ID NO: 297 - DNA, 3159 bp, Adeno-associated virus
  source 1..3159: mol_type = genomic DNA
gattgatttagcggccgcgaattcgcccttgctgcgtcaactggaccaatgagaactttcccttcaacgattgcgtcgacaagatggtgatctggtgggaggagggaaagatgaccgccaaggtcgtggagtcggccaaagccattctcggaggaagcaaggtgcgtgtggaccaaaagtgcaagtcttcggcccagatcgacccgactcccgtgatcgtcacctccaacaccaacatgtgcgccgtgattgatggaaactcaacgaccttcgagcaccagcagccgttgcaagaccggatgttcaaatttgaacttacccgccgtctggatcatgactttggaaaggtcaccaagcaggaagtgaaagactttttccggtgggcaaaggatcacgtggttgaggtggagcatgagttctacgtcaaaaagggtggagccaaaaaaagacccgcccccagtgacgcagatataagtgagcccaaacgggcgcgcgagtcagttgcgcagccatcgacgtcagacgcggaagcttcgatcaactacgcggacaggtaccaaaacaaatgttctcgtcacgtgggcatgaatctgatgctgtttccctgcagacaatgcgagagaatgaatcagaattcaaatatctgcttcactcacggacagaaagactgtccatagtgctttcccgtgtcagaatctcaacccgtttctgtcgtcaaaaaggcgtatcagaaactgtgctacattcatcacatcatgggaaaggtgccagacgcttgcactgcttgcgacctggtcaatgtggatttggatgactgcatctctgaacaataaatgatttaaatcaggtatggctgccgatggttatcttccagattggctcgaggacactctctctgaaggaataagacagtggtggaagctcaaacctggcccaccaccaccaaagcccgcagagcggcataaggacgacagcaggggtcttgtgcttcctggatacaagtacctcggacccttcaacggactcgacaagggagagccggtcaacgaggcagacgccgcggccctcgagcacgacaaggcctacgaccggcagctcgacagcggagacaacccgtacctcaagtacaaccacgccgacgcggagtttcaggagcgccttaaagaagatacgtcttttgggggcaacctcggacgagcagtcttccaggcgaaaaagagggttcttgaacctctgggcctggttgaggaacctgttaagacggctccgggaaaaaagaggccggtagagcactctcctgtggagccagactcctcctcgggaaccggaaaagcgggcaaccagcctgcaagaaaaagattgaatttcggtcagactggagacgcagactccgtacctgacccccagcctctcggacagccaccagcatccccctctggtctgggaactaatacgatggctacaggcagtggcgcaccaatggcagacaataacgagggcgccgacggagtgggtaattcctcgggaaattggcattgcgattccacatggatgggcgacagagtcgtcaccaccagcacccgcacctgggccctgcccacctacaacaaccacctctacaagcagatttccagccaatcaggagccagcaacgacaaccactactttggctacagcaccccttgggggtattttgacttcaacagattccactgccacttttcgccacgcgactggcagagactcatcaacaacaactggggattccggcccaaaagactcaacttcaagctgtttaacattcaagtcaaggaggtcacgcagaatgacggtacgacgacgattgccaataaccttaccagcacggttcaggtgtttactgacttggagtaccagctcccgtacgtcctcggctcggcgcatcaaggatgcctcccgccgttcccagcagacgtcttcatggtgccacagtatggatacctcaccctgaacaacgggagtcaggcggtaggacgctcttccttttactgcctggagtactttccttctcagatgcttcgcaccggaaacaactttaccttcagctacacttttgaagacgttcctttccacagcagctacgctcacagtcaaagtctggaccgtctcatgaatcctctcatcgaccagtacctgtattacttgagcagaacaaacactccaagcggaaccactacgcagtccaggcttcagttttctcaggccggagcgagtgacattcgggaccagtctaggaactggcttcctggaccctgttaccgccagcagcgagtatcaaagacagctgcggataacaacaacagtgaatactcgtggactggagctaccaagtaccacctcaatggcagagactctctggtgaatccgggcccggccatggccagccacaaggacgatgaagaaaagttttttcctcaaagcggggttctcatctttgggaagcaaggctcagagaaaacaaatgtggacattgaaaaggtcatgattacagacgaagaggaaatcaggaccaccaatcccgtggctacggagcagtatggttctgtatctaccaacctccagagcggcaacacacaagcagctacctcagatgtcaacacacaaggcgttcttccaggcatggtctggcaggacagagacgtgtacctgcaggggcccatctgggcaaaaattccacacacggacggacattttcacccctctcccctcatgggcggatttggacttaaacaccctcctccacagattctcattaagaataccccggtacctgcgaatccttcgaccaccttcagcgcggcaaagtttgcttccttcatcacacagtattccacggggcaggtcagcgtggagatcgagtgggagctgcagaaggagaacagcaaacgctggaatcccgaaattcagtacacttccaactacaacaaatctgttaatgtggactttactgtggacactaatggggtgtattcagagcctcgccctattggcaccagatacctgactcgtaatctgtaattgcttgttaatcaataaaccgtttaattcgtttcagttgaactttggtctctgcgaagggcgaattcgtttaaacctgcaggactagtccctttagtgagg

SEQ ID NO: 298 - protein, 735 aa, Adeno-associated virus
MAADGYLPDWLEDTLSEGIRQWWKLKPGPPPPKPAERHKDDSRGLVLPGYKYLGPFNGLDKGEPVNEADAAALEHDKAYDRQLDSGDNPYLKYNHADAEFQERLKEDTSFGGNLGRAVFQAKKRVLEPLGLVEEPVKTAPGKKRPVEHSPVEPDSSSGTGKAGNQPARKRLNFGQTGDADSVPDPQPLGQPPASPSGLGTNTMATGSGAPMADNNEGADGVGNSSGNWHCDSTWMGDRVVTTSTRTWALPTYNNHLYKQISSQSGASNDNHYFGYSTPWGYFDFNRFHCHFSPRDWQRLINNNWGFRPKRLNFKLFNIQVKEVTQNDGTTTIANNLTSTVQVFTDLEYQLPYVLGSAHQGCLPPFPADVFMVPQYGYLTLNNGSQAVGRSSFYCLEYFPSQMLRTGNNFTFSYTFEDVPFHSSYAHSQSLDRLMNPLIDQYLYYLSRTNTPSGTTTQSRLQFSQAGASDIRDQSRNWLPGPCYRQQRVSKTAADNNNSEYSWTGATKYHLNGRDSLVNPGPAMASHKDDEEKFFPQSGVLIFGKQGSEKTNVDIEKVMITDEEEIRTTNPVATEQYGSVSTNLQSGNTQAATSDVNTQGVLPGMVWQDRDVYLQGPIWAKIPHTDGHFHPSPLMGGFGLKHPPPQILIKNTPVPANPSTTFSAAKFASFITQYSTGQVSVEIEWELQKENSKRWNPEIQYTSNYNKSVNVDFTVDTNGVYSEPRPIGTRYLTRNL

SEQ ID NO: 299 - DNA, 2205 bp, Adeno-associated virus
  source 1..2205: mol_type = genomic DNA
atggctgccgatggttatcttccagattggctcgaggacactctctctgaaggaataagacagtggtggaagctcaaacctggcccaccaccaaagcccgcagagcggcataaggacgacagcaggggtcttgtgcttcctggatacaagtacctcggacccttcaacggactcgacaagggagagccggtcaacgaggcagacgccgcggccctcgagcacgacaaggcctacgaccggcagctcgacagcggagacaacccgtacctcaagtacaaccacgccgacgcggagtttcaggagcgccttaaagaagatacgtcttttgggggcaacctcggacgagcagtcttccaggcgaaaaagagggttcttgaacctctgggcctggttgaggaacctgttaagacggctccgggaaaaaagaggcccgtagagcactctcctgtggagccagactcctcctcgggaaccggaaaagcgggcaaccagcctgcaagaaaaagattgaatttcggtcagactggagacgcagactccgtacctgacccccagcctctcggacagccaccagcagccccctctggtctgggaactaatacgatggctacaggcagtggcgcaccaatggcagacaataacgagggcgccgacggagtgggtaattcctcgggagattggcattgcgattccacatggatgggcgacagagtcatcaccaccagcacccgcacctgggccctgcccacctacaacaaccacctctacaagcagatttccagccaatcaggagccagcaatgacaaccactactttggctacagcaccccttgggggtattttgacttcaacagattccactgccacttttcgccacgcgactggcagagactcatcaacaacaactggggattccggcccaaaagactcaacctcaagctgtttaacattcaagtcaaggaggtcacgcagaatgacggtacgacgacgattgccaataaccttaccagcacggttcaggtgtttactgacttggagtaccagctcccgtacgtcctcggctcggcgcatcaaggatgcctcccgccgttcccagcagacgtcttcatggtgccacagtatggatacctcaccctgaacaacgggagtcaggcggtaggacgctcttccttttactgcctggagtactttccttctcagatgcttcgtaccggaaacaactttaccttcagctacacttttgaagacgttcctttccacagcagctacgctcacagtcaaagtctggaccgtctcatgaatcctctcatcgaccagtacctgtattacttgagcagaacaaacactccaagcggaaccactacgcagtccaggcttcagttttctcaggccggagcgagtgacattcgggaccagtctaggaactggcttcctggaccctgttaccgccagcagcgagtatcaaagacagctgcggataacaacaacggtgaatactcgtggactggagctaccaagtaccacctcaatggcagagactctctggtgaatccgggcccggccatggccagccacaaggacgatgaagaaaagttttttcctcaaagcggggttctcatctttgggaagcaaggctcagagaaaacaaatgtggacattgaaaaggtcatgattacagacgaagaggaaatcaggaccaccaatcccgtggctacggagcagtatggttctgtatctaccaacctccagagcggcaacacacgagcagctacctcagatgtcaacacacaaggcgttcttccaggcatggtctggcaggacagagacgtgtacctgcaggggcccatctgggcaaaaattccacacacggacggacattttcacccctctcccctcatgggcggatttggacttaaacaccctcctccacagattctcattaagaataccccggtacctgcgaatccttcgaccaccttcagcgcggcaaagtttgcttccttcatcacacagtattccacggggcaggtcagcgtggagatcgagtgggagctgcagaaggagaacagcaaacgctggaatcccgaaattcagtacacttccaactacaacaaatctgttaatgtggactttactgtggacactaatggggtgtattcagagcctcgccctattggcaccagatacctgactcgtaatctgtaa

SEQ ID NO: 300 - DNA, 3156 bp, Adeno-associated virus
  source 1..3156: mol_type = genomic DNA
cgattgaatttagcggccgcgaattcgcccttgctgcgtcaacggaccaatgagaactttcccttcaacgattgcgtcgacaagatggtgatctggtgggaggagggaaagatgaccgccaaggtcgtggagtcggccaaagccattctcggaggaagcaaggtgcgtgtggaccaaaagtgcaagtcttcggcccagatcgacccgactcccgtgatcgtcacctccaacaccaacatgtgcgccgtgattgatggaaactcaacgaccttcgagcaccagcagccgttgcaagaccggatgttcaaatttgaacttacccgccgtctggatcatgactttggaaaggtcaccaagcaggaagtgaaagactttttccggtgggcaaaggatcacgtggttgaggtggagcatgagttctacgtcaaaaagggtggagccaaaaaaagacccgcccccagtgacgcagatataagtgagcccaaacgggcgcgcgagtcagttgcgcagccatcgacgtcagacgcggaagcttcgatcaactacgcggacaggtaccaaaacaaatgttctcgtcacgtgggcatgaatctgatgctgtttccctgcagacaatgcgagcgaatgaatcagaattcaaatatctgcttcactcacggacagaaagactgtttagagtgctttcccgtgtcagaatctcaacccgtttctgtcgtcaaaaaggcgtatcagaaactgtgctacattcatcacatcatgggaaaggtgccagacgcttgcactgcttgcgacctggtcaatgtggatttggatgactgcatctctgaacaataaatgatttaaatcaggtatggctgccgatggttatcttccagattggctcgaggacactctctctgaaggaataagacagtggtggaagctcaaacctggcccaccaccaaagcccgcagagcggcataaggacgacagcaggggtcttgtgcttcctggatacaagtacctcggacccttcaacggactcgacaagggagagccggtcaacgaggcagacgccgcggccctcgagcacgacaaggcctacgaccggcagctcgacagcggagacaacccgtacctcaagtacaaccacgccgacgcggagtttcaggagcgccttaaagaagatacgtcttttgggggcaacctcggacgagcagtcttccaggcgaaaaagagggttcttgaacctctgggcctggttgaggaacctgttaagacggctccgggaaaaaagaggcccgtagagcactctcctgtggagccagactcctcctcgggaaccggaaaagcgggcaaccagcctgcaagaaaaagattgaatttcggtcagactggagacgcagactccgtacctgacccccagcctctcggacagccaccagcagccccctctggtctgggaactaatacgatggctacaggcagtggcgcaccaatggcagacaataacgagggcgccgacggagtgggtaattcctcgggagattggcattgcgattccacatggatgggcgacagagtcatcaccaccagcacccgcacctgggccctgcccacctacaacaaccacctctacaagcagatttccagccaatcaggagccagcaatgacaaccactactttggctacagcaccccttgggggtattttgacttcaacagattccactgccacttttcgccacgcgactggcagagactcatcaacaacaactggggattccggcccaaaagactcaacctcaagctgtttaacattcaagtcaaggaggtcacgcagaatgacggtacgacgacgattgccaataaccttaccagcacggttcaggtgtttactgacttggagtaccagctcccgtacgtcctcggctcggcgcatcaaggatgcctcccgccgttcccagcagacgtcttcatggtgccacagtatggatacctcaccctgaacaacgggagtcaggcggtaggacgctcttccttttactgcctggagtactttccttctcagatgcttcgtaccggaaacaactttaccttcagctacacttttgaagacgttcctttccacagcagctacgctcacagtcaaagtctggaccgtctcatgaatcctctcatcgaccagtacctgtattacttgagcagaacaaacactccaagcggaaccactacgcagtccaggcttcagttttctcaggccggagcgagtgacattcgggaccagtctaggaactggcttcctggaccctgttaccgccagcagcgagtatcaaagacagctgcggataacaacaacggtgaatactcgtggactggagctaccaagtaccacctcaatggcagagactctctggtgaatccgggcccggccatggccagccacaaggacgatgaagaaaagttttttcctcaaagcggggttctcatctttgggaagcaaggctcagagaaaacaaatgtggacattgaaaaggtcatgattacagacgaagaggaaatcaggaccaccaatcccgtggctacggagcagtatggttctgtatctaccaacctccagagcggcaacacacgagcagctacctcagatgtcaacacacaaggcgttcttccaggcatggtctggcaggacagagacgtgtacctgcaggggcccatctgggcaaaaattccacacacggacggacattttcacccctctcccctcatgggcggatttggacttaaacaccctcctccacagattctcattaagaataccccggtacctgcgaatccttcgaccaccttcagcgcggcaaagtttgcttccttcatcacacagtattccacggggcaggtcagcgtggagatcgagtgggagctgcagaaggagaacagcaaacgctggaatcccgaaattcagtacacttccaactacaacaaatctgttaatgtggactttactgtggacactaatggggtgtattcagagcctcgccctattggcaccagatacctgactcgtaatctgtaattgcttgttaatcaataaaccgtttaattcgtttcagttgaactttggtctctgcgaagggcgaattcgtttaaacctgcaggactagtccctttagtgag

SEQ ID NO: 301 - protein, 734 aa, Adeno-associated virus
MAADGYLPDWLEDTLSEGIRQWWKLKPGPPPKPAERHKDDSRGLVLPGYKYLGPFNGLDKGEPVNEADAAALEHDKAYDRQLDSGDNPYLKYNHADAEFQERLKEDTSFGGNLGRAVFQAKKRVLEPLGLVEEPVKTAPGKKRPVEHSPVEPDSSSGTGKAGNQPARKRLNFGQTGDADSVPDPQPLGQPPAAPSGLGTNTMATGSGAPMADNNEGADGVGNSSGDWHCDSTWMGDRVITTSTRTWALPTYNNHLYKQISSQSGASNDNHYFGYSTPWGYFDFNRFHCHFSPRDWQRLINNNWGFRPKRLNLKLFNIQVKEVTQNDGTTTIANNLTSTVQVFTDLEYQLPYVLGSAHQGCLPPFPADVFMVPQYGYLTLNNGSQAVGRSSFYCLEYFPSQMLRTGNNFTFSYTFEDVPFHSSYAHSQSLDRLMNPLIDQYLYYLSRTNTPSGTTTQSRLQFSQAGASDIRDQSRNWLPGPCYRQQRVSKTAADNNNGEYSWTGATKYHLNGRDSLVNPGPAMASHKDDEEKFFPQSGVLIFGKQGSEKTNVDIEKVMITDEEEIRTTNPVATEQYGSVSTNLQSGNTRAATSDVNTQGVLPGMVWQDRDVYLQGPIWAKIPHTDGHFHPSPLMGGFGLKHPPPQILIKNTPVPANPSTTFSAAKFASFITQYSTGQVSVEIEWELQKENSKRWNPEIQYTSNYNKSVNVDFTVDTNGVYSEPRPIGTRYLTRNL

SEQ ID NO: 302 - DNA, 2208 bp, Adeno-associated virus
  source 1..2208: mol_type = genomic DNA
atggctgccgatggttatcttccagattggctcgaggacactctctctgaaggaataagacagtggtggaagctcaaacctggcccaccaccaccaaagcccgcagagcggcataaggacgacagcaggggtcttgtgcttcctgggtacaagtacctcggacccttcaacggactcgacaagggagagccggtcaacgaggcagacgccgcggccctcgagcacgacaaggcctacgaccggcagctcgacagcggagacaacccgtacctcaagtacgaccacgccgacgcggagtttcaggagcgccttaaagaagatacgtcttttgggggcaacctcggacgagcagtcttccaggcaaaaaagagggttcttgaacctctgggcctggttgaggagcctgttaagacggctccgggaaaaaagaggccggtagagcactctcctgtggagccagactcctcctcgggaaccggaaaagcgggcaaccagcctgcaagaaagagattgaatttcggtcagactggagacgcagactccgtacctgacccccagcctctcggacagccaccagcagccccctctggtctgggaactaatacgatggctacaggcagtggcgcaccaatggcagacaataacgatggcgccgacggagtgggtaattcctcgggaaattggcattgcgattccacatggatgggcgacagagtcatcaccaccagcacccgaacctgggctctgcccacctacaacaaccatctgtacaagcagatttccagccaatcaggagccagcaacgacaaccactactttggctacagcaccccttgggggtattttgacttcaacagattccactgccacttttcaccacgtgactggcaaagactcatcaacaacaactggggattccggcccaagagactcaacttcaagctctttaacattcaagtcagagaggtcacgcagaatgatggtacgacgacgattgccaataaccttaccagcacggttcaggtgtttactgactcggagtaccagctcccgtacgtcctcggctcggcgcatcaaggatgcctcccgccgttcccagcagacgtcttcatggtgccacagtatggatacctcaccctgaacaacgggagtcaggcagtaggacgctcttcattttactgcctggagtacttcccttctcagatgctgcgtaccggaaacaactttaccttcagctacacctttgaggatgttcctttccacagcagctacgctcacagccagagtttggaccgtctcatgaatcctctcatcgaccagtacctgtattacttgagcagaacaaacactccaagcggaaccaccacgcagtccaggcttcagttttctcaggccggagcgagtgacattcgggatcagtctaggaactggcttcctggaccctgttaccgccagcagcgagtatcaaagacatctgcggacaacaacaacagtgaatactcgtggattggagctaccaagtaccacctcaatggcagagactctctggtgaatccgggcccggcaatggccagccacaaggacgatgaagaaaagttttttcctcagagcggggttctcatctttggaaaacaaggatcagagaaaacaaatgtggacattgaaaaggtcatgattacagacgaagaggaaatcagaaccaccaatcccgtggccacggagcagtatggttctgtatctaccaacctccagagcggcaacacacaagcatctactgcagatgtcaacacacaaggcgttcttccaggcatggtctggcaggacagagacgtgtacctgcaggggcctatctgggcaaagattccgcacacggacggacattttcacccctctcccctcatgggcggattcggacttaaacaccctcctccacagattctcatcaaaaacaccccggtacctgcgaatccttcgaccaccttcagtgcggcaaagtttgcttccttcatcacacagtattccacggggcgggtcagcgtggagatcgagtgggagctacagaaggagaacagcaaacgctggaatcccgagatccagtacacttccaactacaacaaatctgttaatgtggactttactgtggacactaatggtgtgtattcagagcctcgccccattggcaccagatacctgactcgtaatctgtaa

SEQ ID NO: 303 - protein, 735 aa, Adeno-associated virus
MAADGYLPDWLEDTLSEGIRQWWKLKPGPPPPKPAERHKDDSRGLVLPGYKYLGPFNGLDKGEPVNEADAAALEHDKAYDRQLDSGDNPYLKYDHADAEFQERLKEDTSFGGNLGRAVFQAKKRVLEPLGLVEEPVKTAPGKKRPVEHSPVEPDSSSGTGKAGNQPARKRLNFGQTGDADSVPDPQPLGQPPAAPSGLGTNTMATGSGAPMADNNDGADGVGNSSGNWHCDSTWMGDRVITTSTRTWALPTYNNHLYKQISSQSGASNDNHYFGYSTPWGYFDFNRFHCHFSPRDWQRLINNNWGFRPKRLNFKLFNIQVREVTQNDGTTTIANNLTSTVQVFTDSEYQLPYVLGSAHQGCLPPFPADVFMVPQYGYLTLNNGSQAVGRSSFYCLEYFPSQMLRTGNNFTFSYTFEDVPFHSSYAHSQSLDRLMNPLIDQYLYYLSRTNTPSGTTTQSRLQFSQAGASDIRDQSRNWLPGPCYRQQRVSKTSADNNNSEYSWIGATKYHLNGRDSLVNPGPAMASHKDDEEKFFPQSGVLIFGKQGSEKTNVDIEKVMITDEEEIRTTNPVATEQYGSVSTNLQSGNTQASTADVNTQGVLPGMVWQDRDVYLQGPIWAKIPHTDGHFHPSPLMGGFGLKHPPPQILIKNTPVPANPSTTFSAAKFASFITQYSTGRVSVEIEWELQKENSKRWNPEIQYTSNYNKSVNVDFTVDTNGVYSEPRPIGTRYLTRNL

SEQ ID NO: 304 - DNA, 2217 bp, Adeno-associated virus
  source 1..2217: mol_type = genomic DNA
atggctgccgatggttatcttccagattggctcgaggacaacctctctgagggcattcgcgagtggtgggacttgaaacctggagccccgaaacccaaagccaaccagcaaaagcaggacgacggccggggtctggtgcttcctggctacaagtacctcggacccttcaacggactcgacaagggggagcccgtcaacgcggcggacgcagcggccctcgagcacgacaaggcctacgaccagcagctcaaagcgggtgacaatccgtacctgcggtataaccacgccgacgccgagtttcaggagcgtctgcaagaagatacgtcttttgggggcaacctcgggcgagcagtcttccaggccaagaagcgggttctcgaacctctcggtctggttgaggaaggcgctaagacggctcctggaaagaagagaccggtagagccatcaccccagcgttctccagactcctctacgggcatcggcaagacaggccagcagcccgcgaaaaagagactcaactttgggcagactggcgactcagagtcagtgcccgaccctcaaccaatcggagaaccccccgcaggcccctctggtctgggatctggtacaatggctgcaggcggtggcgctccaatggcagacaataacgaaggcgccgacggagtgggtagttcctcaggaaattggcattgcgattccgcatggctgggcgacagagtcatcaccaccagcacccgaccctgggccctccccacctacaacaaccacctctacaagcaaatctccaacgggacatcgggaggaagcaccaacgacaacacctacttcggctacagcaccccctgggggtattttgactttaacagattccactgccacttctcaccacgtgactggcagcgactcatcaacaacaactggggattccggcccaagagactcaacttcaagctcttcaacatccaggtcaaggaggtcacgcagaatgaaggcaccaagaccatcgccaataaccttaccagcacgattcaggtctttacggactcggaataccagctcccgtacgtcctcggctctgcgcaccagggctgcccgcctccgttcccggcggacgtcttcatgattcctcagtacgggtacctgactctgaacaacggcagtcaggccgtgggccgttcctccttctactgcctggagtactttccttctcaaatgcggagaacgggcaacaactttgagttcagctaccagtttgaggacgtgccttttcacagcagctacgcgcatagccaaagcctggaccggctgatgaaccccctcatcgaccagtacctgtactacctgtctcggactcagtccacgggaggtaccgcaggaactcagcagttgctattttctcaggccgggcctaataacatgtcggctcaggccaaaaactggctacccgggccctgctaccggcagcaacgcgtctccacgacactgtcgcaaaataacaacagcaactttgcttggaccggtgccaccaagtatcatctgaatggcagagactctctggtaaatcccggtgtcgctatggcaacgcacaaggacgacgaagagcgattttttccatccagcggagtcttgatgtttgggaaacagggagctggaaaagacaacgtggactatagcagcgttatgctaaccagtgaggaagaaatcaaaaccaccaacccagtggccacagaacagtacggcgtggtggccgataacctgcaacagcaaaacgccgctcctattgtaggggccgtcaacagtcaaggagccttacctggcatggtctggcagaaccgggacgtgtacctgcagggtcctatctgggccaagattcctcacacggacggcaactttcatccttcgccgctgatgggaggctttggactgaaacacccgcctcctcagatcctgattaagaatacacctgttcccgcggatcctccaactaccttcagtcaagccaagctggcgtcgttcatcacgcagtacagcaccggacaggtcagcgtggaaattgaatgggagctgcagaaagagaacagcaagcgctggaacccagagattcagtatacttccaactactacaaatctacaaatgtggactttgctgtcaatactgagggtacttattcagagcctcgccccattggcacccgttacctcacccgtaacctgtaa

SEQ ID NO: 305 - protein, 738 aa, Adeno-associated virus
MAADGYLPDWLEDNLSEGIREWWDLKPGAPKPKANQQKQDDGRGLVLPGYKYLGPFNGLDKGEPVNAADAAALEHDKAYDQQLKAGDNPYLRYNHADAEFQERLQEDTSFGGNLGRAVFQAKKRVLEPLGLVEEGAKTAPGKKRPVEPSPQRSPDSSTGIGKTGQQPAKKRLNFGQTGDSESVPDPQPIGEPPAGPSGLGSGTMAAGGGAPMADNNEGADGVGSSSGNWHCDSAWLGDRVITTSTRPWALPTYNNHLYKQISNGTSGGSTNDNTYFGYSTPWGYFDFNRFHCHFSPRDWQRLINNNWGFRPKRLNFKLFNIQVKEVTQNEGTKTIANNLTSTIQVFTDSEYQLPYVLGSAHQGCPPPFPADVFMIPQYGYLTLNNGSQAVGRSSFYCLEYFPSQMRRTGNNFEFSYQFEDVPFHSSYAHSQSLDRLMNPLIDQYLYYLSRTQSTGGTAGTQQLLFSQAGPNNMSAQAKNWLPGPCYRQQRVSTTLSQNNNSNFAWTGATKYHLNGRDSLVNPGVAMATHKDDEERFFPSSGVLMFGKQGAGKDNVDYSSVMLTSEEEIKTTNPVATEQYGVVADNLQQQNAAPIVGAVNSQGALPGMVWQNRDVYLQGPIWAKIPHTDGNFHPSPLMGGFGLKHPPPQILIKNTPVPADPPTTFSQAKLASFITQYSTGQVSVEIEWELQKENSKRWNPEIQYTSNYYKSTNVDFAVNTEGTYSEPRPIGTRYLTRNL

SEQ ID NO: 306 - protein, 735 aa, Adeno-associated virus
MAADGYLPDWLEDTLSEGIRQWWKLKPGPPPPKPAERHKDDSRGLVLPGYKYLGPFNGLDKGEPVNEADAAALEHDKAYDRQLDSGDNPYLKYNHADAEFQERLKEDTSFGGNLGRAVFQAKKRVLEPLGLVEEPVKTAPGKKRPVEHSPVEPDSSSGTGKAGQQPARKRLNFGQTGDADSVPDPQPLGQPPAAPSGLGSTTMATGSGAPMADNNEGADGVGNSSGNWHCDSQWLGDRVITTSTRTWALPTYNNHLYKQISSQSGASNDNHYFGYSTPWGYFDFNRFHCHFSPRDWQRLINNNWGFRPKRLNFKLFNIQVKEVTQNDGTTTIANNLTSTVQVFTDSEYQLPYVLGSAHQGCLPPFPADVFMVPQYGYLTLNNGSQAVGRSSFYCLEYFPSQMLRTGNNFQFSYTFEDVPFHSSYAHSQSLDRLMNPLVDQYLYYLNKTQTNSGTLQQSRLLFSQAGPTNMSLQAKNWLPGPCYRQQRLSKQANDNNNSNFPWTAATKYHLNGRDSLVNPGPAMASHKDDEEKFFPMHGTLIFGKQGTNANDADLENVMITDEEEIRTTNPVATEQYGTVSNNLQNSNTGPTTGTVNHQGALPGMVWQDRDVYLQGPIWAKIPHTDGHFHPSPLMGGFGLKHPPPQIMIKNTPVPANPPTNFSSAKFASFITQYSTGQVSVEIEWELQKENSKRWNPEIQYTSNYNKSVNVDFTVDTNGVYSEPRPIGTRYLTRNL

SEQ ID NO: 307 - DNA, 3158 bp, Adeno-associated virus
  source 1..3158: mol_type = genomic DNA
gattgaatttagcggccgcgaattcgcccttgctgcgtcaactggaccaatgagaactttcctttcaatgattgcgtcgacaagatggtgatctggtgggaggagggaaagatgaccgccaaggtcgtggagtcggccaaagccattctcggaggaagcaaggtgcgcgcggaccagaaatgcaagtcctcggcccagatagacccgactcccgtgattgtcacctccaacaccaacatgtgcgccgtgattgacgggaactcaacgaccttcgaacaccagcagccgttgcaagaccggatgttcaaatttgaactcacccgccgtctggatcatgactttgggaaggtcaccaagcaggaagtcaaagactttttccggtgggcaaaggatcacgtggttgaggtggagcatgaattctacgtcaaaaagggtggagctaagaaaagacccgcccccagtgacgcagatataagtgagcccaaacgggcgcgcgagtcagttgcgcagccatcgacgtcagacgcggaagcttcgatcaactacgcgggcaggtaccaaaacaaatgttctcgtcacgtgggcatgaatctgatgctgtttccctgcagacaatgcgagagaatgaatcagaattcaaatatctgcttcactcacggacagaaagactgtttagagtgctttcccgtgtcagaatctcaacccgtttctgtcgtcaaaaaggcgtatcagaaactttgctacattcatcatatcatgggaaaggtgccagacgcttgcactgcctgcgatctggtcaatgtggatttggatgactgcatctctgaacaataaatgatttaaatcaggtatggctgccgatggttatcttccagattggctcgaggacactctctctgaaggaataagacagtggtggaagctcaaacctggcccaccaccaccaaagcccgcagagcggcataaggacgacagcaggggtcttgtgcttcctgggtacaagtacctcggacccttcaacggactcgacaagggggagccggtcaacgaggcagacgccgcggccctcgagcacgacaaggcctacgaccggcagctcgacagcggagacaacccgtacctcaagtacaaccacgccgacgcggagtttcaggagcgccttaaagaagatacgtcttttgggggcaacctcggacgagcagtcttccaggcaaaaaagagggttcttgaacctctgggcctggttgaggaacctgttaaaacggctccgggaaaaaagaggccggtagagcactctcctgtggagccagactcctcctcgggaaccggaaaagcgggccagcagcctgcaagaaaaagattgaatttcggtcagactggagacgcagactccgtacctgacccccagcctctcggacagccaccagcagccccctctggtctgggatctactacaatggctacaggcagtggcgcaccaatggcagacaataacgagggtgccgatggagtgggtaattcctcgggaaattggcattgcgattcccaatggctgggcgacagagtcatcaccaccagcacccgcacctgggccctgcccacctacaacaaccacctctacaagcaaatctccagccaatcaggagcctcaaacgacaaccactactttggctacagcaccccctgggggtattttgacttcaacagattccactgccacttttcaccacgtgactggcaaagactcatcaacaacaactggggattccgacccaagagactcaacttcaagctctttaacattcaagtcaaagaggtcacgcagaatgacggtacgacgacgattgccaataaccttaccagcacggttcaggtgtttactgactcggagtaccagctcccgtacgtcctcggctcggcgcatcaaggatgcctcccgccgtttccagcggacgtcttcatggtcccacagtatggatacctcaccctgaacaacgggagtcaggcagtaggacgctcttcattttactgcctggagtactttccttctcagatgctgcgtaccggaaacaactttcaattcagctacacttttgaagacgtgcctttccacagcagctacgctcacagccagagtctggatcggctgatgaatcctctggtcgaccagtacctgtattatctgaacaagacacaaacaaatagtggaactcttcagcagtctcggctactgtttagccaagctggacccaccaacatgtctcttcaagctaaaaactggctgcctggaccttgctacagacagcagcgtctgtcaaagcaggcaaacgacaacaacaacagcaactttccctggactgcagctacaaagtatcatctaaatggccgggactcgttggttaatccaggaccagctatggccagtcacaaggatgacgaagaaaagtttttccccatgcatggaacccttatatttggtaaacaaggaacaaatgccaacgacgcggatttggaaaatgtcatgattacagatgaagaagaaatcaggaccaccaatcccgtggctacggagcagtacggaactgtatcaaataatttgcaaaactcaaacactggtccaactactggaactgtcaatcaccaaggagcgttacctggtatggtgtggcaggatcgagacgtgtacctgcagggacccatttgggccaagattcctcacaccgatggacactttcatccttctccactgatgggaggttttggactcaaacacccacctcctcaaatcatgatcaaaaacactcccgttccagccaatcctcccacaaacttcagttctgccaagtttgcttctttcatcacacagtattccacggggcaggtcagcgtggagatcgagtgggagctgcagaaggagaacagcaaacgctggaatcccgaaattcagtacacttccaactacaacaaatctgttaatgtggactttactgtggacactaatggtgtgtattcagagcctcgccccattggcaccagatacctgactcgtaatctgtaattgcttgttaatcaataaaccgtttaattcgtttcagttgaactttggtctctgcgaagggcgaattcgtttaaacctgcaggactagtccctttagtga

SEQ ID NO: 308 - protein, 735 aa, Adeno-associated virus
MAADGYLPDWLEDTLSEGIRQWWKLKPGPPPPKPAERHKDDSRGLVLPGYKYLGPFNGLDKGEPVNEADAAALEHDKAYDRQLDSGDNPYLKYNHADAEFQERLKEDTSFGGNLGRAVFQAKKRVLEPLGLVEEPVKTAPGKKRPVEHPPVEPDSSSGTGKAGQQPARKRLNFGQTGDADSVPDPQPLGQPPAAPSGLGSTTMATGSGAPMADNNEGADGVGNSSGNWHCDSQWLGDRVITTSTRTWALPTYNNHLYKQISSQSGASNDNHYFGYSTPWGYFDFNRFHCHFSPRDWQRLINNNWGFRPKRLNFKLFNIQVKEVTQNDGTTTIANNLTSTVQVFTDSEYQLPYVLGSAHQGCLPPFPADVFMVPQYGYLTLNNGSQAVGRSSFYCLEYFPSQMLRTGNNFQFSYTFEDVPFHSSYAHSQSLDRLMNPLIDQYLYYLNKTQTNSGTLQQSRLLFSQAGPTNMSLQAKNRLPGPCYRQQRLSKQANDNNNSNFPWTAATKYHLNGRDSLVNPGPAMASHKDDEEKFFPMHGTLIFGKQGTNANDADLENVMITDEEEIRTTNPVATEQYGTVSNNLQNSNTGPTTGTVNHQGALPGMVWQDRDVYLQGPIWAKIPHTDGHFHPSPLVGGFGLKHPPPQIMIKNTPVPANPPTNFSSAKFASFITQYSTGQVSVEIEWELQKENSKRWNPEIQYTSNYNKSVNVDFTVDTNGVYSEPRPIGTRYLTRNL

SEQ ID NO: 309 - DNA, 3159 bp, Adeno-associated virus
  source 1..3159: mol_type = genomic DNA
gattgaatttagcggccgcgaattcgcccttgctgcgtcaactggaccaatgagaactttcctttcaatgattgcgtcgacaagatggtgatctggtgggaggagggaaagatgaccgccaaggtcgtggagtcggccaaagccattctcggaggaagcaaggtgcgcgtggaccagaaatgcaagtcctcggcccagatagacccgactcccgtgattgtcacctccaacaccgacatgtgcgccgtgattgacgggaactcaacgaccttcgaacaccagcagccgttgcaagaccggatgttcaaatttgaactcacccgccgtctggatcatgactttgggaaggtcaccaagcaggaagtcaaagactttttccggtgggcaaaggatcacgtggttgaggtggagcatgaattctacgtcaaaaagggtggagctaagaaaagacccgcccccagtgacgcagatataagtgagcccaaacgggcgcgcgagtcagttgcgcagccatcgacgtcagacgcggaagcttcgatcaactacgcggacaggtaccaaaacaaatgttctcgtcacgtgggcatgaatctgatgctgtttccctgcagacaatgcgagagaatgaatcagaattcaaatatctgcttcactcacggacagaaagactgtttagagtgctttcccgtgtcagaatctcaacccgtttctgtcgtcaaaaaggcgtatcagaaactttgctacattcatcatatcatgggaaaggtgccagacgcttgcactgcctgcgatctggtcaatgtggatttggatgactgcatctctgaacaataaatgatttaaatcaggtatggctgccgatggttatcttccagattggctcgaggacactctctctgaaggaataagacagtggtggaagctcaaacctggcccaccaccaccaaagcccgcagagcggcataaggacgacagcaggggtcttgtgcttcctgggtacaagtacctcggacccttcaacggactcgacaagggggagccggtcaacgaggcagacgccgcggccctcgagcacgacaaggcctacgaccggcagctcgacagcggagacaacccgtacctcaagtacaaccacgccgacgcggagtttcaggagcgccttaaagaagatacgtcttttgggggcaacctcggacgagcagtcttccaggcaaaaaagagggttcttgaacctctgggcctggttgaggaacctgttaaaacggctccgggaaaaaagaggccggtagagcaccctcctgtggagccagactcctcctcgggaaccggaaaagcgggccagcagcctgcaagaaaaagattgaatttcggtcagactggagacgcagactccgtacctgacccccagcctctcggacagccaccagcagccccctctggtctgggatctactacaatggctacaggcagtggcgcaccaatggcagacaataacgagggtgccgatggagtgggtaattcctcgggaaattggcattgcgattcccaatggctgggcgacagagtcatcaccaccagcacccgcacctgggccctgcccacctacaacaaccacctctacaagcaaatctccagccaatcaggagcctcaaacgacaaccactactttggctacagcaccccctgggggtattttgacttcaacagattccactgccacttttcaccacgtgactggcaaagactcatcaacaacaactggggattccgacccaagagactcaacttcaagctctttaacattcaagtcaaagaggtcacgcagaatgacggtacgacgacgattgccaataaccttaccagcacggttcaggtgtttactgactcggagtaccagctcccgtacgtcctcggctcggcgcatcaaggatgcctcccgccgtttccagcggacgtcttcatggtcccacagtatggatacctcaccctgaacaacgggagtcaggcagtaggacgctcttcattttactgcctggagtactttccttctcagatgctgcgtaccggaaacaactttcagttcagctacacttttgaagacgtgcctttccacagcagctacgctcacagccagagtctggatcggctgatgaatcctctgatcgaccagtacctgtattatctgaacaagacacaaacaaatagtggaactcttcagcagtctcggctactgtttagccaagctggacccaccaacatgtctcttcaagctaaaaaccggctgcctggaccttgctacagacagcagcgtctgtcaaagcaggcaaacgacaacaacaacagcaactttccctggaccgcagctacaaagtatcatctaaatggccgggactcgttggttaatccaggaccagctatggccagtcacaaggatgacgaagaaaagtttttccccatgcatggaacccttatatttggtaaacaaggaacaaatgccaacgacgcggatttggaaaatgtcatgattacagatgaagaagaaatcaggaccaccaatcccgtggctacggagcagtacggaactgtatcaaataatttgcaaaactcaaacactggtccaactactggaactgtcaatcaccaaggagcgttacctggtatggtgtggcaggatcgagacgtgtacctgcagggacccatttgggccaagattcctcacaccgatggacactttcatccttctccactggtgggaggttttggactcaaacacccacctcctcaaatcatgatcaaaaacactcccgttccagccaatcctcccacaaacttcagttctgccaagtttgcttctttcatcacacagtattccacggggcaggtcagcgtggagatcgagtgggagctgcagaaggagaacagcaaacgctggaatcccgaaattcagtacacttccaactacaacaaatctgttaatgtggactttactgtggacactaatggtgtgtattcagagcctcgccccattggcaccagatacctgactcgtaatctgtaattgcttgttaatcaataaaccgtttaattcgtttcagttgaactttggtctctgcgaagggcgaattcgtttaaacctgcaggactagtccctttagtgag

SEQ ID NO: 310 - DNA, 2208 bp, Adeno-associated virus
  source 1..2208: mol_type = genomic DNA
atggctgccgatggttatcttccagattggctcgaggacactctctctgaaggaataagacagtggtggaagctcaaacctggcccaccaccaccaaagcccgcagagcggcataaggacgacagcaggggtcttgtgcttcctgggtacaagtaccttggacccttcaacggactcgacaagggagagccggtcaacgaggcagacgccgcggccctcgagcacgacaaggcctacgaccggcagctcgacagcggagacaacccgtaccccaagtacaaccacgccgacgcggagttccaggagcgtcttaaagaagatacgtcttttgggggcaacctcggacgagcagtcttccaggcgaaaaagagggttcttgaacctctgggcctggttgaggaacctgttaagacggctccgggaaaaaagaggccggtagagcactctcctgcggagccagactcctcctcgggaaccggaaaagcgggccagcagcctgcaagaaagagattgaatttcggtcagactggagacgcagactccgtacctgacccccagcctctcggacagccaccagcagccccctctggtctgggaactaatacgatggctacaggcagtggcgcaccaatggcagacaataacgagggcgccgacggagtgggtaattcctcgggaaattggcattgcgattccacatggatgggcgacagagtcatcaccaccagcacccgcacctgggctctgcccacctacaacaaccacctctacaagcagatttccagccaatcaggagcctcaaacgacaaccactactttggctacagcaccccttgggggtattttgacttcaacagattccactgccacttttcgccacgtgactggcaaagactcatcaacaacaattggggattccggcccaaaagactcaacttcaagctctttaacattcaagtcaaggaggtcacgcagaatgacggtacgacgacgattgccaataaccttaccagcacggttcaggtgtttactgactcggagtaccagctcccgtacgtcctcggctcggcgcatcaaggatgcctcccgccgttcccagcagacgtcttcatggtgccacagtatggatacctcaccctgaacaacgggagtcaggcagtaggacgctcttcattttactgcctggagtactttccttctcagatgctgcgtaccggaaacaactttaccttcagctacacctttgaggacgttcctttccacagcagctacgcccacagccagagtttggaccgtctcatgaatcctctcatcgaccagtacctgtattacttgagcagaacaaacactccaagcggaaccaccacgcagtcaaggcttcagttttctcaggccggagcaagtgacattcgggaccagtctaggaactggcttcctggaccctgttaccgccagcagcgagtatcaaagacatctgcggataacaacaacagtgaatactcgtggactggagctaccaagtaccaccttaatggaagagactctctggtgaatccgggcccggccatggccagccacaaggacgatgaagaaaagttttttcctcagagcggggttctcatctttggaaaacaagactcgggaaaaactaatgtggacattgaaaaggtcatgattacagacgaagaggaaatcaggaccaccaatcccgtggctacggagcagtatggttctgtatctaccaacctccagagcggcaacacacaagcagctacctcagatgtcaacacacaaggcgttcttccaggcatggtgtggcaggacagagacgtgtacctgcaggggcccatctgggcaaagattccacacacggacggacattttcacccctctcccctcatgggcggattcggacttaaacaccctcccccgcagattctcatcaagaacaccccggtacctgcgaatccttcgactaccttcagtgcggcaaagtttgcttccttcattacacagtactccacggggcaggtcagcgtggagatcgagtgggagctgcagaaggagaacagcaaacgctggaatcccgagattcagtacacttccaactacaacaaatctgttaatgtggactttactgtggacactaatggtgtgtattcagagcctcgccccattggcaccaggtacctgactcgtaatctgtaa

SEQ ID NO: 311 - protein, 735 aa, Adeno-associated virus
MAADGYLPDWLEDTLSEGIRQWWKLKPGPPPPKPAERHKDDSRGLVLPGYKYLGPFNGLDKGEPVNEADAAALEHDKAYDRQLDSGDNPYPKYNHADAEFQERLKEDTSFGGNLGRAVFQAKKRVLEPLGLVEEPVKTAPGKKRPVEHSPAEPDSSSGTGKAGQQPARKRLNFGQTGDADSVPDPQPLGQPPAAPSGLGTNTMATGSGAPMADNNEGADGVGNSSGNWHCDSTWMGDRVITTSTRTWALPTYNNHLYKQISSQSGASNDNHYFGYSTPWGYFDFNRFHCHFSPRDWQRLINNNWGFRPKRLNFKLFNIQVKEVTQNDGTTTIANNLTSTVQVFTDSEYQLPYVLGSAHQGCLPPFPADVFMVPQYGYLTLNNGSQAVGRSSFYCLEYFPSQMLRTGNNFTFSYTFEDVPFHSSYAHSQSLDRLMNPLIDQYLYYLSRTNTPSGTTTQSRLQFSQAGASDIRDQSRNWLPGPCYRQQRVSKTSADNNNSEYSWTGATKYHLNGRDSLVNPGPAMASHKDDEEKFFPQSGVLIFGKQDSGKTNVDIEKVMITDEEEIRTTNPVATEQYGSVSTNLQSGNTQAATSDVNTQGVLPGMVWQDRDVYLQGPIWAKIPHTDGHFHPSPLMGGFGLKHPPPQILIKNTPVPANPSTTFSAAKFASFITQYSTGQVSVEIEWELQKENSKRWNPEIQYTSNYNKSVNVDFTVDTNGVYSEPRPIGTRYLTRNL

SEQ ID NO: 312 - DNA, 2208 bp, Adeno-associated virus
  source 1..2208: mol_type = genomic DNA
atggctgccgatggttatcttccagattggctcgaggacactctctctgaaggaataagacagtggtggaagctcaaacctggcccaccaccaccaaagcccgcagagcggcataaggacgacagcaggggtcttgtgcttcctgggtacaagtaccttggacccttcaacggactcgacaagggagagccggtcaacgaggcagacgccgcggccctcgagcacgacaaggcctacgaccggcagctcgacggcggagacaacccgtacctcaagtacaaccacgccgacgcggagttccaggagcgtcttaaagaagatacgtcttttgggggcaacctcggacgagcagtcttccaggcgaaaaagagggttcttgaacctctgggcctggttgaggaacctgttaagacggctccgggaaaaaagaggccggtagagcactctcttgcggagccagactcctcctcgggaaccggaaaagcgggccagcagcctgcaagaaggagattgaatttcggtcagactggagacgcagactccgtacctgacccccagcctctcggacagccaccagcagccccctctggtctgggaactaatacgatggctacaggcagtggcgcaccaatggcagacaataacgagggcgccgacggagtgggtaattcctcgggaaattggcattgcgattccacatggatgggcgacagagtcatcaccaccagcacccgcacctgggctctgcccacctacaacaaccacctctacaggcagatttccagccaatcaggagcctcaaacgacaaccactactttggctacagcaccccttgggggtattttgacttcaacagattccactgccacttttcgccacgtgactggcaaagactcatcaacaacaattggggatcccggcccaaaagactcaacttcaagctctttaacattcaagtcaaggaggtcacgcagaatgacggtacgacgacgattgccaataaccttaccagcacggttcaggtgtttactgactcggagtaccagctcccgtacgtcctcggctcggcgcatcaaggatgcctcccgccgttcccagcagacgtcttcatggtgccacagtatggatacctcaccctgaacaacgggagtcaggcagtaggacgctcttcattttactgcctggagtactttccttctcagatgctgcgtaccggaaacaactttaccttcagctacacctttgaggacgttcctttccacagcagctacgcccacagccagagtttggaccgtctcatgaatcctctcgtcgaccagtacctgtattacttgagcagaacaaacactccaagcggaaccaccacgcagtcaaggcttcagttttctcaggccggagcaagtgacattcgggaccagtctaggaactggcttcctggaccctgttaccgccagcagcgagtatcaaagacatctgcggataacaacaacagtgaatactcgtggactggagctaccaagtaccaccttaatggaagagactctctggtgaatccgggcccggccatggccagccacaaggacgatgaagaaaagttttttcctcagagcggggttctcatctttggaaaacaagactcgggaaaaactaatgtggacattgaaaaggtcatgattacagacgaagaggaaatcaggaccaccaatcccgtggctacggagcagtatggttctgtatctaccaacctccagagcggcaacacacaagcagctacctcagatgtcaacacacaaggcgttcttccaggcatggtgtggcaggacagagacgtgtacctgcaggggcccatctgggcaaagattccacacacggacggacattttcacccctctcccctcatgggcggattcggacttaaacaccctcccccgcagattctcatcaagaacaccccggtacctgcgaatccttcgactaccttcagtgcggcaaagtttgcttccttcattacacagtactccacggggcaggtcagcgtggagatcgagtgggagctgcagaaggagaacagcaaacgctggaatcccgagattcagtacacttccaactacaacaaatctgttaatgtggactttactgtggacactaatggtgtgtattcagagcctcgccccattggcaccagatacctgactcgtaatctgtaa

SEQ ID NO: 313 - protein, 735 aa, Adeno-associated virus
MAADGYLPDWLEDTLSEGIRQWWKLKPGPPPPKPAERHKDDSRGLVLPGYKYLGPFNGLDKGEPVNEADAAALEHDKAYDRQLDGGDNPYLKYNHADAEFQERLKEDTSFGGNLGRAVFQAKKRVLEPLGLVEEPVKTAPGKKRPVEHSLAEPDSSSGTGKAGQQPARRRLNFGQTGDADSVPDPQPLGQPPAAPSGLGTNTMATGSGAPMADNNEGADGVGNSSGNWHCDSTWMGDRVITTSTRTWALPTYNNHLYRQISSQSGASNDNHYFGYSTPWGYFDFNRFHCHFSPRDWQRLINNNWGSRPKRLNFKLFNIQVKEVTQNDGTTTIANNLTSTVQVFTDSEYQLPYVLGSAHQGCLPPFPADVFMVPQYGYLTLNNGSQAVGRSSFYCLEYFPSQMLRTGNNFTFSYTFEDVPFHSSYAHSQSLDRLMNPLVDQYLYYLSRTNTPSGTTTQSRLQFSQAGASDIRDQSRNWLPGPCYRQQRVSKTSADNNNSEYSWTGATKYHLNGRDSLVNPGPAMASHKDDEEKFFPQSGVLIFGKQDSGKTNVDIEKVMITDEEEIRTTNPVATEQYGSVSTNLQSGNTQAATSDVNTQGVLPGMVWQDRDVYLQGPIWAKIPHTDGHFHPSPLMGGFGLKHPPPQILIKNTPVPANPSTTFSAAKFASFITQYSTGQVSVEIEWELQKENSKRWNPEIQYTSNYNKSVNVDFTVDTNGVYSEPRPIGTRYLTRNL

SEQ ID NO: 314 - protein, 738 aa, Adeno-associated virus
MAADGYLPDWLEDNLSEGIREWWDLKPGAPKPKANQQKQDDGRGLVLPGYKYLGPFNGLDKGEPVNAADAAALEHDKAYDQQLKAGDNPYLRYNHADAEFQERLQEDTSFGGNLGRAVFQAKKRVLEPLGLVEEAAKTAPGKKRPVEPSPQRSPDSSAGIGKKGQQPAKKRLNFGQTGDSESVPDPQPIGEPPAGPSGLGSGTMAAGGGAPMADNNEGADGVGSSSGNWHCDSTWLGDRVITTSTRTWALPTYNNHLYKQISNGTSGGSTNDNTYFGYSTPWGYFDFNRFHCHFSPRDWQRLINNNWGFRPKRLSFKLFNIQVKEVTQNEGTETIANNLTSTIQVFTDSEYQLPYVLGSAHQGCLPPFPADVFMIPQYGYLTLNNGSQAVGRSSFYCLEYFPSQMLRTGNNFEFSYTFEDVPFHSSCAHSQSSDRLMNPLIDQYLYYLSRTRSTGGTQGTQQLLFSQAGPANMSAQAKNWLPGPCYRQQRVSTTLSQNNNSNFAWTGATKYHLNGRDSLVNPGVAMATHKDDEERFFPSSGVLMFGKQGAGRDNVDYSSVMLTSEEEIKTTNPVATEQYGVVADNLQQTNTGPIVGNVNSQGALPGMVWQNRDVYLQGPIWAKIPHTDGNFHPSPLMGGFGLKHPPPQILIKNTPVPADPPTTFSQAKLASFITQYSTGQVSVEIEWELQKENSKRWNPEIQYTSNYYKSTNVDFAVNTEGTYSEPRPIGTRYLTRNL

SEQ ID NO: 315 - DNA, 2217 bp, Adeno-associated virus
  source 1..2217: mol_type = genomic DNA
atggctgctgacggttatcttccagattggctcgaggacaacctctctgagggcattcgcgagtggtgggacctgaaacctggagcccccaagcccaaggccaaccagcagaagcaggacgacggccggggtctggtgcttcttggctacaagtacctcggacccttcaacggactcgacaagggggagcccgtcaatgcggcggacgcagcggccctcgagcacgacaaggcctacgaccagcagctcaaagcgggtgacaatccgtacctgcggtataaccacgccgacgccgagtttcaggagcgtctgcaagaagatacgtcttttgggggcaacctcgggcgagcagtcttccaggccaagaagcgggttctcgaacctctcggtctggttgaggaagctgctaagacggctcctggaaagaagagaccggtagaaccgtcacctcagcgttcccccgactcctccacgggcatcggcaagaaaggccagcagcccgctaaaaagagactgaactttggtcagactggcgactcagagtcagtccccgaccctcaaccaatcggagaaccaccagcaggcccctctggtctgggatctggtacaatggctgcaggcggtggcgctccaatggcagacaataacgaaggcgccgacggagtgggtagttcctcaggaaattggcattgcgattccacatggctgggcgacagagtcatcaccaccagcacccgaacctgggccctgcccacctacaacaaccacctctacaagcaaatatccaatgggacatcgggaggaagcaccaacgacaacacctacttcggctacagcaccccctgggggtattttgacttcaacagattccactgccacttctcaccacgtgactggcagcgactcatcaacaacaactggggattccggccaaaaagactcagcttcaagctcttcaacatccaggtcaaggaggtcacgcagaatgaaggcaccaagaccatcgccaataaccttaccagcacgattcaggtatttacggactcggaataccagctgccgtacgtcctcggctccgcgcaccagggctgcctgcctccgttcccggcggacgtcttcatgattccccagtacggctaccttacactgaacaatggaagtcaagccgtaggccgttcctccttctactgcctggaatattttccatctcaaatgctgcgaactggaaacaattttgaattcagctacaccttcgaggacgtgcctttccacagcggctacgcacacagccagagcttggaccgactgatgaatcctctcatcgaccagtacctgtactacttatccagaactcagtccacaggaggaactcaaggtacccagcaattgttattttctcaagctgggcctgcaaacatgtcggctcaggctaagaactggctacctggaccttgctaccggcagcagcgagtctctacgacactgtcgcaaaacaacaacagcaactttgcttggactggtgccaccaaatatcacctgaacggaagagactctttggtaaatcccggtgtcgccatggcaacccacaaggacgacgaggaacgcttcttcccgtcgagtggagtcctgatgtttggaaaacagggtgctggaagagacaatgtggactacagcagcgttatgctaaccagcgaagaagaaattaaaaccactaaccctgtagccacagaacaatacggtgtggtggctgacaacttgcagcaaaccaatacagggcctattgtgggaaatgtcaacagccaaggagccttacctggcatggtctggcagaaccgagacgtgtacctgcagggtcccatctgggccaagattcctcacacggacggcaacttccacccttcaccgctaatgggaggatttggactgaagcacccacctcctcagatcctgatcaagaacacgccggtacctgcggatcctccaacgacgttcagccaggcgaaattggcttccttcattacgcagtacagcaccggacaggtcagcgtggaaatcgagtgggagctgcagaaggagaacagcaaacgctggaacccagagattcagtacacttcaaactactacaaatctacaaatgtggactttgctgtcaatacagagggaacttattctgagcctcgccccattggtactcgttacctcacccgtaatctgtaa

SEQ ID NO: 316 - protein, 738 aa, Adeno-associated virus
MAADGYLPDWLEDNLSEGIREWWDLKPGAPKPKANQQKQDDGRGLVLLGYKYLGPFNGLDKGEPVNAADAAALEHDKAYDQQLKAGDNPYLRYNHADAEFQERLQEDTSFGGNLGRAVFQAKKRVLEPLGLVEEAAKTAPGKKRPVEPSPQRSPDSSTGIGKKGQQPAKKRLNFGQTGDSESVPDPQPIGEPPAGPSGLGSGTMAAGGGAPMADNNEGADGVGSSSGNWHCDSTWLGDRVITTSTRTWALPTYNNHLYKQISNGTSGGSTNDNTYFGYSTPWGYFDFNRFHCHFSPRDWQRLINNNWGFRPKRLSFKLFNIQVKEVTQNEGTKTIANNLTSTIQVFTDSEYQLPYVLGSAHQGCLPPFPADVFMIPQYGYLTLNNGSQAVGRSSFYCLEYFPSQMLRTGNNFEFSYTFEDVPFHSGYAHSQSLDRLMNPLIDQYLYYLSRTQSTGGTQGTQQLLFSQAGPANMSAQAKNWLPGPCYRQQRVSTTLSQNNNSNFAWTGATKYHLNGRDSLVNPGVAMATHKDDEERFFPSSGVLMFGKQGAGRDNVDYSSVMLTSEEEIKTTNPVATEQYGVVADNLQQTNTGPIVGNVNSQGALPGMVWQNRDVYLQGPIWAKIPHTDGNFHPSPLMGGFGLKHPPPQILIKNTPVPADPPTTFSQAKLASFITQYSTGQVSVEIEWELQKENSKRWNPEIQYTSNYYKSTNVDFAVNTEGTYSEPRPIGTRYLTRNL

SEQ ID NO: 317 - protein, 735 aa, Adeno-associated virus
MAADGYLPDWLEDTLSEGIRQWWKLKPGPPPPKPAERHKDDSRGLVLPGYKYLGPFNGLDKGEPVNEADAAALEHDKAYDRQLDSGDNPYLKYNHADAEFQERLKEDTSFGGNLGRAVFQAKKRVLEPLGLVEPPVKTAPGKKRPVEHSPAEPDSSSGTGKAGQQPARKRLNFGQTGDADSVPDPQPLGQPPAAPSGLGSTTMATGSGAPMADNNEGADGVGNSSGNWHCDSQWLGDRVITTSTRTWALPTYNNHLYKQISSQSGASNDNHYFGYSTPWGYFDFNRFHCHFSPRDWQRLINNNWGFRPKRLNFKLFNIQVKEVTQNDGTTTIANNLTSTVQVFTDSEYQLPYVLGSAHQGCLPPFPADVFMVPQYGYLTLNNGSQAVGRSSFYCLEYFPSQMLRTGNNFQFSYTFEDVPFHSSYAHSQSLDRLMNPLIDQYLYYLNKTQSNSGTLQQSRLLFSQAGPTSMSLQAKNWLPGPCYRQQRLSKQANDNNNSNFPWTAATKYHLNGRDSLVNPGPAMASHKDDEEKFFPMHGTLIFGKQGTNANDADLDNVMITDEEEIRTTNPVATEQYGYVSNNLQNSNTGPTTGTVNHQGALPGMVWQDRDVYLQGPIWAKIPHTDGHFHPSPLMGGFGLKHPPPQIMIKNTPVPANPPTNFSSAKFASFITQYSTGQVSVEIEWELQKENSKRWNPEIQYTSNYNKSVNVDFTVDTNGVYSEPRPIGTRYLTRNL

SEQ ID NO: 318 - protein, 735 aa, Adeno-associated virus
MAADGYLPDWLEDTLSEGIRQWWKLKPGPPPPKPAERHKDDSRGLVLPGYKYLGPFNGLDKGEPVNEADAAALEHDKAYDRQLDSGDNPYLKYNHADAEFQERLKEDTSFGGNLGRAVFQAKKRVLEPLGLVEGPVKTAPGKKRPVEHSPAEPDSSSGTGKAGQQPARKRLNFGQTGDADSVPDPQPLGQPPAAPSGLGSTTMATGSGAPMADNNEGADGVGNSSGNWHCDSQWLGDRVITTSTRTWALPTYNNHLYKQISSQSGASNDNHYFGYSTPWGYFDFNRFHCHFSPRDWQRLINNNWGFRPKRLNFKLFNIQVKEVTQNDGTTTIANNLTSTVQVFTDSEYQLPYVLGSAHQGCLPPFPADVFMVPQYGYLTLNNGSQAVGRSSFYCLEYFPSQMLRTGNNFQFSYTFEDVPFHSSYAHSQSLDRLMNPLIDQYLYYLNKTQSNSGTLQQSRLLFSQAGPTSMSLQAKNWLPGPCYRQQRLSKQANDNNNSNFPWTAATKYHLNGRDSLVNPGPAMASHKDDEEKFFPMHGTLIFGKQGTNANDADLDNVMITDEEEIRTTNPVATEQYGYVSNNLQNSNTGPTTGTVNHQGALPGMVWQDRDVYLQGPIWAKIPHTDGHFHPSPLMGGFGLKHPPPQIMIKNTPVPANPPTNFSSAKFASFITQYSTGQVSVEIEWELQKENSKRWNPEIQYTSNYNKSVNVDFTVDTNGVYSEPRPIGTRYLTRNL

SEQ ID NO: 319 - DNA, 2208 bp, Adeno-associated virus
  source 1..2208: mol_type = genomic DNA
atggctgccgatggttatcttccagattggctcgaggacactctctctgaaggaataagacagtggtggaagctcaaacctggcccaccaccaccaaagcccgcagagcggcataaggacgacagcaggggtcttgtgcttcctgggtacaagtacctcggacccttcaacggactcgacaagggggagccggtcaacgaggcagacgccgcggccctcgagcacgacaaggcctacgaccggcagctcgacagcggagacaacccgtacctcaagtacaaccacgccgacgcggagtttcaggagcgtcttaaagaagatacgtcttttgggggcaacctcggacgagcagtcttccaggcgaaaaagagggttcttgaacctctgggcctggttgagggacctgttaagacggctccgggaaaaaagaggccggtagagcactctcctgcggagccagactcctcctcgggaaccggaaaagcgggccagcagcctgcaagaaaaagattgaattttggtcagactggagacgcagactccgtacctgacccccagcctctcggacagccaccagcagccccctctggtttgggatctactacaatggctacaggcagtggcgcaccaatggcagacaataacgagggtgccgatggagtgggtaattcctcaggaaattggcattgcgattcccaatggctgggcgacagagtcatcaccaccagcacccgaacctgggccctgcccacctacaacaaccacctctacaagcaaatctcaagccaatcaggagcctcaaacgacaaccactactttggctacagcaccccttgggggtattttgacttcaacagattccactgccacttttcaccacgtgactggcaaagactcatcaacaacaactggggattccgacccaagagactcaacttcaagctctttaacattcaagtcaaagaggtcacgcagaatgacggtacgacgacgattgccaataaccttaccagcacggttcaggtgtttactgactcggagtaccagctcccgtacgtcctcgggtcggcgcatcaaggatgcctcccgccgtttccagcggacgtcttcatggtcccacagtatggatacctcaccctgaacaacgggagtcaggcggtaggacgctcttccttttactgcctggagtactttccttctcagatgcttcgtactggaaacaactttcagttcagctacacctttgaagacgttcctttccacagcagctacgctcacagccagagtctggatcggctgatgaatcctctgatcgaccagtacctgtattatctgaacaaaacacaatcaaatagtggaactcttcagcagtctcggctactgtttagtcaagctggacccaccagcatgtctcttcaagctaaaaactggctacctggaccttgctacagacagcagcgtctgtcaaagcaggcaaacgacaacaacaacagcaactttccctggactgcggctacaaagtatcacctaaatggccgggactcgttggttaatccaggaccagctatggccagtcacaaagacgatgaagaaaagtttttccccatgcatggaaccctgatatttggtaaacaaggaacaaatgctaacgacgcggatttggacaatgtcatgattacagatgaagaagaaatccgcaccaccaatcccgtggctacggagcagtacggatatgtgtcaaataatttgcaaaactcaaatactggtccaactactggaactgtcaatcaccaaggagcgttacctggcatggtgtggcaggatcgagacgtgtacctgcagggacccatttgggccaagattcctcacaccgatggacactttcatccttctccactgatgggaggttttgggctcaaacacccgcctcctcagatcatgatcaaaaacactcccgttccagccaatcctcccacaaacttcagttctgccaagtttgcttctttcatcacacagtattccacggggcaggtcagcgtggagatcgagtgggagctgcagaaagagaacagcaaacgctggaatcccgaaattcagtacacttccaactacaacaaatctgttaatgtggactttactgtggacactaatggcgtgtattcagagcctcgccccattggcaccagatacctgactcgtaatctgtaa

SEQ ID NO: 320 - DNA, 2211 bp, Adeno-associated virus; identical to SEQ ID NO: 1
  source 1..2211: mol_type = genomic DNA

SEQ ID NO: 321 - DNA, 2208 bp, Adeno-associated virus
  source 1..2208: mol_type = genomic DNA
atggctgccgatggttatcttccagattggctcgaggacactctctctgaaggaacaagacagtggtggaagctcaaacctggcccaccaccaccaaagcccgcagagcggcataaggacgacagcaggggtcttgtgcttcctgggtacaagtacctcggacccttcaacggactcgacaagggggagccggtcaacgaggcagacgccgcggccctcgagcacgacaaggcctacgaccggcagctcgacagcggagacaacccgtacctcaagtacaaccacgccgacgcggagtttcaggagcgtcttaaagaagatacgtcttttgggggcaacctcggacgagcagtcttccaggcgaaaaagagggttcttgaacctctgggcctggttgaggaacctgttaagacggctccgggaaaaaagaggccggtagagcactctcctgcggagccagactcctcctcgggaaccggaaaagcgggccagcagcctgcaagaaaaagattgaattttggtcagactggagacgcagactccgtacctgacccccagcctctcggacagccaccagcagccccctctggtttgggatctactacaatggctacaggcagtggcgcaccaatggcagacaataacgagggtgccgatggagtgggtaattcctcaggaaattggcattgcgattcccaatggctgggcgacagagtcatcaccaccagcacccgaacctgggccctgcccacctacaacaaccacctctacaagcaaatctcaagccaatcaggagcctcaaacgacaaccactactttggctacagcaccccttgggggtattttgacttcaacagattccactgccacttttcaccacgtgactggcaaagactcatcaacaacaactggggattccgacccaagagactcaacttcaagctctttaacattcaagtcaaagaggtcacgcagaatgacggtacgacgacgattgccaataaccttaccagcacggttcaggtgtttactgactcggagtaccagctcccgtacgtcctcgggtcggcgcatcaaggatgcctcccgccgtttccagcggacgtcttcatggtcccacagtatggatacctcaccctgaacaacgggagtcaggcggtaggacgctcttccttttactgcctggagtactttccttctcagatgcttcgtactggaaacaactttcagttcagctacacctttgaagacgttcctttccacagcagctacgctcacagccagagtctggatcggctgatgaatcctctgatcgaccagtacctgtattatctgaacaaaacacaatcaaatagtggaactcttcagcagtctcggctactgtttagtcaagctggacccaccagcatgtctcttcaagctaaaaactggctacctggaccttgctacagacagcagcgtctgtcaaagcaggcaaacgacaacaacaacagcaactttccctggactgcggctacaaagtaccacctaaatggccgggactcgttggttaatccaggaccagctatggccagtcacaaagacgatgaagaaaagtttttccccatgcatggaaccctgatatttggtaaacaaggaacaaatgctaacgacgcggatttggacaatgtcatgattacagatgaagaagaaatccgcaccaccaatcccgtggctacggagcagtacggatatgtgtcaaataatttgcaaaactcaaatactggtccaactactggaactgtcaatcaccaaggagcgttacctggcatggtgtggcaggatcgagacgtgtacctgcagggacccatttgggccaagattcctcacaccgatggacactttcatccttctccactgatgggaggttttgggctcaaacacccgcctcctcagatcatgatcaaaaacactcccgttccagccaatcctcccacaaacttcagttctgccaagtttgcttctttcatcacacagtattccacggggcaggtcagcgtggagatcgagtgggagctgcagaaagagaacagcaaacgctggaatcccgaaattcagtacacttccaactacaacaaatctgttaatgtggactttactgtggacactaatggcgtgtattcagagcctcgccccattggcaccagatacctgactcgtaatctgtaa

SEQ ID NO: 322 - DNA, 2217 bp, Adeno-associated virus
  source 1..2217: mol_type = genomic DNA
atggctgctgacggttatcttccagattggctcgaggacaacctctctgagggcattcgcgagtggtgggacctgaaacctggagcccccaagcccaaggccaaccagcagaagcaggacgacggccggggtctggtgcttcctggctacaagtacctcggacccttcaacggactcgacaagggggagcccgtcaacgcggcggacgcagcggccctcgagcacgacaaggcctacgaccagcagctcaaagcgggtgacaatccgtacctgcggtataaccacgccgacgccgagtttcaggagcgtctgcaagaagatacgtcttttgggggcaacctcgggcgagcagtcttccaggccaagaagcgggttctcgaacctctcggtctggttgaggaagctgctaagacggctcctggaaagaagagaccggtagaaccgtcacctcagcgttcccccgactcctccacgggcatcggcaagaaaggccagcagcccgctaaaaagagactgaactttggtcagactggcgactcagagtcagtccccgaccctcaaccaatcggagaaccacctgcaggcccctctggtctgggatctggtacaatggctgcaggcggtggcgctccaatggcagacaataacgaaggcgccgacggagtgggtagttcctcaggaaattggcattgcgattccacatggctgggcgacagagtcatcaccaccagcacccgaacctgggccctgcccacctacaacaaccacctctacaagcaaatatccaatgggacatcgggagggagcaccaacgacaacacctacttcggctacagcaccccctgggggtattttgacttcaacagattccactgccacttctcaccacgtgactggcagcgactcatcaacaacaactggggattccggccaaaaagactcagcttcaagctcttcaacatccaggtcaaggaggtcacgcagaatgaaggcaccaagaccatcgccaataaccttaccagcacgattcaggtatttacggactcggaataccagctgccgtacgtcctcggctccgcgcaccagggctgcctgcctccgttcccggcggacgtcttcatgattccccagtacggctaccttacactgaacaatggaagtcaagccgtaggccgttcctccttctactgcctggaatattttccatctcaaatgctgcgaactggaaacaattttgaattcagctacaccttcgaggacgtgcctttccacagcagctacgcacacagccagagcttggaccgactgatgaatcctctcatcgaccagtacctgtactacttatccagaactcagtccacaggaggaactcaaggtacccagcaattgttattttctcaagctgggcctgcaaacatgtcggctcaggctaagaactggctacctggaccttgctaccggcagcagcgagtctctacgacactgtcgcaaaacaacaacagcaactttgcttggactggtgccaccaaatatcacctgaacggaagagactctttggtaaatcccggtgtcgccatggcaacccacaaggacgacgaggaacgcttcttcccgtcgagtggagtcctgatgtttggaaaacagggtgctggaagagacaatgtggactacagcagcgttatgctaaccagcgaagaagaaattaaaaccactaaccctgtagccacagaacaatacggtgtggtggctgacaacttgcagcaaaccaatacagggcctattgtgggaaatgtcaacagccaaggagccttacctggcatggtctggcagaaccgagacgtgtacctgcagggtcccatctgggccaagattcctcacacggacggcaactgccacccttcaccgctaatgggaggatttggactgaagcacccacctcctcagatcctgatcaagaacacgccggtacctgcggatcctccaacaacgttcagccaggcgaaattggcttccttcattacgcagtacagcaccggacaggtcagcgtggaaatcgagtgggagctgcagaaggagaacagcaaacgctggaacccagagattcagtacacttcaaactactacaaatctacaaatgtggactttgctgtcaatacagagggaacttattctgagcctcgccccattggtactcgttacctcacccgtaatctgtaa

SEQ ID NO: 323 - protein, 735 aa, Adeno-associated virus
MAADGYLPDWLEDTLSEGTRQWWKLKPGPPPPKPAERHKDDSRGLVLPGYKYLGPFNGLDKGEPVNEADAAALEHDKAYDRQLDSGDNPYLKYNHADAEFQERLKEDTSFGGNLGRAVFQAKKRVLEPLGLVEEPVKTAPGKKRPVEHSPAEPDSSSGTGKAGQQPARKRLNFGQTGDADSVPDPQPLGQPPAAPSGLGSTTMATGSGAPMADNNEGADGVGNSSGNWHCDSQWLGDRVITTSTRTWALPTYNNHLYKQISSQSGASNDNHYFGYSTPWGYFDFNRFHCHFSPRDWQRLINNNWGFRPKRLNFKLFNIQVKEVTQNDGTTTIANNLTSTVQVFTDSEYQLPYVLGSAHQGCLPPFPADVFMVPQYGYLTLNNGSQAVGRSSFYCLEYFPSQMLRTGNNFQFSYTFEDVPFHSSYAHSQSLDRLMNPLIDQYLYYLNKTQSNSGTLQQSRLLFSQAGPTSMSLQAKNWLPGPCYRQQRLSKQANDNNNSNFPWTAATKYHLNGRDSLVNPGPAMASHKDDEEKFFPMHGTLIFGKQGTNANDADLDNVMITDEEEIRTTNPVATEQYGYVSNNLQNSNTGPTTGTVNHQGALPGMVWQDRDVYLQGPIWAKIPHTDGHFHPSPLMGGFGLKHPPPQIMIKNTPVPANPPTNFSSAKFASFITQYSTGQVSVEIEWELQKENSKRWNPEIQYTSNYNKSVNVDFTVDTNGVYSEPRPIGTRYLTRNL

SEQ ID NO: 324 - DNA, 2208 bp, Adeno-associated virus
  source 1..2208: mol_type = genomic DNA
atggctgccgatggttatcttccagattggctcgaggacactctctctgaaggaataagacagtggtggaagctcaaacctggcccaccaccaccaaagcccgcagagcggcatcaggacaacagcaggggtcttgtgcttcctgggtacaagtacctcggaccctccaacggactcgacaaaggagagccggtcaacgaggcagacgccgcggccctcgagcacgacaaggcctacgaccggcagctcgacagcggagacaacccgtacctcaagtacaaccacgccgacgcggagtttcaggagcgtcttaaagaagatacgtcttttgggggcaacctcggacgagcagtcttccaggcgaaaaagagggttcttgaacctctgggcctggttgaggaacctgttaagacggctccgggaaaaaagaggccggtagagcactctcctgtggagccagactcctcctcgggaaccggaaaagcgggccatcagcctgcgagaaagagattgaattttggtcagactggagacgcagactccgtacctgacccccagcctctcggacagccaccagcagcccccacaagtttgggatctactacaatggctacaggcagtggcgcaccaatggcagacaataacgagggtgccgatggagtgggtaattcctcaggaaattggcattgcgattcccaatggctgggcgacagagtcatcaccaccagcacccgaacctgggccctgcccacctacaacaaccacctctacaagcaaatctccagccaatcaggagcctcgaacgacaaccactactttggctgcagcaccccctgggggtattttgacttcaacagattccactgtcacttctccccacgtgattggcaaagactcatcaacaacaactggggattccgacccaagagactcaacttcaagctctttaacattcaagtcaaagaggtcacgcagaatgacggtacgacgacgattgccaataaccttaccagcacggttcaggtgtttactgactcggagtacccgctcccgtacgtcctcggctcggcgcatcaaggatgcctcccgccgtttccagcggacgtcttcatggtcccacagtatggatacctcaccctgaacaacgggagtcaggcggtaggacgctcttccttttactgcctggagtactttccttctcagatgctgcgtaccggaaacaactttaccttcagctacacctttgaggacgttcctttccacagcagctacgctcacagccagagtttggaccggctgatgaatcctctgatcgaccagtatctatattatctgaacaggacacaatcaaatagtggaactcttcagcagtctaggctactgtttagccaagctggacccaccagcatgtctcttcaagctaaaaactggctgcctggaccttgctacagacagcagcgtctttcaaagcaggcaaacgacaacaacaacagcaactttccctggactgcggctacaaagtatcatctaaatggccgggactcgttggttaatccaggaccagctatggccagccacaaagacgatgaagaaaagtttttccccatgcatggaaccctgatatttggtaaacaaggaacaaatgctaacgacgcggatttggagcatgttatgattacagatgaagaagaaatcaggaccaccaatcctgtggctacagagcagtacggaaacgtgtcaaataatttgcaaaactcaaatactggtccaactacagaaaatgtcaatcaccagggagcgttacctggtatggtgtggcaggatcgagacgtgtacctgcagggacccatttgggccaagattcctcacaccgacggacactttcacccttctccactgatgggaggttttggactcaaacacccgcctcctcaaatcatgatcaaaaacactcccgttccagccaatcctcccacaaacttcagttctgccaagtttgcttctttcatcacacagtattccacgggccaggtcagcgtggagattgagtgggagctgcagaaggagaacagcaaacgctggaaccccgagatccagtatacttccaactacaacaaatctgttaatgtggactttactgtggacactaatggtgtgtattcagagccttgccccattggcaccagatacctgactcgtaatctgtaa

SEQ ID NO: 325 - protein, 735 aa, Adeno-associated virus
MAADGYLPDWLEDTLSEGIRQWWKLKPGPPPPKPAERHQDNSRGLVLPGYKYLGPSNGLDKGEPVNEADAAALEHDKAYDRQLDSGDNPYLKYNHADAEFQERLKEDTSFGGNLGRAVFQAKKRVLEPLGLVEEPVKTAPGKKRPVEHSPVEPDSSSGTGKAGHQPARKRLNFGQTGDADSVPDPQPLGQPPAAPTSLGSTTMATGSGAPMADNNEGADGVGNSSGNWHCDSQWLGDRVITTSTRTWALPTYNNHLYKQISSQSGASNDNHYFGCSTPWGYFDFNRFHCHFSPRDWQRLINNNWGFRPKRLNFKLFNIQVKEVTQNDGTTTIANNLTSTVQVFTDSEYPLPYVLGSAHQGCLPPFPADVFMVPQYGYLTLNNGSQAVGRSSFYCLEYFPSQMLRTGNNFTFSYTFEDVPFHSSYAHSQSLDRLMNPLIDQYLYYLNRTQSNSGTLQQSRLLFSQAGPTSMSLQAKNWLPGPCYRQQRLSKQANDNNNSNFPWTAATKYHLNGRDSLVNPGPAMASHKDDEEKFFPMHGTLIFGKQGTNANDADLEHVMITDEEEIRTTNPVATEQYGNVSNNLQNSNTGPTTENVNHQGALPGMVWQDRDVYLQGPIWAKIPHTDGHFHPSPLMGGFGLKHPPPQIMIKNTPVPANPPTNFSSAKFASFITQYSTGQVSVEIEWELQKENSKRWNPEIQYTSNYNKSVNVDFTVDTNGVYSEPCPIGTRYLTRNL

SEQ ID NO: 326 - DNA, 2214 bp, synthetic construct
  misc_feature 1..2214: note = Description of Artificial Sequence: Synthetic polynucleotide
  source 1..2214: mol_type = other DNA
atggctgccgatggttatcttccagattggctcgaggacaaccttagtgaaggaattcgcgagtggtgggctttgaaacctggagcccctcaacccaaggcaaatcaacaacatcaagacaacgctcgaggtcttgtgcttccgggttacaaataccttggacccggcaacggactcgacaagggggagccggtcaacgcagcagacgcggcggccctcgagcacgacaaggcctacgaccagcagctgcaggcgggtgacaatccgtacctgcggtataaccacgccgacgccgagtttcaggagcgtctgcaagaagatacgtcttttgggggcaaccttggcagagcagtcttccaggccaaaaagaggatccttgagcctcttggtctggttgaggaagcagctaaaacggctcctggaaagaagaggcctgtagatcagtctcctcaggaaccggactcatcatctggtgttggcaaatcgggcaaacagcctgccagaaaaagactaaatttcggtcagactggcgactcagagtcagtcccagaccctcaacctctcggagaaccaccagcagcccccacaagtttgggatctaatacaatggcttcaggcggtggcgcaccaatggcagacaataacgagggtgccgatggggtgggtagttcctcgggaaattggcattgcgattcccaatggctgggggacagagtcatcaccaccagcacccgaacctgggccctgcccacctacaacaatcacctctacaagcaaatctccaacgggacatcgggaggagccaccaacgacaacacctacttcggctacagcaccccctgggggtattttgactttaacagattccactgccacttttcaccacgtgactggcagcgactcatcaacaacaactggggattccggcccaagagactcagcttcaagctcttcaacatccaggtcaaggaggtcacgcagaatgaaggcaccaagaccatcgccaataacctcaccagcaccatccaggtgtttacggactcggagtaccagctgccgtacgttctcggctctgcgcaccagggctgcctccctccgttcccggcggacgtgttcatgattccgcaatacggctacctgacgctcaacaatggcagccaagccgtgggacgttcatccttttactgcctggaatatttcccttctcagatgctgagaacgggcaacaactttaccttcagctacacctttgaggaagtgcctttccacagcagctacgcgcacagccagagcttggaccggctgatgaatcctctgattgaccagtacctgtactacttgtctcggactcaaacaacaggaggcacggcaaatacgcagactctgggcttcagccaaggtgggcctaatacaatggccaatcaggcaaagaactggctgccaggaccctgttaccgccaacaacgcgtctcaacgacaaccgggcaaaacaacaatagcaactttgcctggactgctgggaccaaataccatctgaatggaagaaattcattggctaatcctggcatcgctatggcaacacacaaagacgacgaggagcgtttttttcccagtaacgggatcctgatttttggcaaacaaaatgctgccagagacaatgcggattacagcgatgtcatgctcaccagcgaggaagaaatcaaaaccactaaccctgtggctacagaggaatacggtatcgtggcagataacttgcagcagcaaaacacggctcctcaaattggaactgtcaacagccagggggccttacccggtatggtctggcagaaccgggacgtgtacctgcagggtcccatctgggccaagattcctcacacggacggcaacttccacccgtctccgctgatgggcggctttggcctgaaacatcctccgcctcagatcctgatcaagaacacgcctgtacctgcggatcctccgaccaccttcaaccagtcaaagctgaactctttcatcacgcaatacagcaccggacaggtcagcgtggagatcgagtgggagctgcagaaggaaaacagcaagcgctggaacccggagatccagtacacttccaactattacaagtctaataatgttgaatttgctgttaatactgaaggtgtatatagtgaaccccgccccattggcaccagatacctgactcgtaatctgtaa

SEQ ID NO: 327 - protein, 737 aa, synthetic construct
  REGION 1..737: note = Description of Artificial Sequence: Synthetic polypeptide
MAADGYLPDWLEDNLSEGIREWWALKPGAPQPKANQQHQDNARGLVLPGYKYLGPGNGLDKGEPVNAADAAALEHDKAYDQQLQAGDNPYLRYNHADAEFQERLQEDTSFGGNLGRAVFQAKKRILEPLGLVEEAAKTAPGKKRPVDQSPQEPDSSSGVGKSGKQPARKRLNFGQTGDSESVPDPQPLGEPPAAPTSLGSNTMASGGGAPMADNNEGADGVGSSSGNWHCDSQWLGDRVITTSTRTWALPTYNNHLYKQISNGTSGGATNDNTYFGYSTPWGYFDFNRFHCHFSPRDWQRLINNNWGFRPKRLSFKLFNIQVKEVTQNEGTKTIANNLTSTIQVFTDSEYQLPYVLGSAHQGCLPPFPADVFMIPQYGYLTLNNGSQAVGRSSFYCLEYFPSQMLRTGNNFTFSYTFEEVPFHSSYAHSQSLDRLMNPLIDQYLYYLSRTQTTGGTANTQTLGFSQGGPNTMANQAKNWLPGPCYRQQRVSTTTGQNNNSNFAWTAGTKYHLNGRNSLANPGIAMATHKDDEERFFPSNGILIFGKQNAARDNADYSDVMLTSEEEIKTTNPVATEEYGIVADNLQQQNTAPQIGTVNSQGALPGMVWQNRDVYLQGPIWAKIPHTDGNFHPSPLMGGFGLKHPPPQILIKNTPVPADPPTTFNQSKLNSFITQYSTGQVSVEIEWELQKENSKRWNPEIQYTSNYYKSNNVEFAVNTEGVYSEPRPIGTRYLTRNL

SEQ ID NO: 328 - DNA, 2211 bp, synthetic construct
  misc_feature 1..2211: note = Description of Artificial Sequence: Synthetic polynucleotide
  source 1..2211: mol_type = other DNA
atggctgccgatggttatcttccagattggctcgaggacaacctctctgagggcattcgcgagtggtgggacttgaaacctggagccccgaagcccaaagccaaccagcaaaagcaggacgacggccggggtctggtgcttcctggctacaagtacctcggacccttcaacggactcgacaagggggagcccgtcaacgcggcggacgcagcggccctcgagcacgacaaggcctacgaccagcagctcaaagcgggtgacaatccgtacctgcggtataaccacgccgacgccgagtttcaggagcgtctgcaagaagatacgtcttttgggggcaacctcgggcgagcagtcttccaggccaagaagcgggttctcgaacctctcggtctggttgaggaaggcgctaagacggctcctggaaagaaacgtccggtagagcagtcgccacaagagccagactcctcctcgggcatcggcaagacaggccagcagcccgctaaaaagagactcaattttggtcagactggcgactcagagtcagtccccgacccacaacctctcggagaacctccagcaacccccgctgctgtgggacctactacaatggcttcaggcggtggcgcaccaatggcagacaataacgaaggcgccgacggagtgggtaatgcctcaggaaattggcattgcgattccacatggctgggcgacagagtcatcaccaccagcacccgaacatgggccttgcccacctataacaaccacctctacaagcaaatctccagtgcttcaacgggggccagcaacgacaaccactacttcggctacagcaccccctgggggtattttgatttcaacagattccactgccatttctcaccacgtgactggcagcgactcatcaacaacaattggggattccggcccaagagactcaacttcaagctcttcaacatccaagtcaaggaggtcacgacgaatgatggcgtcacgaccatcgctaataaccttaccagcacggttcaagtcttctcggactcggagtaccagctgccgtacgttctcggctctgcccaccagggctgcctgcctccgttcccggcggacgtgttcatgattccccagtacggctacctaacactcaacaacggtagtcaggccgtgggacgctcctccttctactgcctggaatactttccttcgcagatgctgagaaccggcaacaacttccagtttacttacaccttcgaggacgtgcctttccacagcagctacgcccacagccagagcttggaccggctgatgaatcctctgattgaccagtacctgtactacttgtctcggactcaaacaacaggaggcacggcaaatacgcagactctgggcttcagccaaggtgggcctaatacaatggccaatcaggcaaagaactggctgccaggaccctgttaccgccaacaacgcgtctcaacgacaaccgggcaaaacaacaatagcaattttacctggactggtgcttcaaaatataacctcaatgggcgtgaatccatcatcaaccctggcactgctatggcctcacacaaagacgacgaagacaagttctttcccatgagcggtgtcatgatttttggaaaagagagcgccggagcttcaaacactgcattggacaatgtcatgattacagacgaagaggaaattaaagccactaaccctgtggccaccgaaagatttgggaccgtggcagtcaatttccagagcagcagcacagaccctgcgaccggagatgtgcatgctatgggagcattacctggcatggtgtggcaagatagagacgtgtacctgcagggtcccatttgggccaaaattcctcacacagatggacactttcacccgtctcctcttatgggcggctttggactcaagaacccgcctcctcagatcctcatcaaaaacacgcctgttcctgcgaatcctccggcggagttttcagctacaaagtttgcttcattcatcacccaatactccacaggacaagtgagtgtggaaattgaatgggagctgcagaaagaaaacagcaagcgctggaatcccgaagtgcagtacacatccaattatgcaaaatctgccaacgttgattttactgtggacaacaatggactttatactgagcctcgccccattggcacccgttacctcacccgtcccctgtaa

SEQ ID NO: 329 - protein, 736 aa, synthetic construct
  REGION 1..736: note = Description of Artificial Sequence: Synthetic polypeptide
MAADGYLPDWLEDNLSEGIREWWDLKPGAPKPKANQQKQDDGRGLVLPGYKYLGPFNGLDKGEPVNAADAAALEHDKAYDQQLKAGDNPYLRYNHADAEFQERLQEDTSFGGNLGRAVFQAKKRVLEPLGLVEEGAKTAPGKKRPVEQSPQEPDSSSGIGKTGQQPAKKRLNFGQTGDSESVPDPQPLGEPPATPAAVGPTTMASGGGAPMADNNEGADGVGNASGNWHCDSTWLGDRVITTSTRTWALPTYNNHLYKQISSASTGASNDNHYFGYSTPWGYFDFNRFHCHFSPRDWQRLINNNWGFRPKRLNFKLFNIQVKEVTTNDGVTTIANNLTSTVQVFSDSEYQLPYVLGSAHQGCLPPFPADVFMIPQYGYLTLNNGSQAVGRSSFYCLEYFPSQMLRTGNNFQFTYTFEDVPFHSSYAHSQSLDRLMNPLIDQYLYYLSRTQTTGGTANTQTLGFSQGGPNTMANQAKNWLPGPCYRQQRVSTTTGQNNNSNFTWTGASKYNLNGRESIINPGTAMASHKDDEDKFFPMSGVMIFGKESAGASNTALDNVMITDEEEIKATNPVATERFGTVAVNFQSSSTDPATGDVHAMGALPGMVWQDRDVYLQGPIWAKIPHTDGHFHPSPLMGGFGLKNPPPQILIKNTPVPANPPAEFSATKFASFITQYSTGQVSVEIEWELQKENSKRWNPEVQYTSNYAKSANVDFTVDNNGLYTEPRPIGTRYLTRPL

SEQ ID NO: 330 - DNA, 2211 bp, synthetic construct
  misc_feature 1..2211: note = Description of Artificial Sequence: Synthetic polynucleotide
  source 1..2211: mol_type = other DNA
atggctgctgacggttatcttccagattggctcgaggacaacctttctgaaggcattcgagagtggtgggcgctgcaacctggagcccctaaacccaaggcaaatcaacaacatcaggacaacgctcggggtcttgtgcttccgggttacaaatacctcggacccggcaacggactcgacaagggggaacccgtcaacgcagcggacgcggcagccctcgagcacgacaaggcctacgaccagcagctcaaggccggtgacaacccctacctcaagtacaaccacgccgacgccgagttccaggagcggctcaaagaagatacgtcttttgggggcaacctcgggcgagcagtcttccaggccaaaaagaggcttcttgaacctcttggtctggttgaggaagcggctaagacggctcctggaaagaagaggcctgtagatcagtctcctcaggaaccggactcatcatctggtgttggcaaatcgggcaaacagcctgccagaaaaagactaaatttcggtcagactggcgactcagagtcagtcccagaccctcaacctctcggagaaccaccagcagcccccacaagtttgggatctaatacaatggcttcaggcggtggcgcaccaatggcagacaataacgagggtgccgatggagtgggtaattcctcaggaaattggcattgcgattcccaatggctgggcgacagagtcatcaccaccagcaccagaacctgggccctgcccacttacaacaaccatctctacaagcaaatctccagccaatcaggagcttcaaacgacaaccactactttggctacagcaccccttgggggtattttgactttaacagattccactgccacttctcaccacgtgactggcagcgactcattaacaacaactggggattccggcccaagaaactcagcttcaagctcttcaacatccaagttaaagaggtcacgcagaacgatggcacgacgactattgccaataaccttaccagcacggttcaagtgtttacggactcggagtatcagctcccgtacgtgctcgggtcggcgcaccaaggctgtctcccgccgtttccagcggacgtcttcatggtccctcagtatggatacctcaccctgaacaacggaagtcaagcggtgggacgctcatccttttactgcctggagtacttcccttcgcagatgctaaggactggaaataacttccaattcagctataccttcgaggatgtaccttttcacagcagctacgctcacagccagagtttggatcgcttgatgaatcctcttattgatcagtatctgtactacctgaacagaacgcaaggaacaacctctggaacaaccaaccaatcacggctgctttttagccaggctgggcctcagtctatgtctttgcaggccagaaattggctacctgggccctgctaccggcaacagagactttcaaagactgctaacgacaacaacaacagtaactttccttggacagcggccagcaaatatcatctcaatggccgcgactcgctggtgaatccaggaccagctatggccagtcacaaggacgatgaagaaaaatttttccctatgcacggcaatctaatatttggcaaagaagggacaacggcaagtaacgcagaattagataatgtaatgattacggatgaagaagagattcgtaccaccaatcctgtggcaacagagcagtatggaactgtggcaaataacttgcagagctcaaatacagctcccacgactagaactgtcaatgatcagggggccttacctggcatggtgtggcaagatcgtgacgtgtaccttcaaggacctatctgggcaaagattcctcacacggatggacactttcatccttctcctctgatgggaggctttggactgaaacatccgcctcctcaaatcatgatcaaaaatactccggtaccggcaaatcctccgacgactttcagcccggccaagtttgcttcatttatcactcagtactccactggacaggtcagcgtggaaattgagtgggagctacagaaagaaaacagcaaacgttggaatccagagattcagtacacttccaactacaacaagtctgttaatgtggactttactgtagacactaatggtgtttatagtgaacctcgccccattggcacccgttaccttacccgtcccctgtaa

SEQ ID NO: 331 - protein, 736 aa, synthetic construct
  REGION 1..736: note = Description of Artificial Sequence: Synthetic polypeptide
MAADGYLPDWLEDNLSEGIREWWALQPGAPKPKANQQHQDNARGLVLPGYKYLGPGNGLDKGEPVNAADAAALEHDKAYDQQLKAGDNPYLKYNHADAEFQERLKEDTSFGGNLGRAVFQAKKRLLEPLGLVEEAAKTAPGKKRPVDQSPQEPDSSSGVGKSGKQPARKRLNFGQTGDSESVPDPQPLGEPPAAPTSLGSNTMASGGGAPMADNNEGADGVGNSSGNWHCDSQWLGDRVITTSTRTWALPTYNNHLYKQISSQSGASNDNHYFGYSTPWGYFDFNRFHCHFSPRDWQRLINNNWGFRPKKLSFKLFNIQVKEVTQNDGTTTIANNLTSTVQVFTDSEYQLPYVLGSAHQGCLPPFPADVFMVPQYGYLTLNNGSQAVGRSSFYCLEYFPSQMLRTGNNFQFSYTFEDVPFHSSYAHSQSLDRLMNPLIDQYLYYLNRTQGTTSGTTNQSRLLFSQAGPQSMSLQARNWLPGPCYRQQRLSKTANDNNNSNFPWTAASKYHLNGRDSLVNPGPAMASHKDDEEKFFPMHGNLIFGKEGTTASNAELDNVMITDEEEIRTTNPVATEQYGTVANNLQSSNTAPTTRTVNDQGALPGMVWQDRDVYLQGPIWAKIPHTDGHFHPSPLMGGFGLKHPPPQIMIKNTPVPANPPTTFSPAKFASFITQYSTGQVSVEIEWELQKENSKRWNPEIQYTSNYNKSVNVDFTVDTNGVYSEPRPIGTRYLTRPL

SEQ ID NO: 332 - DNA, 2211 bp, synthetic construct
  misc_feature 1..2211: note = Description of Artificial Sequence: Synthetic polynucleotide
  source 1..2211: mol_type = other DNA
atggctgccgatggttatcttccagattggctcgaggacaaccttagtgaaggaattcgcgagtggtgggctttgaaacctggagcccctcaacccaaggcaaatcaacaacatcaagacaacgctcgaggtcttgtgcttccgggttacaaataccttggacccggcaacggactcgacaagggggagccggtcaacgcagcagacgcggcggccctcgagcacgacaaggcctacgaccagcagctcaaggccggagacaacccgtacctcaagtacaaccacgccgacgccgagttccaggagcggctcaaagaagatacgtcttttgggggcaacctcgggcgagcagtcttccaggccaaaaagaggcttcttgaacctcttggtctggttgaggaagcggctaagacggctcctggaaagaagagaccggtagagccatcaccccagcgttctccagactcctctacgggcatcggcaagaaaggccaacagcccgctaaaaagagactcaattttggtcagactggcgactcagagtcagtccccgacccacaacctctcggagaacctccagcaacccccgctgctgtgggacctactacaatggcttcaggcggtggcgcaccaatggcagacaataacgagggtgccgatggagtgggtaattcctcaggaaattggcattgcgattcccaatggctgggcgacagagtcatcaccaccagcaccagaacctgggccctgcccacttacaacaaccatctctacaagcaaatctccagccaatcaggagcttcaaacgacaaccactactttggctacagcaccccttgggggtattttgactttaacagattccactgccacttttcaccacgtgactggcaaagactcatcaacaacaactggggattccgacccaagagactcaacttcaagctcttcaacatccaagtcaaggaggtcacgacgaatgatggcgtcacgaccatcgctaataaccttaccagcacggttcaagtcttctcggactcggagtaccagttgccgtacgtcctcggctctgcgcaccagggctgcctccctccgttcccggcggacgtgttcatgattccgcagtacggctacctaacgctcaacaatggcagccaagccgtgggacgttcatccttttactgcctggaatatttcccttctcagatgctgagaacgggcaacaactttaccttcagctacacttttgaggacgttcctttccacagcagctacgctcacagccagagtctggaccgtctcatgaatcctctcatcgaccagtacctgtattacttgagcagaacaaacactccaagtggaaccaccacgcagtcaaggcttcagttttctcaggccggagcgagtgacattcgggaccagtctaggaactggcttcctggaccctgttaccgccagcagcgcgtttctaaaacaaaaacagacaacaacaacagcaattttacctggactggtgcttcaaaatataaccttaatgggcgtgaatctataatcaaccctggcactgctatggcctcacacaaagacgacgaagacaagttctttcccatgagcggtgtcatgatttttggaaaagagagcgccggagcttcaaacactgcattggacaatgtcatgattacagacgaagaggaaattaaagccactaaccctgtggccaccgaaagatttgggaccgtggcagtcaatttccagagcagcagcacagaccctgcgaccggagatgtgcatgttatgggagccttacctggaatggtgtggcaagacagagacgtatacctgcagggtcctatttgggccaaaattcctcacacggatggacactttcacccgtctcctcttatgggcggctttggactcaagaacccgcctcctcagatcctcatcaaaaacacgcctgttcctgcgaatcctccggcggagttttcagctacaaagtttgcttcattcatcacccaatactccacaggacaagtgagtgtggaaattgaatgggagctgcagaaagaaaacagcaagcgctggaatcccgaagtgcagtacacatccaattatgcaaaatctgccaacgttgattttactgtggacaacaatggactttatactgagcctcgccccattggcacccgttaccttacccgtcccctgtaa

SEQ ID NO: 333 - protein, 736 aa, synthetic construct
  REGION 1..736: note = Description of Artificial Sequence: Synthetic polypeptide
MAADGYLPDWLEDNLSEGIREWWALKPGAPQPKANQQHQDNARGLVLPGYKYLGPGNGLDKGEPVNAADAAALEHDKAYDQQLKAGDNPYLKYNHADAEFQERLKEDTSFGGNLGRAVFQAKKRLLEPLGLVEEAAKTAPGKKRPVEPSPQRSPDSSTGIGKKGQQPAKKRLNFGQTGDSESVPDPQPLGEPPATPAAVGPTTMASGGGAPMADNNEGADGVGNSSGNWHCDSQWLGDRVITTSTRTWALPTYNNHLYKQISSQSGASNDNHYFGYSTPWGYFDFNRFHCHFSPRDWQRLINNNWGFRPKRLNFKLFNIQVKEVTTNDGVTTIANNLTSTVQVFSDSEYQLPYVLGSAHQGCLPPFPADVFMIPQYGYLTLNNGSQAVGRSSFYCLEYFPSQMLRTGNNFTFSYTFEDVPFHSSYAHSQSLDRLMNPLIDQYLYYLSRTNTPSGTTTQSRLQFSQAGASDIRDQSRNWLPGPCYRQQRVSKTKTDNNNSNFTWTGASKYNLNGRESIINPGTAMASHKDDEDKFFPMSGVMIFGKESAGASNTALDNVMITDEEEIKATNPVATERFGTVAVNFQSSSTDPATGDVHVMGALPGMVWQDRDVYLQGPIWAKIPHTDGHFHPSPLMGGFGLKNPPPQILIKNTPVPANPPAEFSATKFASFITQYSTGQVSVEIEWELQKENSKRWNPEVQYTSNYAKSANVDFTVDNNGLYTEPRPIGTRYLTRPL

SEQ ID NO: 334 - DNA, 2211 bp, synthetic construct
  misc_feature 1..2211: note = Description of Artificial Sequence: Synthetic polynucleotide
  source 1..2211: mol_type = other DNA
atggctgccgatggttatcttccagattggctcgaggacaacctctctgagggcattcgcgagtggtgggacttgaaacctggagcccctaaacccaaggcaaatcaacaacatcaggacaacgctcgaggtcttgtgcttccgggttacaaataccttggacccggcaacggactcgacaagggggagccggtcaacgcagcagacgcggcggccctcgagcacgacaaggcctacgaccagcagctcaaggccggagacaacccgtacctcaagtacaaccacgccgacgccgagttccaggagcggctcaaagaagatacgtcttttgggggcaacctcgggcgagcagtcttccaggccaaaaagaggcttcttgaacctcttggtctggttgaggaagcggctaagacggctcctggaaagaagagaccggtagagccatcaccccagcgttctccagactcctctacgggcatcggcaagaaaggccaacagcccgctaaaaagagactcaattttggtcagactggcgactcagagtcagtccccgacccacaacctctcggagaacctccagcaacccccgctgctgtgggacctactacaatggcttcaggcggtggcgcaccaatggcagacaataacgagggtgccgatggagtgggtaattcctcaggaaattggcattgcgattcccaatggctgggcgacagagtcatcaccaccagcaccagaacctgggccctgcccacttacaacaaccatctctacaagcaaatctccagccaatcaggagcttcaaacgacaaccactactttggctacagcaccccttgggggtattttgactttaacagattccactgccacttttcaccacgtgactggcaaagactcatcaacaacaactggggattccgacccaagagactcaacttcaagctcttcaacatccaagtcaaggaggtcacgacgaatgatggcgtcacgaccatcgctaataaccttaccagcacggttcaagtcttctcggactcggagtaccagttgccgtacgtcctcggctctgcgcaccagggctgcctccctccgttcccggcggacgtgttcatgattccgcagtacggctacctaacgctcaacaatggcagccaagccgtgggacgttcatccttttactgcctggaatatttcccttctcagatgctgagaacgggcaacaactttaccttcagctacacttttgaggacgttcctttccacagcagctacgctcacagccagagtctggaccgtctcatgaatcccctcatcgaccagtacctgtattacttgagcagaacaaacactccaagtggaaccaccacgcagtcaaggcttcagttttctcaggccggagcgagtgacattcgggaccagtctaggaactggcttcctggaccctgttaccggcagcagcgcgtttctaaaacaaaaacagacaacaacaacagcaactttacctggactggtgcttcaaaatataaccttaatgggcgtgaatctataatcaaccctggcactgctatggcctcacacaaagacgacgaagacaagttctttcccatgagcggtgtcatgatttttggaaaggagagcgccggagcttcaaacactgcattggacaatgtcatgatcacagacgaagaggaaatcaaagccactaaccccgtggccaccgaaagatttgggactgtggcagtcaatctccagagcagcagcacagaccctgcgaccggagatgtgcatgttatgggagccttacctggaatggtgtggcaagacagagacgtgtacctgcagggtcctatttgggccaaaattcctcacacggatggacactttcacccgtctcctctcatgggcggctttggacttaagcacccgcctcctcagatcctcatcaaaaacacgcctgttcctgcgaatcctccggcagagttttcggctacaaagtttgcttcattcatcacccagtattccacaggacaagtgagtgtggaaattgaatgggagctgcagaaagaaaacagcaagcgctggaatcccgaagtgcagtacacatccaattatgcaaaatctgccaacgttgattttactgtggacaacaatggactttatactgagcctcgccccattggcacccgttacctcacccgtcccctgtaa

SEQ ID NO: 335 - protein, 736 aa, synthetic construct
  REGION 1..736: note = Description of Artificial Sequence: Synthetic polypeptide
MAADGYLPDWLEDNLSEGIREWWDLKPGAPKPKANQQHQDNARGLVLPGYKYLGPGNGLDKGEPVNAADAAALEHDKAYDQQLKAGDNPYLKYNHADAEFQERLKEDTSFGGNLGRAVFQAKKRLLEPLGLVEEAAKTAPGKKRPVEPSPQRSPDSSTGIGKKGQQPAKKRLNFGQTGDSESVPDPQPLGEPPATPAAVGPTTMASGGGAPMADNNEGADGVGNSSGNWHCDSQWLGDRVITTSTRTWALPTYNNHLYKQISSQSGASNDNHYFGYSTPWGYFDFNRFHCHFSPRDWQRLINNNWGFRPKRLNFKLFNIQVKEVTTNDGVTTIANNLTSTVQVFSDSEYQLPYVLGSAHQGCLPPFPADVFMIPQYGYLTLNNGSQAVGRSSFYCLEYFPSQMLRTGNNFTFSYTFEDVPFHSSYAHSQSLDRLMNPLIDQYLYYLSRTNTPSGTTTQSRLQFSQAGASDIRDQSRNWLPGPCYRQQRVSKTKTDNNNSNFTWTGASKYNLNGRESIINPGTAMASHKDDEDKFFPMSGVMIFGKESAGASNTALDNVMITDEEEIKATNPVATERFGTVAVNLQSSSTDPATGDVHVMGALPGMVWQDRDVYLQGPIWAKIPHTDGHFHPSPLMGGFGLKHPPPQILIKNTPVPANPPAEFSATKFASFITQYSTGQVSVEIEWELQKENSKRWNPEVQYTSNYAKSANVDFTVDNNGLYTEPRPIGTRYLTRPL

SEQ ID NO: 336 - DNA, 2214 bp, synthetic construct
  misc_feature 1..2214: note = Description of Artificial Sequence: Synthetic polynucleotide
  source 1..2214: mol_type = other DNA
atggctgccgatggttatcttccagattggctcgaggacaaccttagtgaaggaattcgcgagtggtgggctttgaaacctggagcccctcaacccaaggcaaatcaacaacatcaagacaacgctcgaggtcttgtgcttccgggttacaaataccttggacccggcaacggactcgacaagggggagccggtcaacgcagcagacgcggcggccctcgagcacgacaaggcctacgaccagcagctgcaggcgggtgacaatccgtacctgcggtataaccacgccgacgccgagtttcaggagcgtctgcaagaagatacgtcttttgggggcaaccttggcagagcagtcttccaggccaaaaagaggatccttgagcctcttggtctggttgaggaagcagctaaaacggctcctggaaagaagaggcctgtagatcagtctcctcaggaaccggactcatcatctggtgttggcaaatcgggcaaacagcctgccagaaaaagactaaatttcggtcagactggcgactcagagtcagtcccagaccctcaacctctcggagaaccaccagcagcccccacaagtttgggatctaatacaatggcttcaggcggtggcgcaccaatggcagacaataacgagggtgccgatggggtgggtagttcctcgggaaattggcattgcgattcccaatgactgggggacagagtcatcaccaccagcacccgaacctgggccctgcccacctacaacaatcacctctacaagcaaatctccaacgggacatcgggaggagccaccaacgacaacacctacttcggctacagcaccccctgggggtattttgactttaacagattccactgccacttttcaccacgtgactggcagcgactcatcaacaacaactggggattccggcccaagagactcagcttcaagctcttcaacatccaggtcaaggaggtcacgcagaatgaaggcaccaagaccatcgccaataacctcaccagcaccatccaggtgtttacggactcggagtaccagctgccgtacgttctcggctctgcgcaccagggctgcctccctccgttcccggcggacgtgttcatgattccgcaatacggctacctgacgctcaacaatggcagccaagccgtgggacgttcatccttttactgcctggaatatttcccttctcagatgctgagaacgggcaacaactttaccttcagctacacctttgaggaagtgcctttccacagcagctacgcgcacagccagagcttggaccggctgatgaatcctctgattgaccagtacctgtactacttgtctcggactcaaacaacaggaggcacggcaaatacgcagactctgggcttcagccaaggtgggcctaatacaatggccaatcaggcaaagaactggctgccaggaccctgttaccgccaacaacgcgtctcaacgacaaccgggcaaaacaacaatagcaactttgcctggactgctgggaccaaataccatctgaatggaagaaattcattggctaatcctggcatcgctatggcaacacacaaagacgacgaggagcgtttttttcccagtaacgggatcctgatttttggcaaacaaaatgctgccagagacaatgcggattacagcgatgtcatgctcaccagcgaggaagaaatcaaaaccactaaccctgtggctacagaggaatacggtatcgtggcagataacttgcagcagcaaaacacggctcctcaaattggaactgtcaacagccagggggccttacccggtatggtctggcagaaccgggacgtgtacctgcagggtcccatctgggccaagattcctcacacggacggcaacttccacccgtctccgctgatgggcggctttggcctgaaacatcctccgcctcagatcctgatcaagaacacgcctgtacctgcggatcctccgaccaccttcaaccagtcaaagctgaactctttcatcacgcaatacagcaccggacaggtcagcgtggagatcgagtgggagctgcagaaggaaaacagcaagcgctggaacccggagatccagtacacttccaactattacaagtctaataatgttgaatttgctgttaatactgaaggtgtatatagtgaaccccgccccattggcaccagatacctgactcgtaatctgtaa

SEQ ID NO: 337 - protein, 736 aa, synthetic construct
  REGION 1..736: note = Description of Artificial Sequence: Synthetic polypeptide
MAADGYLPDWLEDNLSEGIREWWALKPGAPQPKANQQHQDNARGLVLPGYKYLGPGNGLDKGEPVNAADAAALEHDKAYDQQLQAGDNPYLRYNHADAEFQERLQEDTSFGGNLGRAVFQAKKRILEPLGLVEEAAKTAPGKKRPVDQSPQEPDSSSGVGKSGKQPARKRLNFGQTGDSESVPDPQPLGEPPAAPTSLGSNTMASGGGAPMADNNEGADGVGSSSGNWHCDSQLGDRVITTSTRTWALPTYNNHLYKQISNGTSGGATNDNTYFGYSTPWGYFDFNRFHCHFSPRDWQRLINNNWGFRPKRLSFKLFNIQVKEVTQNEGTKTIANNLTSTIQVFTDSEYQLPYVLGSAHQGCLPPFPADVFMIPQYGYLTLNNGSQAVGRSSFYCLEYFPSQMLRTGNNFTFSYTFEEVPFHSSYAHSQSLDRLMNPLIDQYLYYLSRTQTTGGTANTQTLGFSQGGPNTMANQAKNWLPGPCYRQQRVSTTTGQNNNSNFAWTAGTKYHLNGRNSLANPGIAMATHKDDEERFFPSNGILIFGKQNAARDNADYSDVMLTSEEEIKTTNPVATEEYGIVADNLQQQNTAPQIGTVNSQGALPGMVWQNRDVYLQGPIWAKIPHTDGNFHPSPLMGGFGLKHPPPQILIKNTPVPADPPTTFNQSKLNSFITQYSTGQVSVEIEWELQKENSKRWNPEIQYTSNYYKSNNVEFAVNTEGVYSEPRPIGTRYLTRNL

SEQ ID NO: 338 - DNA, 2214 bp, synthetic construct
  misc_feature 1..2214: note = Description of Artificial Sequence: Synthetic polynucleotide
  source 1..2214: mol_type = other DNA
atggctgccgatggttatcttccagattggctcgaggacaaccttagtgaaggaattcgcgagtggtgggctttgaaacctggagcccctcaacccaaggcaaatcaacaacatcaagacaacgctcgaggtcttgtgcttccgggttacaaataccttggacccggcaacggactcgacaagggggagccggtcaacgcagcagacgcggcggccctcgagcacgacaaggcctacgaccagcagctgcaggcgggtgacaatccgtacctgcggtataaccacgccgacgccgagtttcaggagcgtctgcaagaagatacgtcttttgggggcaaccttggcagagcagtcttccaggccaaaaagaggatccttgagcctcttggtctggttgaggaagcagctaaaacggctcctggaaagaagaggcctgtagatcagtctcctcaggaaccggactcatcatctggtgttggcaaatcgggcaaacagcctgccagaaaaagactaaatttcggtcagactggcgactcagagtcagtcccagaccctcaacctctcggagaaccaccagcagcccccacaagtttgggatctaatacaatggcttcaggcggtggcgcaccaatggcagacaataacgagggtgccgatggggtgggtagttcctcgggaaattggcattgcgattcccaatggctgggggacagagtcatcaccaccagcacccgaacctgggccctgcccacctacaacaatcacctctacaagcaaatctccaacgggacatcgggaggagccaccaacgacaacacctacttcggctacagcaccccctgggggtattttgactttaacagattccactgccacttttcaccacgtgactggcagcgactcatcaacaacaactggggattccggcccaagagactcagcttcaagctcttcaacatccaggtcaaggaggtcacgcagaatgaaggcaccaagaccatcgccaataacctcaccagcaccatccaggtgtttacggactcggagtaccagctgccgtacgttctcggctctgcgcaccagggctgcctccctccgttcccggcggacgtgttcatgattccgcaatacggctacctgacgctcaacaatggcagccaagccgtgggacgttcatccttttactgcctggaatatttcccttctcagatgctgagaacgggcaacaactttaccttcagctacacctttgaggaagtgccttttcacagcagctacgcgcacagccagagcttggaccggctgatgaatcctctgattgaccagtacctgtactacttgtctcggactcaaacaacaggaggcacggcaaatacgcagactctgggcttcagccaaggtgggcctaatacaatggccaatcaggcaaagaactggctgccaggaccctgttaccgccaacaacgcgtctcaacgacaaccgggcaaaacaacaatagcaactttgcctggactgctgggaccaaataccatctgaatggaagaaattcattggctaatcctggcatcgctatggcaacacacaaagacgacgaggagcgtttttttcccagtaacgggatcctgatttttggcaaacaaaatgctgccagagacaatgcggattacagcgatgtcatgctcaccagcgaggaagaaatcaaaaccactaaccctgtggctacagaggaatacggtatcgtggcagataacttgcagcagcaaaacacggctcctcaaattggaactgtcaacagccagggggccttacccggtatggtctggcagaaccgggacgtgtacctgcagggtcccatctgggccaagattcctcacacggacggcaacttccacccgtctccgctgatgggcggctttggcctgaaacatcctccgcctcagatcctgatcaagaacacgcctgtacctgcggatcctccgaccaccttcaaccagtcaaagctgaactctttcatcacgcaatacagcaccggacaggtcagcgtggagatcgagtgggagctgcagaaggaaaacagcaagcgctggaacccggagatccagtacacttccaactattacaagtctaataatgttgaatttgctgttaatactgaaggtgtatatagtgaaccccgccccattggcaccagatacctgactcgtaatctgtaa

SEQ ID NO: 339 - protein, 737 aa, synthetic construct; identical to SEQ ID NO: 327
  REGION 1..737: note = Description of Artificial Sequence: Synthetic polypeptide

SEQ ID NO: 340 - DNA, 2211 bp, synthetic construct
  misc_feature 1..2211: note = Description of Artificial Sequence: Synthetic polynucleotide
  source 1..2211: mol_type = other DNA
atggctgccgatggttatcttccagattggctcgaggacaacctctctgagggcattcgcgagtggtgggacttgaaacctggagcccctaaacccaaggcaaatcaacaacatcaggacaacgctcgaggtcttgtgcttccgggttacaaataccttggacccggcaacggactcgacaagggggagccggtcaacgcagcagacgcggcggccctcgagcacgacaaggcctacgaccagcagctcaaggccggagacaacccgtacctcaagtacaaccacgccgacgccgagttccaggagcggctcaaagaagatacgtcttttgggggcaacctcgggcgagcagtcttccaggccaaaaagaggcttcttgaacctcttggtctggttgaggaagcggctaagacggctcctggaaagaagagaccggtagagccatcaccccagcgttctccagactcctctacgggcatcggcaagaaaggccaacagcccgctaaaaagagactcaattttggtcagactggcgactcagagtcagtccccgacccacaacctctcggagaacctccagcaacccccgctgctgtgggacctactacaatggcttcaggcggtggcgcaccaatggcagacaataacgagggtgccgatggagtgggtaattcctcaggaaattggcattgcgattcccaatggctgggcgacagagtcatcaccaccagcaccagaacctgggccctgcccacttacaacaaccatctctacaagcaaatctccagccaatcaggagcttcaaacgacaaccactactttggctacagcaccccttgggggtattttgactttaacagattccactgccacttttcaccacgtgactggcaaagactcatcaacaacaactggggattccgacccaagagactcaacttcaagctcttcaacatccaagtcaaggaggtcacgacgaatgatggcgtcacgaccatcgctaataaccttaccagcacggttcaagtcttctcggactcggagtaccagttgccgtacgtcctcggctctgcgcaccagggctgcctccctccgttcccggcggacgtgttcatgattccgcagtacggctacctaacgctcaacaatggcagccaagccgtgggacgttcatccttttactgcctggaatatttcccttctcagatgctgagaacgggcaacaactttaccttcagctacacttttgaggacgttcctttccacagcagctacgctcacagccagagtctggaccgtctcatgaatcctctcatcgaccagtacctgtattacttgagcagaacaaacactccaagtggaaccaccacgcagtcaaggcttcagttttctcaggccggagcgagtgacattcgggaccagtctaggaactggcttcctggaccctgttaccgccagcagcgcgtttctaaaacaaaaacagacaacaacaacagcaattttacctggactggtgcttcaaaatataaccttaatgggcgtgaatctataatcaaccctggcactgctatggcctcacacaaagacgacgaagacaagttctttcccatgagcggtgtcatgatttttggaaaagagagcgccggagcttcaaacactgcattggacaatgtcatgattacagacgaagaggaaattaaagccactaaccctgtggccaccgaaagatttgggaccgtggcagtcaatttccagagcagcagcacagaccctgcgaccggagatgtgcatgctatgggagcattacctggcatggtgtggcaagatagagacgtgtacctgcagggtcccatttgggccaaaattcctcacacagatggacactttcacccgtctcctcttatgggcggctttggactcaagaacccgcctcctcagatcctcatcaaaaacacgcctgttcctgcgaatcctccggcggagttttcagctacaaagtttgcttcattcatcacccaatactccacaggacaagtgagtgtggaaattgaatgggagctgcagaaagaaaacagcaagcgctggaatcccgaagtgcagtacacatccaattatgcaaaatctgccaacgttgattttactgtggacaacaatggactttatactgagcctcgccccattggcacccgttaccttacccgtcccctgtaa

SEQ ID NO: 341 - protein, 736 aa, synthetic construct
  REGION 1..736: note = Description of Artificial Sequence: Synthetic polypeptide
MAADGYLPDWLEDNLSEGIREWWDLKPGAPKPKANQQHQDNARGLVLPGYKYLGPGNGLDKGEPVNAADAAALEHDKAYDQQLKAGDNPYLKYNHADAEFQERLKEDTSFGGNLGRAVFQAKKRLLEPLGLVEEAAKTAPGKKRPVEPSPQRSPDSSTGIGKKGQQPAKKRLNFGQTGDSESVPDPQPLGEPPATPAAVGPTTMASGGGAPMADNNEGADGVGNSSGNWHCDSQWLGDRVITTSTRTWALPTYNNHLYKQISSQSGASNDNHYFGYSTPWGYFDFNRFHCHFSPRDWQRLINNNWGFRPKRLNFKLFNIQVKEVTTNDGVTTIANNLTSTVQVFSDSEYQLPYVLGSAHQGCLPPFPADVFMIPQYGYLTLNNGSQAVGRSSFYCLEYFPSQMLRTGNNFTFSYTFEDVPFHSSYAHSQSLDRLMNPLIDQYLYYLSRTNTPSGTTTQSRLQFSQAGASDIRDQSRNWLPGPCYRQQRVSKTKTDNNNSNFTWTGASKYNLNGRESIINPGTAMASHKDDEDKFFPMSGVMIFGKESAGASNTALDNVMITDEEEIKATNPVATERFGTVAVNFQSSSTDPATGDVHAMGALPGMVWQDRDVYLQGPIWAKIPHTDGHFHPSPLMGGFGLKNPPPQILIKNTPVPANPPAEFSATKFASFITQYSTGQVSVEIEWELQKENSKRWNPEVQYTSNYAKSANVDFTVDNNGLYTEPRPIGTRYLTRPL

SEQ ID NO: 342 - DNA, 2211 bp, synthetic construct
  misc_feature 1..2211: note = Description of Artificial Sequence: Synthetic polynucleotide
  source 1..2211: mol_type = other DNA
atggctgccgatggttatcttccagattggctcgaggacaaccttagtgaaggaattcgcgagtggtgggcgctgaaacctggagccccgaagcccaaagccaaccagcaaaagcaggacgacggccggggtctggtgcttccgggttacaaatacctcggacccggtaacggactcgacaaaggagagccggtcaacgaggcggacgcggcagccctcgagcacgacaaggcctacgaccagcagctcaaagcgggtgacaatccgtacctgcggtataaccacgccgacgccgagtttcaggagcgtctgcaagaagatacgtcttttgggggcaacctcgggcgagcagtcttccaggccaagaagcgggttctcgaacctctcggtctggttgaggaaggcgctaagacggctcccggaaagaaacgtccggtagagcagtcgccacaagagccagactcctctacgggcatcggcaagaaaggccaacagcccgccagaaaaagactcaatttcggtcagactggcgactcagagtcagttccagaccctcaacctctcggagaacctccagcagcgccctctggtgtgggacctactacaatggcttcaggcggtggcgcaccaatggcagacaataacgaaggcgccgacggagtgggtaatgcctcaggaaattggcattgcgattccacatggctgggcgacagagtcatcaccaccagcacccgaacatgggccttgcccacctataacaaccacctctacaagcaaatctccagtgcttcaacgggggccagcaacgacaacacctacttcggctacagcaccccctgggggtattttgatttcaacagattccactgccatttctcaccacgtgactggcagcgactcatcaacaacaattggggattccggcccaagagactcaacttcaaactcttcaacatccaagtcaaggaggtcacgacgaatgatggcgtcacgaccatcgctaataaccttaccagcacggttcaagtcttctcggactcggagtaccagttgccgtacgtcctcggctctgcgcaccagggctgcctccctccgttcccggcggacgtgttcatgattccgcagtacggctacctaacgctcaacaatggcagccaggcagtgggacggtcatccttttactgcctggaatatttcccatcgcagatgctgagaacgggcaataactttaccttcagctacaccttcgaggacgtgcctttccacagcagctacgcgcacagccagagcctggaccggctgatgaatcctctcatcgaccagtacctgtattacctgaacagaactcagaatcagtccggaagtgcccaaaacaaggacttgctgtttagccgggggtctccagctggcatgtctgttcagcccaaaaactggctacctggaccctgttatcggcagcagcgcgtttctaaaacaaaaacagacaacaacaacagcaattttacctggactggtgcttcaaaatataacctcaatgggcgtgaatccatcatcaaccctggcactgctatggcctcacacaaagacgacgaagacaagttctttcccatgagcggtgtcatgatttttggaaaagagagcgccggagcttcaaacactgcattggacaatgtcatgattacagacgaagaggaaattaaagccactaaccctgtggccaccgaaagatttgggaccgtggcagtcaatttccagagcagcagcacagaccctgcgaccggagatgtgcatgttatgggagccttacctggaatggtgtggcaagacagagacgtatacctgcagggtcctatttgggccaaaattcctcacacagatggacactttcacccgtctcctcttatgggcggctttggactcaagaacccgcctcctcagatcctcatcaaaaacacgcctgttcctgcgaatcctccggcagagttttcggctacaaagtttgcttcattcatcacccagtattccacaggacaagtgagcgtggagattgaatgggagctgcagaaagaaaacagcaaacgctggaatcccgaagtgcagtatacatctaactatgcaaaatctgccaacgttgatttcactgtggacaacaatggactttatactgagcctcgccccattggcacccgttacctcacccgtcccctgtaa

SEQ ID NO: 343 - protein, 736 aa, synthetic construct
  REGION 1..736: note = Description of Artificial Sequence: Synthetic polypeptide
MAADGYLPDWLEDNLSEGIREWWALKPGAPKPKANQQKQDDGRGLVLPGYKYLGPGNGLDKGEPVNEADAAALEHDKAYDQQLKAGDNPYLRYNHADAEFQERLQEDTSFGGNLGRAVFQAKKRVLEPLGLVEEGAKTAPGKKRPVEQSPQEPDSSTGIGKKGQQPARKRLNFGQTGDSESVPDPQPLGEPPAAPSGVGPTTMASGGGAPMADNNEGADGVGNASGNWHCDSTWLGDRVITTSTRTWALPTYNNHLYKQISSASTGASNDNTYFGYSTPWGYFDFNRFHCHFSPRDWQRLINNNWGFRPKRLNFKLFNIQVKEVTTNDGVTTIANNLTSTVQVFSDSEYQLPYVLGSAHQGCLPPFPADVFMIPQYGYLTLNNGSQAVGRSSFYCLEYFPSQMLRTGNNFTFSYTFEDVPFHSSYAHSQSLDRLMNPLIDQYLYYLNRTQNQSGSAQNKDLLFSRGSPAGMSVQPKNWLPGPCYRQQRVSKTKTDNNNSNFTWTGASKYNLNGRESIINPGTAMASHKDDEDKFFPMSGVMIFGKESAGASNTALDNVMITDEEEIKATNPVATERFGTVAVNFQSSSTDPATGDVHVMGALPGMVWQDRDVYLQGPIWAKIPHTDGHFHPSPLMGGFGLKNPPPQILIKNTPVPANPPAEFSATKFASFITQYSTGQVSVEIEWELQKENSKRWNPEVQYTSNYAKSANVDFTVDNNGLYTEPRPIGTRYLTRPL

SEQ ID NO: 344 - DNA, 2205 bp, synthetic construct
  misc_feature 1..2205: note = Description of Artificial Sequence: Synthetic polynucleotide
  source 1..2205: mol_type = other DNA
atggctgctgacggttatcttccagattggctcgaggacaacctttctgaaggcattcgtgagtggtgggctctgaaacctggagtccctcaacccaaagcgaaccaacaacaccaggacaaccgtcggggtcttgtgcttccgggttacaaatacctcggacccggtaacggactcgacaaaggagagccggtcaacgaggcggacgcggcagccctcgaacacgacaaggcctacgaccagcagctcaaggccggagacaacccgtacctcaagtacaaccacgccgacgccgagttccaggagcggctcaaagaagatacgtcttttgggggcaacctcgggcgagcagtcttccaggccaaaaagaggcttcttgaacctcttggtctggttgaggaagcggctaagacggctcctggaaagaagaggcctgtagagcagtctcctcaggaaccggactcctccgcgggtattggcaaatcgggtgcacagcccgctaaaaagagactcaatttcggtcagactggcgacacagagtcagtcccagaccctcaaccaatcggagaacctcccgcagccccctcaggtgtgggatctcttacaatggcttcaggtggtggcgcaccagtggcagacaataacgaaggtgccgatggagtgggtagttcctcgggaaattggcattgcgattcccaatggctgggggacagagtcatcaccaccagcacccgaacctgggccctgcccacctacaacaaccacctctacaaacaaatttccagccaatcaggagcctcgaacgacaatcactactttggctacagcaccccttgggggtattttgacttcaacagattccactgccacttttcaccacgtgactggcagcgactcatcaacaacaactggggattccggcccaagagactcagcttcaagctcttcaacatccaggtcaaagaggttacggacaacaatggagtcaagaccatcgccaataaccttaccagcacggtccaggtcttcacggactcagactatcagctcccgtacgtgctcgggtcggctcacgagggctgcctcccgccgttcccagcggacgttttcatgattcctcagtacgggtatctgacgcttaatgatggaagccaggccgtgggtcgttcgtccttttactgcctggaatatttcccgtcgcaaatgctaagaacgggtaacaacttccagttcagctacgagtttgagaacgtacctttccatagcagctacgctcacagccaaagcctggaccgactaatgaatccactcatcgaccaatacttgtactatctctcaaagactattaacggttctggacagaatcaacaaacgctaaaattcagtgtggccggacccagcaacatggctgtccagggaagaaactacatacctggacccagctaccgacaacaacgtgtctcaaccactgtgactcaaaacaacaacagcgaatttgcttggcctggagcttcttcttgggctctcaatggacgtaatagcttgatgaatcctggacctgctatggccagccacaaagaaggagaggaccgtttctttcctttgtctggatctttaatttttggcaaacaaggaactggaagagacaacgtggatgcggacaaagtcatgataaccaacgaagaagaaattaaaactactaacccggtagcaacggagtcctatggacaagtggccacaaaccaccagagtgcccaagcacaggcgcagaccggctgggttcaaaaccaaggaatacttccgggtatggtttggcaggacagagatgtgtacctgcaaggacccatctgggccaagattcctcacacggacggcaacttccacccgtctccgctgatgggcggctttggcctgaaacatcctccgcctcagatcctgatcaagaacacgcctgtacctgcggatcctccgaccaccttcaaccagtcaaagctgaactctttcatcacgcaatacagcaccggacaggtcagcgtggaaattgaatgggagctgcagaaggaaaacagcaagcgctggaatcccgaagtgcagtatacatctaactatgcaaaatctgccaacgttgatttcactgtggacaacaatggactttatactgagcctcgccccattggcacccgttacctcacccgtcccctgtaa

SEQ ID NO: 345 - protein, 734 aa, synthetic construct
  REGION 1..734: note = Description of Artificial Sequence: Synthetic polypeptide
MAADGYLPDWLEDNLSEGIREWWALKPGVPQPKANQQHQDNRRGLVLPGYKYLGPGNGLDKGEPVNEADAAALEHDKAYDQQLKAGDNPYLKYNHADAEFQERLKEDTSFGGNLGRAVFQAKKRLLEPLGLVEEAAKTAPGKKRPVEQSPQEPDSSAGIGKSGAQPAKKRLNFGQTGDTESVPDPQPIGEPPAAPSGVGSLTMASGGGAPVADNNEGADGVGSSSGNWHCDSQWLGDRVITTSTRTWALPTYNNHLYKQISSQSGASNDNHYFGYSTPWGYFDFNRFHCHFSPRDWQRLINNNWGFRPKRLSFKLFNIQVKEVTDNNGVKTIANNLTSTVQVFTDSDYQLPYVLGSAHEGCLPPFPADVFMIPQYGYLTLNDGSQAVGRSSFYCLEYFPSQMLRTGNNFQFSYEFENVPFHSSYAHSQSLDRLMNPLIDQYLYYLSKTINGSGQNQQTLKFSVAGPSNMAVQGRNYIPGPSYRQQRVSTTVTQNNNSEFAWPGASSWALNGRNSLMNPGPAMASHKEGEDRFFPLSGSLIFGKQGTGRDNVDADKVMITNEEEIKTTNPVATESYGQVATNHQSAQAQAQTGWVQNQGILPGMVWQDRDVYLQGPIWAKIPHTDGNFHPSPLMGGFGLKHPPPQILIKNTPVPADPPTTFNQSKLNSFITQYSTGQVSVEIEWELQKENSKRWNPEVQYTSNYAKSANVDFTVDNNGLYTEPRPIGTRYLTRPL

SEQ ID NO: 346 - DNA, 2211 bp, synthetic construct
  misc_feature 1..2211: note = Description of Artificial Sequence: Synthetic polynucleotide
  source 1..2211: mol_type = other DNA
atggctgccgatggttatcttccagattggctcgaggacaacctctctgagggcattcgcgagtggtgggcgctgaaacctggagccccgaagcccaaagccaaccagcaaaagcaggacgacggccggggtctggtgcttcctggctacaagtacctcggacccttcaacggactcgacaagggggagcccgtcaacgcggcggacgcagcggccctcgagcacgacaaggcctacgaccagcagctgcaggcgggtgacaatccgtacctgcggtataaccacgccgacgccgagtttcaggagcgtctgcaagaagatacgtcttttgggggcaacctcgggcgagcagtcttccaggccaagaagtgggttctcgaacctctcggtctggttgaggaaggcgctaagacggctcctggaaagaaacgtccggtagagcagtcgccacaagagccagactcctcctcgggcatcggcaagacaggccagcagcccgctaaaaagagactcaattttggtcagactggcgactcagagtcagtccccgacccacaacctctcggagaacctccagcaacccccgctgctgtgggacctactacaatggcttcaggcggtggcgcaccaatggcagacaataacgaaggcgccgacggagtgggtaatgcctcaggaaattggcattgcgattccacatggctgggcgacagagtcatcaccaccagcacccgcacctgggccttgcccacctacaataaccacctctacaagcaaatctccagtgcttcaacgggggccagcaacgacaaccactacttcggctacagcaccccctgggggtattttgatttcaacagattccactgccatttctcaccacgtgactggcagcgactcatcaacaacaattggggattccggcccaagagactcaacttcaagctcttcaacatccaagtcaaggaggtcacgacgaatgatggcgtcacaaccatcgctaataaccttaccagcacggttcaagtcttctcggactcggagtaccagcttccgtacgtcctcggctctgcgcaccagggctgcctccctccgttcccggcggacgtgttcatgattccgcaatacggctacctgacgctcaacaatggcagccaagccgtgggacgttcatccttttactgcctggaatatttcccttctcagatgctgagaacgggcaacaactttaccttcagctacacctttgaggaagtgcctttccacagcagctacgcgcacagccagagcctggaccggctgatgaatcctctcatcgaccaatacctgtattacctgaacagaactcaaaatcagtccggaagtgcccaaaacaaggacttgctgtttagccgtgggtctccagctggcatgtctgttcagcccaaaaactggctacctggaccctgttatcggcagcagcgcgtttctaaaacaaaaacagacaacaacaacagcaattttacctggactggtgcttcaaaatataacctcaatgggcgtgaatccatcatcaaccctggcactgctatggcctcacacaaagacgacgaagacaagttctttcccatgagcggtgtcatgatttttggaaaggagagcgccggagcttcaaacactgcattggacaatgtcatgatcaccgacgaagaggaaatcaaagccactaaccccgtggccaccgaaagatttgggactgtggcagtcaatctccagagcagcagcacagaccctgcgaccggagatgtgcatgttatgggagccttacctggcatggtgtggcaagatagagacgtgtacctgcagggtcccatttgggccaaaattcctcacacagatggacactttcacccgtctcctcttatgggcggctttggactcaagaacccgcctcctcagatcctcatcaaaaacacgcctgttcctgcgaatcctccggcggagttttcagctacaaagtttgcttcattcatcacccaatactccacaggacaagtgagtgtggaaattgaatgggagctgcagaaagaaaacagcaagcgctggaatcccgaagtgcagtacacatccaattatgcaaaatctgccaacgttgattttactgtggacaacaatggactttatactgagcctcgccccattggcacccgttacctcacccgtcccctgtaa

SEQ ID NO: 347 - protein, 736 aa, synthetic construct
  REGION 1..736: note = Description of Artificial Sequence: Synthetic polypeptide
MAADGYLPDWLEDNLSEGIREWWALKPGAPKPKANQQKQDDGRGLVLPGYKYLGPFNGLDKGEPVNAADAAALEHDKAYDQQLQAGDNPYLRYNHADAEFQERLQEDTSFGGNLGRAVFQAKKWVLEPLGLVEEGAKTAPGKKRPVEQSPQEPDSSSGIGKTGQQPAKKRLNFGQTGDSESVPDPQPLGEPPATPAAVGPTTMASGGGAPMADNNEGADGVGNASGNWHCDSTWLGDRVITTSTRTWALPTYNNHLYKQISSASTGASNDNHYFGYSTPWGYFDFNRFHCHFSPRDWQRLINNNWGFRPKRLNFKLFNIQVKEVTTNDGVTTIANNLTSTVQVFSDSEYQLPYVLGSAHQGCLPPFPADVFMIPQYGYLTLNNGSQAVGRSSFYCLEYFPSQMLRTGNNFTFSYTFEEVPFHSSYAHSQSLDRLMNPLIDQYLYYLNRTQNQSGSAQNKDLLFSRGSPAGMSVQPKNWLPGPCYRQQRVSKTKTDNNNSNFTWTGASKYNLNGRESIINPGTAMASHKDDEDKFFPMSGVMIFGKESAGASNTALDNVMITDEEEIKATNPVATERFGTVAVNLQSSSTDPATGDVHVMGALPGMVWQDRDVYLQGPIWAKIPHTDGHFHPSPLMGGFGLKNPPPQILIKNTPVPANPPAEFSATKFASFITQYSTGQVSVEIEWELQKENSKRWNPEVQYTSNYAKSANVDFTVDNNGLYTEPRPIGTRYLTRPL

SEQ ID NO: 348 - DNA, 2214 bp, synthetic construct
  misc_feature 1..2214: note = Description of Artificial Sequence: Synthetic polynucleotide
  source 1..2214: mol_type = other DNA
atggctgccgatggttatcttccagattggctcgaggacaaccttagtgaaggaattcgcgagtggtgggctttgaaacctggagcccctcaacccaaggcaaatcaacaacatcaagacaacgctcgaggtcttgtgcttccgggttacaaataccttggacccggcaacggactcgacaagggggagccggtcaacgcagcagacgcggcggccctcgagcacgacaaggcctacgaccagcagctgcaggcgggtgacaatccgtacctgcggtataaccacgccgacgccgagtttcaggagcgtctgcaagaagatacgtcttttgggggcaaccttggcagagcagtcttccaggccaaaaagaggatccttgagcctcttggtctggttgaggaagcagctaaaacggctcctggaaagaagaggcctgtagatcagtctcctcaggaaccggactcatcatctggtgttggcaaatcgggcaaacagcctgccagaaaaagactaaatttcggtcagactggcgactcagagtcagtcccagaccctcaacctctcggagaaccaccagcagcccccacaagtttgggatctaatacaatggcttcaggcggtggcgcaccaatggcagacaataacgagggtgccgatggggtgggtagttcctcgggaaattggcattgcgattcccaatggctgggggacagagtcatcaccaccagcacccgaacctgggccctgcccacctacaacaatcacctctacaagcaaatctccaacgggacatcgggaggagccaccaacgacaacacctacttcggctacagcaccccctgggggtattttgactttaacagattccactgccacttttcaccacgtgactggcagcgactcatcaacaacaactggggattccggcccaagagactcagcttcaagctcttcaacatccaggtcaaggaggtcacgcagaatgaaggcaccaagaccatcgccaataacctcaccagcaccatccaggtgtttacggactcggagtaccagctgccgtacgttctcggctcggcgcaccagggctgcctccctccgttcccggcggacgtcttcatggtgccacagtatggatacctgacgctcaacaatggcagccaagccgtgggacgttcatccttttactgcctggaatatttcccttctcagatgctgagaacgggcaacaactttaccttcagctacacctttgaggaagtgcctttccacagcagctacgcgcacagccagagcttggaccggctgatgaatcctctgattgaccagtacctgtactacttgtctcggactcaaacaacaggaggcacggcaaatacgcagactctgggcttcagccaaggtgggcctaatacaatggccaatcaggcaaagaactggctgccaggaccctgttaccgccaacaacgcgtctcaacgacaaccgggcaaaacaacaatagcaactttgcctggactgctgggaccaaataccatctgaatggaagaaattcattggctaatcctggcatcgctatggcaacacacaaagacgacgaggagcgtttttttcccagtaacgggatcctgatttttggcaaacaaaatgctgccagagacaatgcggattacagcgatgtcatgctcaccagcgaggaagaaatcaaaaccactaaccctgtggctacagaggaatacggtatcgtggcagataacttgcagcagcaaaacacggctcctcaaattggaactgtcaacagccagggggacttacccggtatggtctggcagaaccgggacgtgtacctgcagggtcccatctgggccaagattcctcacacggacggcaacttccacccgtctccgctgatgggcggctttggcctgaaacatcctccgcctcagatcctgatcaagaacacgcctgtacctgcggatcctccgaccaccttcaaccagtcaaagctgaactctttcatcacgcaatacagcaccggacaggtcagcgtggagatcgagtgggagctgcagaaggaaaacagcaagcgctggaacccggagatccagtacacttccaactattacaagtctaataatgttgaatttgctgttaatactgaaggtgtatatagtgaaccccgccccattggcaccagatacctgactcgtaatctgtaa

SEQ ID NO: 349 - protein, 737 aa, synthetic construct
  REGION 1..737: note = Description of Artificial Sequence: Synthetic polypeptide
MAADGYLPDWLEDNLSEGIREWWALKPGAPQPKANQQHQDNARGLVLPGYKYLGPGNGLDKGEPVNAADAAALEHDKAYDQQLQAGDNPYLRYNHADAEFQERLQEDTSFGGNLGRAVFQAKKRILEPLGLVEEAAKTAPGKKRPVDQSPQEPDSSSGVGKSGKQPARKRLNFGQTGDSESVPDPQPLGEPPAAPTSLGSNTMASGGGAPMADNNEGADGVGSSSGNWHCDSQWLGDRVITTSTRTWALPTYNNHLYKQISNGTSGGATNDNTYFGYSTPWGYFDFNRFHCHFSPRDWQRLINNNWGFRPKRLSFKLFNIQVKEVTQNEGTKTIANNLTSTIQVFTDSEYQLPYVLGSAHQGCLPPFPADVFMVPQYGYLTLNNGSQAVGRSSFYCLEYFPSQMLRTGNNFTFSYTFEEVPFHSSYAHSQSLDRLMNPLIDQYLYYLSRTQTTGGTANTQTLGFSQGGPNTMANQAKNWLPGPCYRQQRVSTTTGQNNNSNFAWTAGTKYHLNGRNSLANPGIAMATHKDDEERFFPSNGILIFGKQNAARDNADYSDVMLTSEEEIKTTNPVATEEYGIVADNLQQQNTAPQIGTVNSQGDLPGMVWQNRDVYLQGPIWAKIPHTDGNFHPSPLMGGFGLKHPPPQILIKNTPVPADPPTTFNQSKLNSFITQYSTGQVSVEIEWELQKENSKRWNPEIQYTSNYYKSNNVEFAVNTEGVYSEPRPIGTRYLTRNL

SEQ ID NO: 350 - DNA, 2205 bp, synthetic construct
  misc_feature 1..2205: note = Description of Artificial Sequence: Synthetic polynucleotide
  source 1..2205: mol_type = other DNA
atggctgctgacggttatcttccagattggctcgaggacaacctttctgaaggcattcgtgagtggtgggctctgaaacctggagtccctcaacccaaagcgaaccaacaacaccaggacaactgtcggggtcttgtgcttccgggttacaaatacctcggacccggtaacggactcgacaaaggagagccggtcaacgaggcggacgcggcagccctcgaacacgacaaggcctacgaccagcagctcaaggccggagacaacccgtacctcaagtacaaccacgccgacgccgagttccaggagcggctcaaagaagatacgtcttttgggggcaacctcgggcgagcagtcttccagaccaaaaagaggcttcttgaacctcttggtctggttgaggaagcggctaagacggctcctggaaagaagaggcctgtagagcagtctcctcaggaaccggactcctccgcgggtattggcaaatcgggtgcacagcccgctaaaaagagactcaatttcggtcagactggcgacacagagtcagtcccagaccctcaaccaatcggagaacctcccgcagccccctcaggtgtgggatctcttacaatggcttcaggtggtggcgcaccagtggcagacaataacgaaggtgccgatggagtgggtagttcctcgggaaattggcattgcgattcccaatggctgggggacagagtcatcaccaccagcacccgaacctgggccctgcccacctacaacaaccacctctacaaacaaatttccagccaatcaggagcctcgaacgacaatcactactttggctacagcaccccttgggggtattttgacttcaacagattccactgccacttttcaccacgtgactggcagcgactcatcaacaacaactggggattccggcccaagagactcagcttcaagctcttcaacatccaggtcaaagaggttacggacaacaatggagtcaagaccatcgccaataaccttaccagcacggtccaggtcttcacggactcagactatcagctcccgtacgtgctcgggtcggctcacgagggctgcctcccgccgttcccagcggacgttttcatgattcctcagtacgggtatctgacgcttaatgatggaagccaggccgtgggtcgttcgtccttttactgcctggaatatttcccgtcgcaaatgctaagaacgggtaacaacttccagttcagctacgagtttgagaacgtacctttccatagcagctacgctcacagccaaagcctggaccgactaatgaatccactcatcgaccaatacttgtactatctctcaaagactattaacggttctggacagaatcaacaaacgctaaaattcagtgtggccggacccagcaacatggctgtccagggaagaaactacatacctggacccagctaccgacaacaacgtgtctcaaccactgtgactcaaaacaacaacagcgaatttgcttggcctggagcttcttcttgggctctcaatggacgtaatagcttgatgaatcctggacctgctatggccagccacaaagaaggagaggaccgtttctttcctttgtctggatctttaatttttggcaaacaaggaactggaagagacaacgtggatgcggacaaagtcatgataaccaacgaagaagaaattaaaactactaacccggtagcaacggagtcctatggacaagtggccacaaaccaccagagtgcccaagcacaggcgcagaccggctgggttcaaaaccaaggaatacttccgggtatggtttggcaggacagagatgtgtacctgcaaggacccatctgggccaagattcctcacacggacggcaacttccacccgtctccgctgatgggcggctttggcctgaaacatcctccgcctcagatcctgatcaagaacacgcctgttcctgcgaatcctccggcggagttttcagctacaaagtttgcttcattcatcacccagtactccacaggacaagtgagtgtggaaattgaatgggagctgcagaaagaaaacagcaagcgctggaatcccgaagtgcagtacacatccaattatgcaaaatctgccaacgttgattttactgtggacaacaatggactttatactgagcctcgccccattggcacccgttaccttaccaaacctctgtaa

SEQ ID NO: 351 - protein, 734 aa, synthetic construct
  REGION 1..734: note = Description of Artificial Sequence: Synthetic polypeptide
MAADGYLPDWLEDNLSEGIREWWALKPGVPQPKANQQHQDNCRGLVLPGYKYLGPGNGLDKGEPVNEADAAALEHDKAYDQQLKAGDNPYLKYNHADAEFQERLKEDTSFGGNLGRAVFQTKKRLLEPLGLVEEAAKTAPGKKRPVEQSPQEPDSSAGIGKSGAQPAKKRLNFGQTGDTESVPDPQPIGEPPAAPSGVGSLTMASGGGAPVADNNEGADGVGSSSGNWHCDSQWLGDRVITTSTRTWALPTYNNHLYKQISSQSGASNDNHYFGYSTPWGYFDFNRFHCHFSPRDWQRLINNNWGFRPKRLSFKLFNIQVKEVTDNNGVKTIANNLTSTVQVFTDSDYQLPYVLGSAHEGCLPPFPADVFMIPQYGYLTLNDGSQAVGRSSFYCLEYFPSQMLRTGNNFQFSYEFENVPFHSSYAHSQSLDRLMNPLIDQYLYYLSKTINGSGQNQQTLKFSVAGPSNMAVQGRNYIPGPSYRQQRVSTTVTQNNNSEFAWPGASSWALNGRNSLMNPGPAMASHKEGEDRFFPLSGSLIFGKQGTGRDNVDADKVMITNEEEIKTTNPVATESYGQVATNHQSAQAQAQTGWVQNQGILPGMVWQDRDVYLQGPIWAKIPHTDGNFHPSPLMGGFGLKHPPPQILIKNTPVPANPPAEFSATKFASFITQYSTGQVSVEIEWELQKENSKRWNPEVQYTSNYAKSANVDFTVDNNGLYTEPRPIGTRYLTKPL

SEQ ID NO: 352 - DNA, 2211 bp, synthetic construct
  misc_feature 1..2211: note = Description of Artificial Sequence: Synthetic polynucleotide
  source 1..2211: mol_type = other DNA
atggctgccgatggttatcttccagattggctcgaggacaacctctctgagggcattcgcgagtggtgggacttgaaacctggagcccctaaacccaaggcaaatcaacaacatcaggacaacgctcgaggtcttgtgcttccgggttacaaataccttggacccggcaacggactcgacaagggggagccggtcaacgcagcagacgcggcggccctcgagcacgacaaggcctacgaccagcagctcaaggccggagacaacccgtacctcaagtacaaccacgccgacgccgagttccaggagcggctcaaagaagatacgtcttttgggggcaacctcgggcgagcagtcttccaggccaaaaagaggcttcttgaacctcttggtctggttgaggaagcggctaagacggctcctggaaagaagagaccggtagagccatcaccccagcgttctccagactcctctacgggcatcggcaagaaaggccaacagcccgctaaaaagagactcaattttggtcagactggcgactcagagtcagtccccgacccacaacctctcggagaacctccagcaacccccgctgctgtgggacctactacaatggcttcaggcggtggcgcaccaatggcagacaataacgagggtgccgatggagtgggtaattcctcaggaaattggcattgcgattcccaatggctgggcgacagagtcatcaccaccagcaccagaacctgggccctgcccacttacaacaaccatctctacaagcaaatctccagccaatcaggagcttcaaacgacaaccactactttggctacagcaccccttgggggtattttgactttaacagattccactgccacttttcaccacgtgactggcaaagactcatcaacaacaactggggattccgacccaagagactcaacttcaagctcttcaacatccaagtcaaggaggtcacgacgaatgatggcgtcacgaccatcgctaataaccttaccagcacggttcaagtcttctcggactcggagtaccagttgccgtacgtcctcggctctgcgcaccagggctgcctccctccgttcccggcggacgtgttcatgattccgcagtacggctacctaacgctcaacaatggcagccaagccgtgggacgttcatccttttactgcctggaatatttcccttctcagatgctgagaacgggcaacaactttaccttcagctacacttttgaggacgttcctttccacagcagctacgctcacagccagagtctggaccgtctcatgaatcctctcatcgaccagtacctgtattacttgagcagaacaaacactccaagtggaaccaccacgcagtcaaggcttcagttttctcaggccggagcgagtgacattcgggaccagtctaggaactggcttcctggaccctgttaccgccagcagcgcgtttctaaaacaaaaacagacaacaacaacagcaattttacctggactggtgcttcaaaatataaccttaatgggcgtgaatctataatcaaccctggcactgctatggcctcacacaaagacgacgaagacaagttctttcccatgagcggtgtcatgatttttggaaaagagagcgccggagcttcaaacactgcattggacaatgtcatgatcacagacgaagaggaaatcaaagccactaaccccgtggccaccgaaagatttgggactgtggcagtcaatctccagagcagcagcacagaccctgcgaccggagatgtgcatgttatgggagcattacctggcatggtgtggcaagatagagacgtgtacctgcagggtcccatttgggccaaaattcctcacacagatggacactttcacccgtctcctcttatgggcggctttggactcaagaacccgcctcctcagatcctcatcaaaaacacgcctgttcctgcgaatcctccggcggagttttcagctacaaagtttgcttcattcatcacccaatactccacaggacaagtgagtgtggaaattgaatgggagctgcagaaagaaaacagcaagcgctggaatcccgaagtgcagtacacatccaattatgcaaaatctgccaacgttgattttactgtggacaacaatggactttatactgagcctcgccccattggcacccgttaccttacccgtcccctgtaa

SEQ ID NO: 353 - protein, 736 aa, synthetic construct
  REGION 1..736: note = Description of Artificial Sequence: Synthetic polypeptide
MAADGYLPDWLEDNLSEGIREWWDLKPGAPKPKANQQHQDNARGLVLPGYKYLGPGNGLDKGEPVNAADAAALEHDKAYDQQLKAGDNPYLKYNHADAEFQERLKEDTSFGGNLGRAVFQAKKRLLEPLGLVEEAAKTAPGKKRPVEPSPQRSPDSSTGIGKKGQQPAKKRLNFGQTGDSESVPDPQPLGEPPATPAAVGPTTMASGGGAPMADNNEGADGVGNSSGNWHCDSQWLGDRVITTSTRTWALPTYNNHLYKQISSQSGASNDNHYFGYSTPWGYFDFNRFHCHFSPRDWQRLINNNWGFRPKRLNFKLFNIQVKEVTTNDGVTTIANNLTSTVQVFSDSEYQLPYVLGSAHQGCLPPFPADVFMIPQYGYLTLNNGSQAVGRSSFYCLEYFPSQMLRTGNNFTFSYTFEDVPFHSSYAHSQSLDRLMNPLIDQYLYYLSRTNTPSGTTTQSRLQFSQAGASDIRDQSRNWLPGPCYRQQRVSKTKTDNNNSNFTWTGASKYNLNGRESIINPGTAMASHKDDEDKFFPMSGVMIFGKESAGASNTALDNVMITDEEEIKATNPVATERFGTVAVNLQSSSTDPATGDVHVMGALPGMVWQDRDVYLQGPIWAKIPHTDGHFHPSPLMGGFGLKNPPPQILIKNTPVPANPPAEFSATKFASFITQYSTGQVSVEIEWELQKENSKRWNPEVQYTSNYAKSANVDFTVDNNGLYTEPRPIGTRYLTRPL

SEQ ID NO: 354 - DNA, 2214 bp, synthetic construct; identical to SEQ ID NO: 326
  misc_feature 1..2214: note = Description of Artificial Sequence: Synthetic polynucleotide
  source 1..2214: mol_type = other DNA

SEQ ID NO: 355 - protein, 737 aa, synthetic construct; identical to SEQ ID NO: 327
  REGION 1..737: note = Description of Artificial Sequence: Synthetic polypeptide

SEQ ID NO: 356 - DNA, 2205 bp, synthetic construct
  misc_feature 1..2205: note = Description of Artificial Sequence: Synthetic polynucleotide
  source 1..2205: mol_type = other DNA
atggctgctgacggttatcttccagattggctcgaggacaacctttctgaaggcattcgtgagtggtgggctctgaaacctggagtccctcaacccaaagcgaaccaacaacaccaggacaaccgtcggggtcttgtgcttccgggttacaaatacctcggacccggtaacggactcgacaaaggagagccggtcaacgaggcggacgcggcagccctcgaacacgacaaggcctacgaccagcagctcaaggccggagacaacccgtacctcaagtacaaccacgccgacgccgagttccaggagcggctcaaagaagatacgtcttttgggggcaacctcgggcgagcagtcttccaggccaaaaagaggcttcttgaacctcttggtctggttgaggaagcggctaagacggctcctggaaagaagaggcctgtagagcagtctcctcaggaaccggactcctccgcgggtattggcaaatcgggtgcacagcccgctaaaaagagactcaatttcggtcagactggcgacacagagtcagtcccagaccctcaaccaatcggagaacctcccgcagccccctcaggtgtgggatctcttacaatggcttcaggtggtggcgcaccagtggcagacaataacgaaggtgccgatggagtgggtagttcctcgggaaattggcattgcgattcccaatggctgggggacagagtcatcaccaccagcacccgaacctgggccctgcccacctacaacaaccacctctacaaacaaatttccagccaatcaggagcctcgaacgacaatcactactttggctacagcaccccttgggggtattttgacttcaacagattccactgccacttttcaccacgtgactggcagcgactcatcaacaacaactggggattccggcccaagagactcagcttcaagctcttcaacatccaggtcaaagaggttacggacaacaatggagtcaagaccatcgccaataaccttaccagcacggtccaggtcttcacggactcagactatcagctcccgtacgtgctcgggtcggctcacgagggctgcctcccgccgttcccagcggacgttttcatgattcctcagtacgggtatctgacgcttaatgatggaagccaggccgtgggtcgttcgtccttttactgcctggaatatttcccgtcgcaaatgctaagaacgggtaacaacttccagttcagctacgagtttgagaacgtacctttccatagcagctacgctcacagccaaagcctggaccgactaatgaatccactcatcgaccaatacttgtactatctctcaaagactattaacggttctggacagaatcaacaaacgctaaaattcagtgtggccggacccagcaacatggctgtccagggaagaaactacatacctggacccagctaccgacaacaacgtgtctcaaccactgtgactcaaaacaacaacagcgaatttgcttggcctggagcttcttcttgggctctcaatggacgtaatagcttgatgaatcctggacctgctatggccagccacaaagaaggagaggaccgtttctttcctttgtctggatctttaatttttggcaaacaaggaactggaagagacaacgtggatgcggacaaagtcatgataaccaacgaagaagaaattaaaactactaacccggtagcaacggagtcctatggacaagtggccacaaaccaccagagtgcccaagcacaggcgcagaccggctgggttcaaaaccaaggaatacttccgggtatggtttggcaggacagagatgtgtacctgcaaggacccatttgggccaaaattcctcacacggacggcaactttcacccttctccgctgatgggagggtttggaatgaaacacccgcctcctcagatcctcatcaaaaacacacctgtacctgcggatcctccaacggccttcaacaaggacaagctgaactctttcatcacccagtattctactggccaagtcagcgtggagatcgagtgggagctgcagaaggaaaacagcaagcgctggaaccccgagatccagtacacctccaactactacaaatctacaagtgtggactttgctgttaatacagaaggcgtgtactctgaaccccgccccattggcacccgttacctcacccgtaatctgtaa

SEQ ID NO: 357 - protein, 734 aa, synthetic construct
  REGION 1..734: note = Description of Artificial Sequence: Synthetic polypeptide
MAADGYLPDWLEDNLSEGIREWWALKPGVPQPKANQQHQDNRRGLVLPGYKYLGPGNGLDKGEPVNEADAAALEHDKAYDQQLKAGDNPYLKYNHADAEFQERLKEDTSFGGNLGRAVFQAKKRLLEPLGLVEEAAKTAPGKKRPVEQSPQEPDSSAGIGKSGAQPAKKRLNFGQTGDTESVPDPQPIGEPPAAPSGVGSLTMASGGGAPVADNNEGADGVGSSSGNWHCDSQWLGDRVITTSTRTWALPTYNNHLYKQISSQSGASNDNHYFGYSTPWGYFDFNRFHCHFSPRDWQRLINNNWGFRPKRLSFKLFNIQVKEVTDNNGVKTIANNLTSTVQVFTDSDYQLPYVLGSAHEGCLPPFPADVFMIPQYGYLTLNDGSQAVGRSSFYCLEYFPSQMLRTGNNFQFSYEFENVPFHSSYAHSQSLDRLMNPLIDQYLYYLSKTINGSGQNQQTLKFSVAGPSNMAVQGRNYIPGPSYRQQRVSTTVTQNNNSEFAWPGASSWALNGRNSLMNPGPAMASHKEGEDRFFPLSGSLIFGKQGTGRDNVDADKVMITNEEEIKTTNPVATESYGQVATNHQSAQAQAQTGWVQNQGILPGMVWQDRDVYLQGPIWAKIPHTDGNFHPSPLMGGFGMKHPPPQILIKNTPVPADPPTAFNKDKLNSFITQYSTGQVSVEIEWELQKENSKRWNPEIQYTSNYYKSTSVDFAVNTEGVYSEPRPIGTRYLTRNL

SEQ ID NO: 358 - DNA, 2217 bp, synthetic construct
  misc_feature 1..2217: note = Description of Artificial Sequence: Synthetic polynucleotide
  source 1..2217: mol_type = other DNA
atggctgccgatggttatcttccagattggctcgaggacaacctctctgagggcattcgcgagtggtgggcgctgaaacctggagccccgaagcccaaagccaaccagcaaaagcaggacgacggccggggtctggtgcttcctggctacaagtacctcggacccttcaacggactcgacaagggggagcccgtcaacgcggcggacgcagcggccctcgagcacgacaaggcctacgaccagcagctgcaggcgggtgacaatccgtacctgcggtataaccacgccgacgccgagtttcaggagcgtctgcaagaagatacgtcttttgggggcaacctcgggcgagcagtcttccaggccaagaagcgggttctcgaacctctcggtctggttgaggaaggcgctaagacggctcctggaaagaagagaccggtagagccatcaccccagcgttctccagactcctctacgggcatcggcaagaaaggccaacagcccgccagaaaaagactcaattttggtcagactggcgactcagagtcagttccagaccctcaacctctcggagaacctccagcagcgccctctggtgtgggacctaatacaatggctgcaggcggtggcgcaccaatggcagacaataacgaaggcgccgacggagtgggtagttcctcgggaaattggcattgcgattccacatggctgggcgacagagtcatcaccaccagcacccgaacctgggccctgcccacctacaacaaccacctctacaagcaaatctccaacgggacatcgggaggagccaccaacgacaacacctacttcggctacagcaccccctgggggtattttgactttaacagattccactgccacttttcaccacgtgactggcagcgactcatcaacaacaactggggattccggcccaagagactcagcttcaagctcttcaacatccaggtcaaggaggtcacgcagaatgaaggcaccaagaccatcgccaataacctcaccagcaccatccaggtgtttacggactcggagtaccagctgccgtacgttctcggctctgcccaccagggctgcctgcctccgttcccggcggacgtgttcatgattccccagtacggctacctaacactcaacaacggtagtcaggccgtgggacgctcctccttctactgcctggaatactttccttcgcagatgctgagaaccggcaacaacttccagtttacttacaccttcgaggacgtgcctttccacagcagctacgcccacagccagagcttggaccggctgatgaatcctctgattgaccagtacctgtactacttgtctcggactcaaacaacaggaggcacggcaaatacgcagactctgggcttcagccaaggtgggcctaatacaatggccaatcaggcaaagaactggctgccaggaccctgttaccgccaacaacgcgtctcaacgacaaccgggcaaaacaacaatagcaactttgcctggactgctgggaccaaataccatctgaatggaagaaattcattggctaatcctggcatcgctatggcaacacacaaagacgacgaggagcgtttttttcccagtaacgggatcctgatttttggcaaacaaaatgctgccagagacaatgcggattacagcgatgtcatgctcaccagcgaggaagaaatcaaaaccactaaccctgtggctacagaggaatacggtatcgtggcagataacttgcagcagcaaaacacggctcctcaaattggaactgtcaacagccagggggccttacccggtatggtctggcagaaccgggacgtgtacctgcagggtcccatctgggccaagattcctcacacggacggcaacttccacccctctcccctcatgggtggattcggacttaaacatcctccgcctcagatcctgatcaagaacacgcctgtacctgcggatcctccgaccaccttcaaccagtcaaagctgaactctttcatcacgcaatacagcaccggacaggtcagcgtggaaattgaatgggagctgcagaaggaaaacagcaagcgctggaaccccgagatccagtacacctccaactactacaaatctacaagtgtggactttgctgttaatacagaaggcgtgtactctgaaccccgccccattggcacccgttacctcacccgtaatctgtaa

SEQ ID NO: 359 - protein, 738 aa, synthetic construct; identical to SEQ ID NO: 105
  REGION 1..738: note = Description of Artificial Sequence: Synthetic polypeptide

SEQ ID NO: 360 - DNA, 2211 bp, synthetic construct
  misc_feature 1..2211: note = Description of Artificial Sequence: Synthetic polynucleotide
  source 1..2211: mol_type = other DNA
atggctgctgacggttatcttccagattggctcgaggacaacctttctgaaggcattcgagagtggtgggcgctgcaacctggagcccctaaacccaaggcaaatcaacaacatcaggacaacgctcggggtcttgtgcttccgggttacaaatacctcggacccggcaacggactcgacaagggggaacccgtcaacgcagcggacgcggcagccctcgagcacgacaaggcctacgaccagcagctcaaggccggtgacaacccctacctcaagtacaaccacgccgacgccgagttccaggagcggctcaaagaagatacgtcttttgggggcaacctcgggcgagcagtcttccaggccaaaaagaggcttcttgaacctcttggtctggttgaggaagcggctaagacggctcctggaaagaagaggcctgtagatcagtctcctcaggaaccggactcatcatctggtgttggcaaatcgggcaaacagcctgccagaaaaagactaaatttcggtcagactggcgactcagagtcagtcccagaccctcaacctctcggagaaccaccagcagcccccacaagtttgggatctaatacaatggcttcaggcggtggcgcaccaatggcagacaataacgagggtgccgatggagtgggtaattcctcaggaaattggcattgcgattcccaatggctgggcgacagagtcatcaccaccagcaccagaacctgggccctgcccacttacaacaaccatctctacaagcaaatctccagccaatcaggagcttcaaacgacaaccactactttggctacagcaccccttgggggtattttgactttaacagattccactgccacttctcaccacgtgactggcagcgactcattaacaacaactggggattccggcccaagaaactcagcttcaagctcttcaacatccaagttaaagaggtcacgcagaacgatggcacgacgactattgccaataaccttaccagcacggttcaggtgtttacggactcggagtatcagctcccgtacgtgctcgggtcggcgcaccaaggctgtctcccgccgtttccagcggacgtcttcatggtccctcagtatggatacctcaccctgaacaacggaagtcaagcggtgggacgctcatccttttactgcctggagtacttcccttcgcagatgctaaggactggaaataacttccaattcagctataccttcgaggatgtaccttttcacagcagctacgctcacagccagagtttggatcgcttgatgaatcctcttattgatcagtatctgtactacctgaacagaacgcaaggaacaacctctggaacaaccaaccaatcacggctgctttttagccaggctgggcctcagtctatgtctttgcaggccagaaattggctacctgggccctgctaccggcaacagagactttcaaagactgctaacgacaacaacaacagtaactttccttggacagcggccagcaaatatcatctcaatggccgcgactcgctggtgaatccaggaccagctatggccagtcacaaggacgatgaagaaaaatttttccctatgcacggcaatctaatatttggcaaagaagggacaacggcaagtaacgcagaattagataatgtaatgattacggatgaagaagagattcgtaccaccaatcctgtggcaacagagcagtatggaactgtggcaaataacttgcagagctcaaatacagctcccacgactagaactgtcaatgatcagggggccttacctggcatggtgtggcaagatcgtgacgtgtaccttcaaggacctatctgggcaaagattcctcacacggatggacactttcatccttctcctctgatgggaggctttggactgaaacatccgcctcctcaaatcatgatcaaaaatactccggtaccggcaaatcctccgacgactttcagcccggccaagtttgcttcatttatcactcagtactccactggacaggtcagcgtggaaattgagtgggagctacagaaagaaaacagcaaacgttggaatccagagattcagtacacttccaactacaacaagtctgttaatgtggactttactgtagacactaatggtgtttatagtgaacctcgccccattggcacccgttaccttacccgtcccctgtaa

SEQ ID NO: 361 - protein, 736 aa, synthetic construct; identical to SEQ ID NO: 331
  REGION 1..736: note = Description of Artificial Sequence: Synthetic polypeptide

SEQ ID NO: 362 - DNA, 2211 bp, synthetic construct; identical to SEQ ID NO: 330
  misc_feature 1..2211: note = Description of Artificial Sequence: Synthetic polynucleotide
  source 1..2211: mol_type = other DNA

SEQ ID NO: 363 - protein, 736 aa, synthetic construct; identical to SEQ ID NO: 331
  REGION 1..736: note = Description of Artificial Sequence: Synthetic polypeptide

SEQ ID NO: 364 - DNA, 2211 bp, synthetic construct
  misc_feature 1..2211: note = Description of Artificial Sequence: Synthetic polynucleotide
  source 1..2211: mol_type = other DNA
atggctgctgacggttatcttccagattggctcgaggacaacctttctgaaggcattcgtgagtggtgggctctgaaacctggagtccctcaacccaaagcgaaccaacaacaccaggacaaccgtcggggtcttgtgcttccgggttacaaatacctcggacccggtaacggactcgacaaaggagagcccgtcaacgcggcggatgcagcggccctcgagcacgacaaggcctacgaccagcagctcaaagcgggtgacaatccgtacctgcggtataaccacgccgacgccgagtttcaggagcgtctgcaagaagatacgtcttttgggggcaacctcgggcgagcagtcttccaggccaagaagagggttctcgaaccttttggtctggttgaggaaggtgctaagacggctcctggaaagaaacgtccggtagagcagtcgccacaagagccagactcctcctcgggcatcggcaagacaggccagcagcccgctaaaaagagactcaattttggtcagactggcgactcagagtcagtccccgacccacaacctctcggagaacctccagcaacccccgctgctgtgggacctactacaatggcttcaggcggtggcgcaccaatggcagacaataacgaaggcgccgacggagtgggtaatgcctcaggaaattggcattgcgattccacatggctgggcgacagagtcatcaccaccagcacccgcacctgggccttgcccacctacaataaccacctctacaagcaaatctccagtgcttcaacgggggccagcaacgacaaccactacttcggctacagcaccccctgggggtattttgatttcaacagattccactgccatttctcaccacgtgactggcagcgactcatcaacaacaattggggattccggcccaagagactcaacttcaagctcttcaacatccaagtcaaggaggtcacgacgaatgatggcgtcacgaccatcgctaataaccttaccagcacggttcaagtcttctcggactcggagtaccagcttccgtacgtcctcggctctgcgcaccagggctgcctccctccgttcccggcggacgtgttcatgattccgcaatacggctacctgacgctcaacaatggcagccaagccgtgggacgttcatccttttactgcctggaatatttcccttctcagatgctgagaacgggcaacaactttaccttcagctacacctttgaggaagtgcctttccacagcagctacgcgcacagccagagcctggaccggctgatgaatcctctcatcgaccaatacctgtattacctgaacagaactcaaaatcagtccggaagtgcccaaaacaaggacttgctgtttagccgtgggtctccagctggcatgtctgttcagcccaaaaactggctacctggaccctgttatcggcagcagcgcgtttctaaaacaaaaacagacaacaacaacagcaattttacctggactggtgcttcaaaatataacctcaatgggcgtgaatccatcatcaaccctggcactgctatggcctcacacaaagacgacgaagacaagttctttcccatgagcggtgtcatgatttttggaaaagagagcgccggagcttcaaacactgcattggacaatgtcatgattacagacgaagaggaaattaaagccactaaccctgtggccaccgaaagatttgggaccgtggcagtcaatttccagagcagcagcacagaccctgcgaccggagatgtgcatgttatgggagccttacctggaatggtgtggcaagacagagacgtatacctgcagggtcctatttgggccaaaattcctcacacggatggacactttcacccgtctcctctcatgggcggctttggacttaagcacccgcctcctcagatcctcatcaaaaacacgcctgttcctgcgaatcctccggcagagttttcggctacaaagtttgcttcattcatcacccagtattccacaggacaagtgagcgtggagattgaatgggagctgcagaaagaaaacagcaaacgctggaatcccgaagtgcagtatacatctaactatgcaaaatctgccaacgttgatttcactgtggacaacaatggactttatactgagcctcgccccattggcacccgttacctcacccgtcccctgtaa

SEQ ID NO: 365 - protein, 736 aa, synthetic construct
  REGION 1..736: note = Description of Artificial Sequence: Synthetic polypeptide
MAADGYLPDWLEDNLSEGIREWWALKPGVPQPKANQQHQDNRRGLVLPGYKYLGPGNGLDKGEPVNAADAAALEHDKAYDQQLKAGDNPYLRYNHADAEFQERLQEDTSFGGNLGRAVFQAKKRVLEPFGLVEEGAKTAPGKKRPVEQSPQEPDSSSGIGKTGQQPAKKRLNFGQTGDSESVPDPQPLGEPPATPAAVGPTTMASGGGAPMADNNEGADGVGNASGNWHCDSTWLGDRVITTSTRTWALPTYNNHLYKQISSASTGASNDNHYFGYSTPWGYFDFNRFHCHFSPRDWQRLINNNWGFRPKRLNFKLFNIQVKEVTTNDGVTTIANNLTSTVQVFSDSEYQLPYVLGSAHQGCLPPFPADVFMIPQYGYLTLNNGSQAVGRSSFYCLEYFPSQMLRTGNNFTFSYTFEEVPFHSSYAHSQSLDRLMNPLIDQYLYYLNRTQNQSGSAQNKDLLFSRGSPAGMSVQPKNWLPGPCYRQQRVSKTKTDNNNSNFTWTGASKYNLNGRESIINPGTAMASHKDDEDKFFPMSGVMIFGKESAGASNTALDNVMITDEEEIKATNPVATERFGTVAVNFQSSSTDPATGDVHVMGALPGMVWQDRDVYLQGPIWAKIPHTDGHFHPSPLMGGFGLKHPPPQILIKNTPVPANPPAEFSATKFASFITQYSTGQVSVEIEWELQKENSKRWNPEVQYTSNYAKSANVDFTVDNNGLYTEPRPIGTRYLTRPL

SEQ ID NO: 366 - DNA, 2217 bp, synthetic construct
  misc_feature 1..2217: note = Description of Artificial Sequence: Synthetic polynucleotide
  source 1..2217: mol_type = other DNA
atggctgccgatggttatcttccagattggctcgaggacaacctctctgagggcattcgcgagtggtgggacttgaaacctggagccccgaaacccaaagccaaccagcaaaagcaggacgacggccggggtctggtgcttcctggctacaagtacctcggacccttcaacggactcgacaagggggagcccgtcaacgcggcggatgcaacggccctcgagcacgacaaggcctacgaccagcagctgcaggcgggtgacaatccgtacctgcggtataaccacgccgacgccgagtttcaggagcgtctgcaagaagatacgtcttttgggggcaacctcgggcgagcagtcttccaggccaagaagcgggttctcgaacctctcggtctggttgaggaaggcgctaagacggctcctggaaagaagagaccggtagagccatcaccccagcgttctccagactcctctacgggcatcggcaagaaaggccaacagcccgccagaaaaagactcaattttggtcagactggcgactcagagtcagttccagaccctcaacctctcggagaaccaccagcagcccccacaagtttgggatctaatacaatggcttcaggcggtggcgcaccaatggcagacaataacgagggtgccgatggagtgggtaattcctcaggaaattggcattgcgattcccaatggctgggcgacagagtcatcaccaccagcacccgcacctgggccttgcccacctacaataaccacctctacaagcaaatctccagtgcttcaacgggggccagcaacgacaaccactacttcggctacagcaccccctgggggtattttgactttaaccgcttccactgccacttctcgccaagagactggcaaagactcatcaacaacaattggggattccggcccaagagactcaacttcaaactcttcaacatccaagtcaaggaggtcacgacgaatgatggcgtcacgaccatcgccaataacctcaccagcaccatccaggtgtttacggactcggagtaccagctgccgtacgttctcggctctgcccaccagggctgcctgcctccgttcccggcggacgtgttcatgattccccagtatggatacctcaccctgaacaacggaagtcaagcggtgggacgctcatccttttactgcctggagtacttcccttcgcagatgctaaggactggaaataacttccaattcagctataccttcgaggatgtaccttttcacagcagctacgctcacagccagagtttggatcgcttgatgaatcctcttattgatcagtatctgtactacctgaacagaacgcaaggaacaacctctggaacaaccaaccaatcacggctgctttttagccaggctgggcctcagtctatgtctttgcaggccagaaattggctacctgggccctgctaccggcaacagagactttcaaagactgctaacgacaacaacaacagtaactttccttggacagcagccagcaaatatcatctcaatggccgcgactcgctggtgaatccaggaccagctatggccagtcacaaggacgatgaagaaaaatttttccctatgcacggcaatctaatatttggcaaagaagggacaacggcaagtaacgcagaattagataatgtaatgattacggatgaagaagagattcgtaccaccaatcctgtggcaacagagcagtatggaactgtggcaaataacttgcagagctcaaatacagctcccacgactagaactgtcaatgatcagggggccttacctggcatggtgtggcaagatcgtgacgtgtaccttcaggggcccatctgggcaaagattccacacacggacggacattttcacccctctcccctcatgggtggattcggacttaaacaccctcctccgcagattctcatcaagaacaccccggtacctgcgaatccttcgaccaccttcagtgcggcaaagtttgcttccttcatcacacagtactccacgggacaggtcagcgtggagatcgagtgggagctgcagaaggaaaacagcaagcgctggaacccggagatccagtacacttccaactattacaagtctaataatgttgaatttgctgttaatactgaaggtgtatatagtgaaccccgccccattggcaccagatacctgactcgtaatctgtaa

SEQ ID NO: 367 - protein, 738 aa, synthetic construct
  REGION 1..738: note = Description of Artificial Sequence: Synthetic polypeptide
MAADGYLPDWLEDNLSEGIREWWDLKPGAPKPKANQQKQDDGRGLVLPGYKYLGPFNGLDKGEPVNAADATALEHDKAYDQQLQAGDNPYLRYNHADAEFQERLQEDTSFGGNLGRAVFQAKKRVLEPLGLVEEGAKTAPGKKRPVEPSPQRSPDSSTGIGKKGQQPARKRLNFGQTGDSESVPDPQPLGEPPAAPTSLGSNTMASGGGAPMADNNEGADGVGNSSGNWHCDSQWLGDRVITTSTRTWALPTYNNHLYKQISSASTGASNDNHYFGYSTPWGYFDFNRFHCHFSPRDWQRLINNNWGFRPKRLNFKLFNIQVKEVTTNDGVTTIANNLTSTIQVFTDSEYQLPYVLGSAHQGCLPPFPADVFMIPQYGYLTLNNGSQAVGRSSFYCLEYFPSQMLRTGNNFQFSYTFEDVPFHSSYAHSQSLDRLMNPLIDQYLYYLNRTQGTTSGTTNQSRLLFSQAGPQSMSLQARNWLPGPCYRQQRLSKTANDNNNSNFPWTAASKYHLNGRDSLVNPGPAMASHKDDEEKFFPMHGNLIFGKEGTTASNAELDNVMITDEEEIRTTNPVATEQYGTVANNLQSSNTAPTTRTVNDQGALPGMVWQDRDVYLQGPIWAKIPHTDGHFHPSPLMGGFGLKHPPPQILIKNTPVPANPSTTFSAAKFASFITQYSTGQVSVEIEWELQKENSKRWNPEIQYTSNYYKSNNVEFAVNTEGVYSEPRPIGTRYLTRNL

SEQ ID NO: 368 - DNA, 2208 bp, synthetic construct
  misc_feature 1..2208: note = Description of Artificial Sequence: Synthetic polynucleotide
  source 1..2208: mol_type = other DNA
atggctgccgatggttatcttccagattggctcgaggacaaccttagtgaaggaattcgcgagtggtgggacttgaaacctggagccccgaagcccaaagccaaccagcaaaagcaggacgacggccggggtctggtgcttcctggctacaagtacctcggacccttcaacggactcgacaagggggagcccgtcaacgcggcggacgcagcggccctcgagcacgacaaggcctacgaccagcagctcaaagcgggtgacaatccgtacctgcggtataaccacgccgacgccgagtttcaggagcgtctgcaagaagatacgtcttttgggggcaacctcgggcgagcagtcttccaggccaagaagcgggttctcgaacctctcggtctggttgaggaaggtgctaagacggctcctggaaagaaacgtccggtagagcagtcgccacaagagccagactcctcctcgggcattggcaagacaggccagcagcccgctaaaaagagactcaattttggtcagactggcgactcagagtcagtccccgacccacaacctctcggagaacctccagcaacccccgctgctgtgggacctactacaatggcttcaggcggtggcgcaccaatggcagacaataacgaaggcgccgacggagtgggtaatgcctcaggaaattggcattgcgattccacatggctgggcgacagagtcatcaccaccagcacccgaacctgggccctgcccacctacaacaaccacctctacaaacaaatttccagccaatcaggagcctcgaacgacaatcactactttggctacagcaccccttgggggtattttgatttcaacagattccactgccacttttcaccacgtgactggcagcgactcatcaacaacaattggggattccggcccaagagactcagcttcaagctcttcaacatccaggtcaaggaggtcacgcagaatgaaggcaccaagaccatcgccaataaccttaccagcacggttcaagtgtttacggactcggagtatcagctcccgtacgtgctcggctcggcgcatcaaggatgcctcccgccgttcccagcagacgtcttcatggtgccacagtatggatacctcaccctgaacaacgggagtcaggcagtaggacgctcttcattttactgcctggagtactttccttctcagatgctgcgtaccggaaacaactttaccttcagctacacttttgaggacgttcctttccacagcagctacgctcacagccagagtctggaccgtctcatgaatcctctgattgaccagtacctgtattacttgagcagaacaaacactccaagtggaaccaccacgcagtcaaggcttcagttttctcaggccggagcgagtgacattcgggaccagtctaggaactggcttcctggaccctgttaccgccagcagcgagtatcaaagacatctgcggataacaacaacagtgaatactcgtggactggagctaccaagtaccacctcaatggcagagactctctggtgaatccgggcccggccatggcaagccacaaggactatgaagaaaagttttttcctcagagcggggttctcatctttgggaagcaaggctcagagaaaacaaatgtggacattgaaaaggtcatgattacagacgaagaggaaatcaggacaaccaatcccgtggctacggagcagtatggttctgtatctaccaacctccagagaggcaacagacaagcagctaccgcagatgtcaacacacaaggcgttcttccaggcatggtctggcaggacagagatgtgtaccttcaggggcccatctgggcaaagattccacacacggacggacattttcacccgtctccgctgatgggcggctttggcctgaaacatcctccgcctcagatcctgatcaagaacacgcctgtacctgcggatcctccgaccaccttcaaccagtcaaagctgaactctttcatcactcagtattctactggccaagtcagcgtggagatcgagtgggagctgcagaaggaaaacagcaagcgctggaaccccgagatccagtacacctccaactactacaaatctacaagtgtggactttgctgttaatacagaaggcgtgtactctgaaccccgccccattggcacccgttacctcacccgtaatctgtaa

SEQ ID NO: 369 - protein, 735 aa, synthetic construct
  REGION 1..735: note = Description of Artificial Sequence: Synthetic polypeptide
MAADGYLPDWLEDNLSEGIREWWDLKPGAPKPKANQQKQDDGRGLVLPGYKYLGPFNGLDKGEPVNAADAAALEHDKAYDQQLKAGDNPYLRYNHADAEFQERLQEDTSFGGNLGRAVFQAKKRVLEPLGLVEEGAKTAPGKKRPVEQSPQEPDSSSGIGKTGQQPAKKRLNFGQTGDSESVPDPQPLGEPPATPAAVGPTTMASGGGAPMADNNEGADGVGNASGNWHCDSTWLGDRVITTSTRTWALPTYNNHLYKQISSQSGASNDNHYFGYSTPWGYFDFNRFHCHFSPRDWQRLINNNWGFRPKRLSFKLFNIQVKEVTQNEGTKTIANNLTSTVQVFTDSEYQLPYVLGSAHQGCLPPFPADVFMVPQYGYLTLNNGSQAVGRSSFYCLEYFPSQMLRTGNNFTFSYTFEDVPFHSSYAHSQSLDRLMNPLIDQYLYYLSRTNTPSGTTTQSRLQFSQAGASDIRDQSRNWLPGPCYRQQRVSKTSADNNNSEYSWTGATKYHLNGRDSLVNPGPAMASHKDYEEKFFPQSGVLIFGKQGSEKTNVDIEKVMITDEEEIRTTNPVATEQYGSVSTNLQRGNRQAATADVNTQGVLPGMVWQDRDVYLQGPIWAKIPHTDGHFHPSPLMGGFGLKHPPPQILIKNTPVPADPPTTFNQSKLNSFITQYSTGQVSVEIEWELQKENSKRWNPEIQYTSNYYKSTSVDFAVNTEGVYSEPRPIGTRYLTRNL

SEQ ID NO: 370 - DNA, 2214 bp, synthetic construct
  misc_feature 1..2214: note = Description of Artificial Sequence: Synthetic polynucleotide
  source 1..2214: mol_type = other DNA
atggctgccgatggttatcttccagattggctcgaggacaacctctctgagggcattcgcgagtggtgggacttgaaacctggagccccgaaacccaaagccaaccagcaaaagcaggacgacggccggggtctggtgcttcctggctacaagtacctcggacccttcaacggactcgacaagggggagcccgtcaacgcggcggatgcagcggccctcgagcacgacaaggcctacgaccagcagctcaaagcgggtgacaatccgtacctgcggtataaccacgccgacgccgagtttcaggagcgtctgcaagaagatacgtcttttgggggcaacctcgggcgagcagtcttccaggccaagaagagggttctcgaaccttttggtctggttgaggaaggtgctaagacggctcctggaaagaaacgtccggtagagcagtcgccacaagagccagactcctcctcgggcattggcaagacaggccagcagcctgcaagaaaaagattgaattttggtcagactggagacgcagactcagtacctgacccccagcctctcggacagccaccagcagccccctctggtctgggaactaatacgatggctacaggcagtggcgcaccaatggcagacaataacgagggcgccgacggagtgggtaattcctcgggaaattggcattgcgattcccaatggctgggggacagagtcatcaccaccagcacccgaacctgggccctgcccacctacaacaatcacctctacaagcaaatctccaacagcacatctggaggatcttcaaatgacaacgcctacttcggctacagcaccccctgggggtattttgatttcaacagattccactgccatttctcaccacgtgactggcagcgactcatcaacaacaattggggattccggcccaagagactcaacttcaagctcttcaacatccaggtcaaggaggtcacgcagaatgaaggcaccaagaccatcgccaataacctcaccagcaccatccaggtgtttacggactcggagtaccagctgccgtacgttctcggctctgcccaccagggctgcctgcctccgttcccggcggacgtgttcatgattccccagtacggctacctaacactcaacaacggtagtcaggccgtgggacgctcctccttctactgcctggaatactttccttcgcagatgctgagaaccggcaacaacttccagtttacttacaccttcgaggacgtgcctttccacagcagctacgcccacagccagagcttggaccggctgatgaatcctctgattgaccagtacctgtactacttgtctcggactcaaacaacaggaggcacgacaaatacgcagactctgggcttcagccaaggtgggcctaatacaatggccaatcaggcaaagaactggctgccaggaccctgttaccgccagcagcgagtatcaaagacatttgcggataacaacaacagtgaatactcgtggactggagctaccaagtaccacctcaatggcagagactctctggtgaatccgggcccggccatggcaagccacaaggacgatgaagaaaagttttttcctcagagcggggttctcatctttgggaagcaaggctcagagaaaacaaatgtggacattgaaaaggtcatgattacagacgaagaggaaatcaggacaaccaatcccgtggctacggagcagtatggttctgtatctaccaacctccagagaggcaacagacaagcagctaccgcagatgtcaacacacaaggcgttcttccaggcatggtctggcaggacagagatgtgtaccttcaggggcccatctgggcaaagattccacacacggacggacattttcacccctctcccctcatgggtggattcggacttaaacaccctccgcctcagatcctgatcaagaacacgcctgtacccgcggatcctccgaccaccttcaaccagtcaaagctgaactctttcatcacccagtattctactggccaagtcagcgtggagatcgagtgggagctgcagaaggaaaacagcaagcgctggaaccccgagatccagtacacctccaactactacaaatctacaagtgtggactttgctgttaatacagaaggcgtgtactctgaaccccgccccattggcacccgttacctcacccgtaatctgtaa

SEQ ID NO: 371 - protein, 737 aa, synthetic construct
  REGION 1..737: note = Description of Artificial Sequence: Synthetic polypeptide
MAADGYLPDWLEDNLSEGIREWWDLKPGAPKPKANQQKQDDGRGLVLPGYKYLGPFNGLDKGEPVNAADAAALEHDKAYDQQLKAGDNPYLRYNHADAEFQERLQEDTSFGGNLGRAVFQAKKRVLEPFGLVEEGAKTAPGKKRPVEQSPQEPDSSSGIGKTGQQPARKRLNFGQTGDADSVPDPQPLGQPPAAPSGLGTNTMATGSGAPMADNNEGADGVGNSSGNWHCDSQWLGDRVITTSTRTWALPTYNNHLYKQISNSTSGGSSNDNAYFGYSTPWGYFDFNRFHCHFSPRDWQRLINNNWGFRPKRLNFKLFNIQVKEVTQNEGTKTIANNLTSTIQVFTDSEYQLPYVLGSAHQGCLPPFPADVFMIPQYGYLTLNNGSQAVGRSSFYCLEYFPSQMLRTGNNFQFTYTFEDVPFHSSYAHSQSLDRLMNPLIDQYLYYLSRTQTTGGTTNTQTLGFSQGGPNTMANQAKNWLPGPCYRQQRVSKTFADNNNSEYSWTGATKYHLNGRDSLVNPGPAMASHKDDEEKFFPQSGVLIFGKQGSEKTNVDIEKVMITDEEEIRTTNPVATEQYGSVSTNLQRGNRQAATADVNTQGVLPGMVWQDRDVYLQGPIWAKIPHTDGHFHPSPLMGGFGLKHPPPQILIKNTPVPADPPTTFNQSKLNSFITQYSTGQVSVEIEWELQKENSKRWNPEIQYTSNYYKSTSVDFAVNTEGVYSEPRPIGTRYLTRNL

SEQ ID NO: 372 - DNA, 2217 bp, synthetic construct
  misc_feature 1..2217: note = Description of Artificial Sequence: Synthetic polynucleotide
  source 1..2217: mol_type = other DNA
atggctgccgatggttatcttccagattggctcgaggacactctctctgaaggaataagacagtggtgggcgctgaaacctggagccccgaagcccaaagccaaccagcaaaagcaggacgacggccggggtctggtgcttcctggctacaagtacctcggacccttcaacggactcgacaagggggagcccgtcaacgcggcggatgcagcggccctcgagcacgacaaggcctacgaccagcagctcaaagcgggtgacaatccgtacctgcggtataaccacgccgacgccgagtttcaggagcgtctgcaagaagatacgtcttttgggggcaacctcgggcgagcagtcttccaggccaagaagcgggttctcgaacctctcggtctggttgaggaaggcgctaagacggctcctggaaagaagagaccggtagagccatcaccccagcgttctccagactcctctacgggcatcggcaagaaaggccaacagcccgccagaaaaagactcaattttggtcagactggcgactcagagtcagttccagaccctcaacctctcggagaaccaccagcagcccccacaagtttgggatctaatacaatggcttcaggcggtggcgcaccaatggcagacaataacgagggtgccgatggagtgggtaattcctcaggaaattggcattgcgattcccaatggctgggcgacagagtcatcaccaccagcacccgcacctgggccttgcccacctacaataaccacctctacaagcaaatctccagtgcttcaacgggggccagcaacgacaaccactacttcggctacagcaccccctgggggtattttgactttaaccgcttccactgccacttctcgccaagagactggcaaagactcatcaacaacaattggggattccggcccaagagactcaacttcaaactcttcaacatccaagtcaaggaggtcacgacgaatgatggcgtcacgaccatcgccaataacctcaccagcaccatccaggtgtttacggactcggagtaccagctgccgtacgttctcggctctgcccaccagggctgcctgcctccgttcccggcggacgtgttcatgattccccagtatggatacctcaccctgaacaacggaagtcaagcggtgggacgctcatccttttactgcctggagtacttcccttcgcagatgctaaggactggaaataacttccaattcagctataccttcgaggatgtaccttttcacagcagctacgctcacagccagagtttggatcgcttgatgaatcctcttattgatcagtatctgtactacctgaacagaacgcaaggaacaacctctggaacaaccaaccaatcacggctgctttttagccaggctgggcctcagtctatgtctttgcaggccagaaattggctacctgggccctgctaccggcaacagagactttcaaagactgctaacgacaacaacaacagtaactttccttggacagcagccagcaaatatcatctcaatggccgcgactcgctggtgaatccaggaccagctatggccagtcacaaggacgatgaagaaaaatttttccctatgcacggcaatctaatatttggcaaagaagggacaacggcaagtaacgcagaattagataatgtaatgattacggatgaagaagagattcgtaccaccaatcctgtggcaacagagcagtatggaactgtggcaaataacttgcagagctcaaatacagctcccacgactagaactgtcaatgatcagggggccttacctggcatggtgtggcaagatcgtgacgtgtaccttcaggggcccatctgggcaaagattccacacacggacggacattttcacccctctcccctcatgggtggattcggacttaaacaccctcctccgcagattctcatcaagaacaccccggtacctgcgaatccttcgaccaccttcagtgcggcaaagtttgcttccttcatcacacagtactccacgggacaggtcagcgtggagatcgagtgggagctgcagaaggaaaacagcaagcgctggaacccggagatccagtacacttccaactattacaagtctaataatgttgaatttgctgttaatactgaaggtgtatatagtgaaccccgccccattggcaccagatacctgactcgtaatctgtaa

SEQ ID NO: 373 - protein, 738 aa, synthetic construct
  REGION 1..738: note = Description of Artificial Sequence: Synthetic polypeptide
MAADGYLPDWLEDTLSEGIRQWWALKPGAPKPKANQQKQDDGRGLVLPGYKYLGPFNGLDKGEPVNAADAAALEHDKAYDQQLKAGDNPYLRYNHADAEFQERLQEDTSFGGNLGRAVFQAKKRVLEPLGLVEEGAKTAPGKKRPVEPSPQRSPDSSTGIGKKGQQPARKRLNFGQTGDSESVPDPQPLGEPPAAPTSLGSNTMASGGGAPMADNNEGADGVGNSSGNWHCDSQWLGDRVITTSTRTWALPTYNNHLYKQISSASTGASNDNHYFGYSTPWGYFDFNRFHCHFSPRDWQRLINNNWGFRPKRLNFKLFNIQVKEVTTNDGVTTIANNLTSTIQVFTDSEYQLPYVLGSAHQGCLPPFPADVFMIPQYGYLTLNNGSQAVGRSSFYCLEYFPSQMLRTGNNFQFSYTFEDVPFHSSYAHSQSLDRLMNPLIDQYLYYLNRTQGTTSGTTNQSRLLFSQAGPQSMSLQARNWLPGPCYRQQRLSKTANDNNNSNFPWTAASKYHLNGRDSLVNPGPAMASHKDDEEKFFPMHGNLIFGKEGTTASNAELDNVMITDEEEIRTTNPVATEQYGTVANNLQSSNTAPTTRTVNDQGALPGMVWQDRDVYLQGPIWAKIPHTDGHFHPSPLMGGFGLKHPPPQILIKNTPVPANPSTTFSAAKFASFITQYSTGQVSVEIEWELQKENSKRWNPEIQYTSNYYKSNNVEFAVNTEGVYSEPRPIGTRYLTRNL

SEQ ID NO: 374 - DNA, 2208 bp, synthetic construct; identical to SEQ ID NO: 10
  misc_feature 1..2208: note = Description of Artificial Sequence: Synthetic polynucleotide
  source 1..2208: mol_type = other DNA

SEQ ID NO: 375 - protein, 735 aa, synthetic construct [sequence omitted]

SEQ ID NO: 376 - DNA, 2208 bp, synthetic construct
  misc_feature 1..2208: note = Description of Artificial Sequence: Synthetic polynucleotide
  source 1..2208: mol_type = other DNA
atggctgccgatggttatcttccagattggctcgaggacaacctctctgagggcattcgcgagtggtgggcgctgaaacctggagccccgaagcccaaagccaaccagcaaaagcaggacgacggccggggtctggtgcttcctggctacaagtacctcggacccttcaacggactcgacaagggggagcccgtcaacgcggcggacgccgcggccctcgagcacgacaaggcctacgaccagcagctgcaggcgggtgacaatccgtacctgcggtataaccacgccgacgccgagtttcaggagcgtctgcaagaagatacgtcttttgggggcaacctcgggcgagcagtcttccaggccaaaaagaggcttcttgaacctcttggtctggttgaggaagcagctaaaacggctcctggaaagaagaggcctgtagagcagtctcctcaggaaccggactcctccgcgggtattggcaaatcgggtgcacagcccgccaaaaagagactcaatttcggtcagactggcgactcagagtcagtcccagaccctcaacctctcggagaaccaccagcagcccccacaagtttgggatctaatacaatggcttcaggcggtggcgcaccaatggcagacaataacgaaggcgccgacggagtgggtaatgcctcaggaaattggcattgcgattccacatggctgggcgacagagtcatcaccaccagcacccgcacctgggccttgcccacctacagcaaccatctctacaagcaaatctccagccaatcaggagcttcaaacgacaacgactactttggctacagcaccccttgggggtattttgatttcaacagattccactgccacttttcaccacgtgactggcaaagactcatcaacaacaactggggattccgacccaagagactcaacttcaagctctttaacattcaagtcaaagaggtcacgcagaatgacggtacgacgacgattgccaataaccttaccagcacggttcaggtgtttactgactcggagtaccagctcccgtacgtcctcggctcggcgcatcaaggatgcctcccgccgttcccagcagacgtcttcatggtgccacagtatggatacctcaccctgaacaacgggagtcaggcagtaggacgctcttcattttactgcctggagtactttccttctcagatgctgcgtaccggaaacaactttaccttcagctacacttttgaggacgttcctttccacagcagctacgctcacagccagagtctggaccgtctcatgaatcctctcatcgaccagtacctgtattacttgagcagaacaaacactccaagtggaaccaccacgcagtcaaggcttcagttttctcaggccggagcgagtgacattcgggaccagtctaggaactggcttcctggaccctgttaccgccagcagcgagtatcaaagacatctgaggataacaacaacagtgaatactcgtggactggagctaccaagtaccacctcaatggcagagactctctggtgaatccgggcccggccatggcaagccacaaggacgatgaagaaaagttttttcctcagagcggggttctcatctttgggaagcaaggctcagagaaaacaaatgtggacattgaaaaggtcatgattacagacgaagaggaaatcaggacaaccaatcccgtggctacggagcagtatggttctgtatctaccaacctccagagaggcaacagacaagcagctaccgcagatgtcaacacacaaggcgttcttccaggcatggtctggcaggacagagatgtgtaccttcaggggcccatctgggcaaagattccacacacggacggacattttcacccctctcccctcatgggtggattcggacttaaacaccctcctccacagattctcatcaagaacaccccggtacctgcgaatccttcgaccaccttcagtgcggcaaagtttgcttccttcatcacacagtactccacgggacaggtcagcgtggagatcgagtgggagctgcagaaggaaaacagcaaacgctggaatcccgaaattcagtacacttccaactacaacaagtctgttaatgtggactttactgtggacactaatggcgtgtattcagagcctcgccccattggcaccagatacctgactcgtaatctgtaa

SEQ ID NO: 377 - protein, 735 aa, synthetic construct
  REGION 1..735: note = Description of Artificial Sequence: Synthetic polypeptide
MAADGYLPDWLEDNLSEGIREWWALKPGAPKPKANQQKQDDGRGLVLPGYKYLGPFNGLDKGEPVNAADAAALEHDKAYDQQLQAGDNPYLRYNHADAEFQERLQEDTSFGGNLGRAVFQAKKRLLEPLGLVEEAAKTAPGKKRPVEQSPQEPDSSAGIGKSGAQPAKKRLNFGQTGDSESVPDPQPLGEPPAAPTSLGSNTMASGGGAPMADNNEGADGVGNASGNWHCDSTWLGDRVITTSTRTWALPTYSNHLYKQISSQSGASNDNDYFGYSTPWGYFDFNRFHCHFSPRDWQRLINNNWGFRPKRLNFKLFNIQVKEVTQNDGTTTIANNLTSTVQVFTDSEYQLPYVLGSAHQGCLPPFPADVFMVPQYGYLTLNNGSQAVGRSSFYCLEYFPSQMLRTGNNFTFSYTFEDVPFHSSYAHSQSLDRLMNPLIDQYLYYLSRTNTPSGTTTQSRLQFSQAGASDIRDQSRNWLPGPCYRQQRVSKTSEDNNNSEYSWTGATKYHLNGRDSLVNPGPAMASHKDDEEKFFPQSGVLIFGKQGSEKTNVDIEKVMITDEEEIRTTNPVATEQYGSVSTNLQRGNRQAATADVNTQGVLPGMVWQDRDVYLQGPIWAKIPHTDGHFHPSPLMGGFGLKHPPPQILIKNTPVPANPSTTFSAAKFASFITQYSTGQVSVEIEWELQKENSKRWNPEIQYTSNYNKSVNVDFTVDTNGVYSEPRPIGTRYLTRNL

SEQ ID NO: 378 - DNA, 2208 bp, synthetic construct
  misc_feature 1..2208: note = Description of Artificial Sequence: Synthetic polynucleotide
  source 1..2208: mol_type = other DNA
atggctgccgatggttatcttccagattggctcgaggacaacctctctgagggcattcgcgagtggtgggcgctgaaacctggagccccgaagcccaaagccaaccagcaaaagcaggacgacggccggggtctggtgcttcctggctacaagtacctcggacccttcaacggactcgacaagggggagcccgtcaacgcggcggacgcagcggccctcgagcacgacaaggcctacgaccagcagctgcaggcgggtgacaatccgtacctgcggtataaccacgccgacgccgagttccaggagcgtctgcaagaagatacgtcttttgggggcaacctcgggcgagcagtcttccaggccaagaagagggttctcgaaccttttggtctggttgaggaaggtgctaagacggctcctggaaagaaacgtccggtagagcagtcgccacaagagccagactcctcctcgggcattggcaagacaggccagcagcccgctaaaaagagactcaattttggtcagactggcgactcagagtcagtcccagaccctcaacctctcggagaaccaccagcagcccccacaagtttgggatctaatacaatggcttcaggcggtggcgcaccaatggcagacaataacgagggcgccgacggagtgggtaattcctcgggaaattggcattgcgattccacatggatgggcgacagagtcatcaccaccagcacccgaacctgggccctgcccacctacaacaaccacctctacaaacaaatttccagccaatcaggagcttcaaacgacaaccactactttggctacagcaccccttgggggtattttgactttaacagattccactgccacttttcaccacgtgactggcagcgactcattaacaacaactggggattccggcccaagaaactcaacttcaagctctttaacatccaggtcaaggaggtcacgcagaatgaaggcaccaagaccatcgccaataacctcaccagcaccatccaggtgtttacggactcggagtaccagctgccgtacgttctcggctctgcccaccagggctgcctgcctccgttcccggcggacgtgttcatgattccccagtacggctacctaacactcaacaacggtagtcaggccgtgggacgctcctccttctactgcctggaatactttccttcgcagatgctgagaaccggcaacaacttccagtttacttacaccttcgaggacgtgcctttccacagcagctacgcccacagccagagcttggaccggctgatgaatcctctgattgaccagtacctgtattacttgtctcggactcaaacaacaggaggcacgacaaatacgcagactctgggcttcagccaaggtgggcctaatacaatggccaatcaggcaaagaactggctgcctggaccctgttaccgccagcagcgagtatcaaagacatctgcggataacaacaacagtgaatactcgtggactggagctaccaagtaccacctcaatggcagagactctctggtgaatccgggcccggccatggcaagccacaaggacgatgaagaaaagttttttcctcagagcggggttctcatctttgggaagcaaggctcagagaaaacaaatgtggacattgaaaaggttatgattacagacgaagaggaaatcaggacaaccaatcccgtggctacggagcagtatggttctgtatctaccaacctccagagaggcaacagacaagcagctaccgcagatgtcaacacacagggcgttcttccaggcatggtctggcaggacagagatgtgtaccttcagggtcccatttgggccaaaattcctcacacagatggacactttcacccgtcccctcttatgggcggctttggactcaagaacccgcctcctcagatcctcatcaaaaacacgcctgttcctgcgaatcctccggcagagttttcagctacaaagtttgcttcattcatcacccaatactccacaggacaagtgagtgtggaaattgaatgggagctgcagaaagaaaacagcaagcgctggaatcccgaagtgcagtacacatccaattatgcaaaatctgccaacgttgattttactgtggacactaatggcgtgtattcagagcctcgccccattggcaccagatacctcacccgtaatctgtaa

SEQ ID NO: 379 - protein, 735 aa, synthetic construct
  REGION 1..735: note = Description of Artificial Sequence: Synthetic polypeptide
MAADGYLPDWLEDNLSEGIREWWALKPGAPKPKANQQKQDDGRGLVLPGYKYLGPFNGLDKGEPVNAADAAALEHDKAYDQQLQAGDNPYLRYNHADAEFQERLQEDTSFGGNLGRAVFQAKKRVLEPFGLVEEGAKTAPGKKRPVEQSPQEPDSSSGIGKTGQQPAKKRLNFGQTGDSESVPDPQPLGEPPAAPTSLGSNTMASGGGAPMADNNEGADGVGNSSGNWHCDSTWMGDRVITTSTRTWALPTYNNHLYKQISSQSGASNDNHYFGYSTPWGYFDFNRFHCHFSPRDWQRLINNNWGFRPKKLNFKLFNIQVKEVTQNEGTKTIANNLTSTIQVFTDSEYQLPYVLGSAHQGCLPPFPADVFMIPQYGYLTLNNGSQAVGRSSFYCLEYFPSQMLRTGNNFQFTYTFEDVPFHSSYAHSQSLDRLMNPLIDQYLYYLSRTQTTGGTTNTQTLGFSQGGPNTMANQAKNWLPGPCYRQQRVSKTSADNNNSEYSWTGATKYHLNGRDSLVNPGPAMASHKDDEEKFFPQSGVLIFGKQGSEKTNVDIEKVMITDEEEIRTTNPVATEQYGSVSTNLQRGNRQAATADVNTQGVLPGMVWQDRDVYLQGPIWAKIPHTDGHFHPSPLMGGFGLKNPPPQILIKNTPVPANPPAEFSATKFASFITQYSTGQVSVEIEWELQKENSKRWNPEVQYTSNYAKSANVDFTVDTNGVYSEPRPIGTRYLTRNL

SEQ ID NO: 380 - DNA, 2214 bp, synthetic construct; identical to SEQ ID NO: 370
  misc_feature 1..2214: note = Description of Artificial Sequence: Synthetic polynucleotide
  source 1..2214: mol_type = other DNA

SEQ ID NO: 381 - protein, 737 aa, synthetic construct; identical to SEQ ID NO: 371
  REGION 1..737: note = Description of Artificial Sequence: Synthetic polypeptide

SEQ ID NO: 382 - DNA, 2196 bp, Adeno-associated virus
  source 1..2196: mol_type = genomic DNA
atggctgctgacggttatcttccagattggctcgaggacaacctctctgagggcattcgcgagtggtgggcgctgaaacctggagccccgcaacccaaagccaaccagcaaaagcaggacgacggccggggtctggtgcttcctggctacaagtacctcggacccttcaacggactcgacaagggggagcccgtcaacgaggcggacgccgcggccctcgagcacgacaaggcctacgaccagcagctcaaagcgggtgacaatccgtacctgcggtataatcacgccgacgccgagtttcaagagcgtctgcaagaagatacgtcctttgggggcaacctcgggcgagcagtcttccaggccaaaaagagggtactcgagcctctgggtctggttgaggaaggcgctaagacggctcctggaaagaagcggccagtagaaccggactccagctcgggcatcggcaagtcaggccagcagcccgcgaaaaagagactgaattttgggcagactggcgactcagagtcagtgcctgacccccaacctctctcagaaccacccgcaggtccctctggtctgggatctggtacaatggctgctggcggtggcgctccaatggcagacaataacgaaggcgccgacggagtgggtaatgtctcaggaaattggcattgcgattccacatggctgggcgaccgagtcatcaccaccagcactcggacctgggccctccccacctacaacaaccacctctacaagcaaatctccaacgggacctcgggaggcagcagcaacgacaacacctactttggctacagcaccccctgggggtattttgactttaacagattccactgccacttttcaccacgtgactggcagcgactcatcaacaacaactgggggttccggcccaagaagctcaacttcaagctcttcaacatccaggtcaaggaggtcacccagaatgaaggcaccaagaccatcgccaataacctcaccagcacggtgcaggtctttacggactcggagtaccagctcccgtacgtgctcggctctgcccaccagggctgcctgcctccgttcccggcggacgtgttcatgattccgcagtacgggtacctgacgctgaacaacgggagccaggccgtggggcgatcctccttctactgcctggagtactttccctcgcagatgctgagaacgggcaacaactttaccttcagctacaccttcgaggacgtgcccttccacagcagctacgcgcacagccagagcctggaccggctgatgaacccgctgattgaccagtacctgtactacctgtctcggactcagaccaacgggaccaatgccacgcagactctgttgtttgctcaggccgggcctcagaacatgtcggctcaggccaagaactggctgcctggtccttgctatcggcagcagcgcgtctctacgacagtgtcgcaaaacaacaacagcaactttacctggaccggggcgaccaagtaccacctgaacggccgagactccctggtgagccccggtgtcgccatggcaacgcacaaggacgacgaggagcgcttcttcccgagcagcggggtcctgatgtttggcaagcagggcgctggaaaggacaatgtcgagtacaccaacgtgatgctcaccagcgaggaggagatcaagaccaccaaccctgtggccacggagcagtacggcgtggtggctgacaatctgcagcagaccaactcagctcccattgtgggggcagtcaacagccagggggccttacccggtatggtctggcagaaccgggacgtgtacctgcagggtcccatctgggccaagatcccgcatacggacggcaactttcacccgtctcctctcatgggcggctttggactgaaacacccgcctccccagatcctgatcaaaaacacgccggtacctgcggatcccccggtgaactttacggacgctaagctggcgagtttcatcacgcagtacagcaccgggcaggtcagcgtggagattgagtgggagctgcagaaggagaacagcaagcgctggaatcccgagattcagtacacttccaattattataaatcagctaatgtggactttgccgtcaatgcagatggtgtatatagtgaaccccgccccattggcactcgttacctcacccgtaatctgtaa

SEQ ID NO: 383 - protein, 731 aa, Adeno-associated virus
MAADGYLPDWLEDNLSEGIREWWALKPGAPQPKANQQKQDDGRGLVLPGYKYLGPFNGLDKGEPVNEADAAALEHDKAYDQQLKAGDNPYLRYNHADAEFQERLQEDTSFGGNLGRAVFQAKKRVLEPLGLVEEGAKTAPGKKRPVEPDSSSGIGKSGQQPAKKRLNFGQTGDSESVPDPQPLSEPPAGPSGLGSGTMAAGGGAPMADNNEGADGVGNVSGNWHCDSTWLGDRVITTSTRTWALPTYNNHLYKQISNGTSGGSSNDNTYFGYSTPWGYFDFNRFHCHFSPRDWQRLINNNWGFRPKKLNFKLFNIQVKEVTQNEGTKTIANNLTSTVQVFTDSEYQLPYVLGSAHQGCLPPFPADVFMIPQYGYLTLNNGSQAVGRSSFYCLEYFPSQMLRTGNNFTFSYTFEDVPFHSSYAHSQSLDRLMNPLIDQYLYYLSRTQTNGTNATQTLLFAQAGPQNMSAQAKNWLPGPCYRQQRVSTTVSQNNNSNFTWTGATKYHLNGRDSLVSPGVAMATHKDDEERFFPSSGVLMFGKQGAGKDNVEYTNVMLTSEEEIKTTNPVATEQYGVVADNLQQTNSAPIVGAVNSQGALPGMVWQNRDVYLQGPIWAKIPHTDGNFHPSPLMGGFGLKHPPPQILIKNTPVPADPPVNFTDAKLASFITQYSTGQVSVEIEWELQKENSKRWNPEIQYTSNYYKSANVDFAVNADGVYSEPRPIGTRYLTRNL

SEQ ID NO: 384 - DNA, 2196 bp, Adeno-associated virus
  source 1..2196: mol_type = genomic DNA
atggctgctgacggttatcttccagattggctcgaggacaacctctctgagggcattcgcgagtggtgggcgctgaaacctggagccccgcaacccaaagccaaccagcaaaagcaggacgacggccggggtctggtgcttcctggctacaagtacctcggacccttcaacggactcgacaagggggagcccgtcaacgaggcggacgccgcggccctcgagcacgacaaggcctacgaccagcagctcaaagcgggtgacaatccgtacctgcggtataatcacgccgacgccgagtttcaagagcgtctgcaagaagatacgtcctttgggggcaacctcgggcgagcagtcttccaggccaaaaagagggtactcgagcctctgggtctggttgaggaaggcgctaagacggctcctggaaagaagcggccagtagaaccggactccagctcgggcatcggcaagtcaggccggcagcccgcgaaaaagagactgaattttgggcagactggcgactcagagtcagtgcctgacccccaacctctctcagaaccacccgcaggtccctctggtctgggatctggtacaatggctgcaggcggtggcgctccaatggcagacaataacgaaggcgccgacggagtgggtaatgcctcaggaaattggcattgcgattccacatggctgggcgaccgagtcatcaccaccagcactcggacctgggccctccccacctacaacaaccacctctacaagcaaatctccaacgggacctcgggaggcagcagcaacgacaacacctactttggctacagcaccccctgggggtattttgactttaacagattccactgccacttttcaccacgtgactggcagcgactcatcaacaacaactggggattccggcccaagaggctcaacttcaagctcttcaacatccaggtcaaggaggtcacccagaatgaaggcaccaagaccatcgccaataacctcaccagcacggtgcaggtctttacggactcgaagtaccagctcccgtacgtgctcggctctgcccaccagggctgcctgcctccgttcccggcggacgtgttcatgattccgcagtacgggtacctgacgctgaacaacgggagccaggccgtggggcgatcctccttctactgcctggagtactttccctcgcagatgctgagaacgggcaacaactttaccttcagctacaccttcgaggacgtgcccttccacagcagctacgcgcacagccagagcctggaccggctgatgaacccgctgattgaccagtacctgtactacctgtctcggactcagaccaacgggaccaatgccacgcagactctgttgtttgctcaggccgggcctcagaacatgtcggctcaggccaagaactggctgcctggtccttgctatcggcagcagcgcgtctctacgacagtgtcgcaaaacaacaacagcaactttacctggaccggggcgaccaagtaccacctgaacggccgagactccctggtgaaccccggtgtcgccatggcaacgcacaaggacgacgaggagcgcttcttcccgagcagcggggtcctgatgtttggcaagcagggcgctggaaaggacaatgtcgagtacaccaacgtgatgctcaccagcgaggaggagatcaagaccaccaaccctgtggccacggagcagtacggtgtggtggctgacaatctgcagcagaccaactcggctcccattgtgggggcagtcaacagccagggggccttacccggtatggtctggcagaaccgggacgtgtacctgcagggtcccatctgggccaagatcccgcatacggacggcaactttcacccgtctcctctcatgggcggctttggactgaaacacccgcctccccagatcctgatcaaaaacacgccggtacctgcggatcccccggtgaactttacggacgctaagctggcgagtttcatcacgcagtacagcaccgggcaggtcagcgtggagattgagtgggagctgcagaaggagaacagcaagcgctggaatcccgagattcagtacacttccaattattataaatcagctaatgtggactttgccgtcaatgcagatggtgtatatagtgaaccccgccccattggcactcgttacctcacccgtaatctgtaa

SEQ ID NO: 385 - protein, 731 aa, Adeno-associated virus
MAADGYLPDWLEDNLSEGIREWWALKPGAPQPKANQQKQDDGRGLVLPGYKYLGPFNGLDKGEPVNEADAAALEHDKAYDQQLKAGDNPYLRYNHADAEFQERLQEDTSFGGNLGRAVFQAKKRVLEPLGLVEEGAKTAPGKKRPVEPDSSSGIGKSGRQPAKKRLNFGQTGDSESVPDPQPLSEPPAGPSGLGSGTMAAGGGAPMADNNEGADGVGNASGNWHCDSTWLGDRVITTSTRTWALPTYNNHLYKQISNGTSGGSSNDNTYFGYSTPWGYFDFNRFHCHFSPRDWQRLINNNWGFRPKRLNFKLFNIQVKEVTQNEGTKTIANNLTSTVQVFTDSKYQLPYVLGSAHQGCLPPFPADVFMIPQYGYLTLNNGSQAVGRSSFYCLEYFPSQMLRTGNNFTFSYTFEDVPFHSSYAHSQSLDRLMNPLIDQYLYYLSRTQTNGTNATQTLLFAQAGPQNMSAQAKNWLPGPCYRQQRVSTTVSQNNNSNFTWTGATKYHLNGRDSLVNPGVAMATHKDDEERFFPSSGVLMFGKQGAGKDNVEYTNVMLTSEEEIKTTNPVATEQYGVVADNLQQTNSAPIVGAVNSQGALPGMVWQNRDVYLQGPIWAKIPHTDGNFHPSPLMGGFGLKHPPPQILIKNTPVPADPPVNFTDAKLASFITQYSTGQVSVEIEWELQKENSKRWNPEIQYTSNYYKSANVDFAVNADGVYSEPRPIGTRYLTRNL

SEQ ID NO: 386 - DNA, 2196 bp, Adeno-associated virus
  source 1..2196: mol_type = genomic DNA
atggctgctgacggttatcttccagattggctcgaggacaacctctctgagggcattcgcgagtggtgggcgctgaaacctggagccccgcaacccaaagccaaccagcaaaagcaggacgacggccggggtctggtgcttcctggctacaagtacctcggacccttcaacggactcgacaagggggagcccgtcaacgaggcggacgccgcggccctcgagcacgacaaggcctacgaccagcagctcaaagcgggtgacaatccgtacctgcggtataatcacgccgacgccgagtttcaagagcgtctgcaagaagatacgtcctttgggggcaacctcgggcgagcagtcttccaggccaaaaagagggtactcgagcctctgggtctggttgaggaaggcgctaagacggctcctggaaagaagcggccagtagaaccggactccagctcgggcatcggcaagtcaggccagcagcccgcgaaaaagagactgaattttgggccgactggcgactcagagtcagtgcctgacccccaacctctctcagaaccacctgcaggtccctctggtctgggatctggtacaatggctgcaggcggtggcgctccaatggcagacaataacgaaggcgccgacggagtgggtaatgtctcaggaaattggcattgcgattccacatggctgggcgaccgagtcatcaccaccagcactcggacctgggccctccccacctacaacaaccacctctacaagcaaatctccaacgggacctcgggaggcagcagcaacgacaacacctactttggctacagcaccccctgggggtattttgactttaacagattccactgccacttttcaccacgcgactggcagcgactcatcaacaacaactggggattccggcccaagaagctcaacttcaagctcttcaacatccaggtcaaggaggtcacccagaatgaaggcaccaagaccaccgccaataacctcaccagcacggtgcaggtctttacggactcggagtaccagctcccgtacgtgctcggctctgcccaccagggctgcctgcctccgttcccggcggacgtgttcatgattccgcagtacgggtacctgacgctgaacaacgggagccaggccgtggggcgatcctccttctactgcctggagtactttccctcgcagatgctgagaacgggcaacaactttaccttcagctacaccttcgaggacgtgcccttccacagcagctacgcgcacagccagagcctggaccggctgatgaacccgctgattgaccagtacctgtactacctgtctcggactcagaccaacgggaccaatgccacgcagactctgttgtttgctcaggccgggcctcagaacatgtcggctcaggccaagaactggctgcctggtccttgctatcggcagcagcgcgtctctacggcagtgtcgcaaaacaacaacagcaactttacctggaccggggcgaccaagtaccacctgaacggccgagactccctggtgaaccccggtgtcgccatggcaacgcacaaggacgacgaggagcgcttcttcccgagcagcggggtcctgatgtttggcaagcagggcgctggaaaggacaatgtcgagtacaccaacgtgatgctcaccagcgaggaggagatcaagaccaccaaccctgtggccacggagcagtacggtgtggtggctgacaatctgcagcagaccaactcggctcccattgtgggggcagtcaacagccagggggccttacccggtatggtctggcagaaccgggacgtgtacctgcagggtcccatctgggccaagatcccgcatacggacggcaactttcacccgtctcctctcatgggcggctttggactgaaacacccgcctccccagatcctgatcaaaaacacgccggtacctgcggatcccccggtgaactttacggacgctaagctggcgagtttcatcacgcagtacagcaccgggcaggtcagcgtggagattgagtgggagctgcagaaggagaacagcaagcgctggaatcccgagattcagtacacttccaattattataaatcagctaatgtggactttgccgtcaatgcagatggtgtatatagcgaaccccgccccattggcactcgttacctcacccgtaatctgtaa

SEQ ID NO: 387 - protein, 731 aa, Adeno-associated virus
MAADGYLPDWLEDNLSEGIREWWALKPGAPQPKANQQKQDDGRGLVLPGYKYLGPFNGLDKGEPVNEADAAALEHDKAYDQQLKAGDNPYLRYNHADAEFQERLQEDTSFGGNLGRAVFQAKKRVLEPLGLVEEGAKTAPGKKRPVEPDSSSGIGKSGQQPAKKRLNFGPTGDSESVPDPQPLSEPPAGPSGLGSGTMAAGGGAPMADNNEGADGVGNVSGNWHCDSTWLGDRVITTSTRTWALPTYNNHLYKQISNGTSGGSSNDNTYFGYSTPWGYFDFNRFHCHFSPRDWQRLINNNWGFRPKKLNFKLFNIQVKEVTQNEGTKTTANNLTSTVQVFTDSEYQLPYVLGSAHQGCLPPFPADVFMIPQYGYLTLNNGSQAVGRSSFYCLEYFPSQMLRTGNNFTFSYTFEDVPFHSSYAHSQSLDRLMNPLIDQYLYYLSRTQTNGTNATQTLLFAQAGPQNMSAQAKNWLPGPCYRQQRVSTAVSQNNNSNFTWTGATKYHLNGRDSLVNPGVAMATHKDDEERFFPSSGVLMFGKQGAGKDNVEYTNVMLTSEEEIKTTNPVATEQYGVVADNLQQTNSAPIVGAVNSQGALPGMVWQNRDVYLQGPIWAKIPHTDGNFHPSPLMGGFGLKHPPPQILIKNTPVPADPPVNFTDAKLASFITQYSTGQVSVEIEWELQKENSKRWNPEIQYTSNYYKSANVDFAVNADGVYSEPRPIGTRYLTRNL

SEQ ID NO: 388 - DNA, 4404 bp, Adeno-associated virus
  source 1..4404: mol_type = genomic DNA
atggctgccgatggttatcttccagattggctcgagggcaacctctctgagggcattcgcgagtggtgggacttgaaacctggagccccgaaacccaaagccaaccagcaaaagcaggacgacggccggggtctggtgcttcctggctacaggtacctcggacccttcaacggactcgacaagggagagccggtcaacgaggcagacgccgcggccctcgagcacgacaaggcctacgacaagcagctcgagcagggggacaacccgtacctcaagtacaaccacgccgacgccgagtttcaggagcgtcttcaagaagatacgtcttttgggggcaacctcgggcgagcagtcttccaggccaagaagcgggttctcgaacctctcggtctggttgaggaaggcgctaagacggctcctggaaagaagagacccatagaatcccccgactcctccacgggcatcggcaagaacggccagccgcccgctaaaaagaagctcaactttgggcagactggcgactcagagtcagtgcccgacccccaacctctcggagaacctcccgccgcgccctcaggtctgggatctggtacaatggctgcaggcggtggcgcaccaatggcagacaataacgaaggcgccgacggagtgggtaatgcctccggaaattggcattgcgattccacatggctgggcgacagagtcatcaccaccagcacccgcacctgggccctgcccacctacaacaaccacctctacaagcagatatcaagtcagagcggggctaccaacgacaaccacttcttcggctacagcaccccctggggctattttgacttcaacagattccactgccacttctcaccacgtgactggcagcgactcatcaacaacaactggggattccggcccagaaagctgcggttcaagttgttcaacatccaggtcaaggaggtcacgacgaacgacggcgttacgaccatcgctaataaccttaccagcacgattcaggtcttctcggactcggagtaccaactgccgtacgtcctcggctctgcgcaccagggctgcctccctccgttccctgcggacgtgttcatgattcctcagtacggatatctgactctaaacaacggcagtcagtctgtgggacgttcctccttctactgcctggagtactttccttctcagatgctgagaacgggcgataactttgaattcagctacacctttgaggaagtgcctttccacagcagctatgcgcacagccagagcctggaccggctgatgaatcccctcatcgaccagtacctgtactacctggcccggacccagagcactacggggtccacaagggagctgcagttccatcaggctgggcccaacaccatggccgagcaatcaaagaactggctgcccggaccctgttatcggcagcagagactgtcaaaaaacatagacagcaacaacaacagtaactttgcctggaccggggccactaaataccatctgaatggtagaaattcattaaccaacccgggcgtagccatggccaccaacaaggacgacgaggaccagttctttcccatcaacggagtgctggtttttggcaaaacgggggctgccaacaagacaacgctggaaaacgtgctaatgaccagcgaggaggagatcaaaaccaccaatcccgtggctacagaagaatacggtgtggtctccagcaacctgcaatcgtctacggccggaccccagacacagactgtcaacagccagggggctctgcccggcatggtctggcagaaccgggacgtgtacctgcagggtcccatctgggccaaaattcctcacacggacggcaactttcacccgtctcccctgatgggcggatttggactcaaacacccgcctcctcaaattctcatcaaaaacaccccggtacctgctaatcctccagaggtgtttactcctgccaagtttgcctcatttatcacgcagtacagcaccggccaggtcagcgtggagatcgagtgggaactgcagaaagaaaacagcaaacgctggaatccagagattcagtacacctcaaattatgccaagtctaataatgtggaatttgctgtcaacaacgaaggggtttatactgagcctcgccccattggcacccgttacctcacccgtaacctgtaaatggctgccgatggttatcttccagattggctcgaggacaacctctctgagggcattcgcgagtggtgggacttgaaacctggagccccgaaacccaaagccaaccagcaaaagcaggacgacggccggggtctggtgcttcctggctacaagtacctcggacccttcaacggactcgacaagggggagcccgtcaacgcggcggacgcagcggccctcgagcacgacaaggcctacgaccagcagctcaaagcgggtgacaatccgtacctgcggtataaccacgccgacgccgagtttcaggagcgtctgcaagaagatacgtcttttgggggcaacctcgggcgagcagtcttccaggccaagaagcgggttctcgaacctctcggtctggttgaggaaggcgctaagacggctcctggaaagaagagaccggtagagccatcaccccagcgttctccagactcctctacgggcatcggcaagaaaggccagcagcccgcgaaaaagagactcaactttgggcagactggcgactcagagtcagtgcccgaccctcaaccaatcggagaaccccccgcaggcccctctggtctgggatctggtacaatggctgcaggcggtggcgctccaatggcagacaataacgaaggcgccgacggagtgggtagttcctcaggaaattggcattgcgattccacatggctgggcgacagagtcatcaccaccagcacccgaacctgggccctccccacctacaacaaccacctctacaagcaaatctccaacgggacttcgggaggaagcaccaacgacaacacctacttcggctacagcaccccctgggggtattttgactttaacagattccactgccacttctcaccacgtgactggcagcgactcatcaacaacaactggggattccggcccaagagactcaacttcaagctcttcaacatccaggtcaaggaggtcacgcagaatgaaggcaccaagaccatcgccaataaccttaccagcacgattcaggtctttacggactcggaataccagctcccgtacgtcctcggctctgcgcaccagggctgcctgcctccgttcccggcggacgtcttcatgattcctcagtacgggtacctgactctgaacaatggcagtcaggccgtgggccgttcctccttctactgcctggagtactttccttctcaaatgctgagaacgggcaacaactttgagttcagctaccagtttgaggacgtgccttttcacagcagctacgcgcacagccaaagcctggaccggctgatgaaccccctcatcgaccagtacctgtactacctgtctcggactcagtccacgggaggtaccgcaggaactcagcagttgctattttctcaggccgggcctaataacatgtcggctcaggccaaaaactggctacccgggccctgctaccggcagcaacgcgtctccacgacactgtcgcaaaataacaacagcaactttgcctggaccggtgccaccaagtatcatctgaatggcagagactctctggtaaatcccggtgtcgctatggcaacccacaaggacgacgaagagcgattttttccgtccagcggagtcttaatgtttgggaaacagggagctggaaaagacaacgtggactatagcagcgttatgctaaccagtgaggaagaaattaaaaccaccaacccagtggccacagaacagtacggcgtggtggccgataacctgcaacagcaaaacgccgctcctattgtaggggccgtcaacagtcaaggagccttacctggcatggtctggcagaaccgggacgtgtacctgcagggtcctatctgggccaagattcctcacacggacggaaactttcatccctcgccgctgatgggaggctttggactgaaacacccgcctcctcagatcctgattaagaatacacctgttcccgcggatcctccaactaccttcagtcaagctaagctggcgtcgttcatcacgcagtacagcaccggacaggtcagcgtggaaattgaatgggagctgcagaaagaaaacagcaaacgctggaacccagagattcaatacacttccaactactacaaatctacaaatgtggactttgctgttaacacagatggcacttattctgagcctcgccccatcggcacccgttacctcacccgtaatctgtaa

SEQ ID NO: 389 - protein, 738 aa, Adeno-associated virus; identical to SEQ ID NO: 7

SEQ ID NO: 390 - DNA, 3129 bp, Adeno-associated virus
  source 1..3129: mol_type = genomic DNA
gaattcgccctttctacggctgcgtcaactggaccaatgagaactttcccttcaacgattgcgtcgacaagatggtgatctggtgggaggagggcaagatgacggccaaggtcgtggagtccgccaaggccattctcggcggcagcaaagtgcgcgtggaccaaaagtgcaagtcgtccgcccagatcgaccccacccccgtgatcgtcacctccaacaccaacatgtgcgccgtgattgacgggaacagcaccaccttcgagcaccagcagccgttgcaggaccggatgttcaagtttgaactcacccgccgtctggagcacgactttggcaaggtgacaaagcaggaagtcagagagttcttccgctgggcgcaggatcacgtgaccgaggtggcgcacgagttctacgtcagaaagggtggagccaacaagagacccgcccccgatgacgcggataaaagcgagcccaagcgggcctgcccctcagtcgcggatccatcgacgtcagacgcggaaggagctccggtggactttgccgacaggtaccaaaacaaatgttctcgtcacgcgggcatgcttcagatgctgtttccctgcaaaacatgcgagagaatgaatcagaatttcaacatttgcttcacgcacgggaccagagactgttcagaatgtttccccggcgtgtcagaatctcaaccggtcgtcagaaaaaagacgtatcggaaactctgtgcgattcatcatctgctgggggcgggcacccgagattgcttgctcggcctgcgatctggtcaacgtggacctagatgactgtgtttctgagcaataaatgacttaaaccaggtatggctgccgatggttatcttccagattggctcgaggacaacctctctgagggcattcgcgagtggtgggacttgaaacctggagccccgaaacccaaagccaaccagcaaaagcaggacgacggccggggtctggtgcttcctggctacaagtacctcggacccttcaacggactcgacaagggggagcccgtcaacgcggcggacgcagcggccctcgagcacgacaaggcctacgaccagcagctcaaagcgggtgacaatccgtacctgcggtataaccacgccgacgccgagtttcaggagcgtctgcaagaagatacgtcttttgggggcaacctcgggcgagcagtcttccaggccaagaagcgggttctcgaacctctcggtctggttgaggaaggcgctaagacggctcctggaaagaagagaccggtagagccatcaccccagcgttctccagactcctctacgggcatcggcaagaaaggccagcagcccgcgaaaaagagactcaactttgggcagactggcgactcagagtcagtgcccgaccctcaaccaatcggagaaccccccgcaggcccctctggtctgggatctggtacaatggctgcaggcggtggcgctccaatggcagacaataacgaaggcgccgacggagtgggtagttcctcaggaaattggcattgcgattccacatggctgggcgacagagtcatcaccaccagcacccgaacctgggccctccccacctacaacaaccacctctacaagcaaatctccaacgggacttcgggaggaagcaccaacgacaacacctacttcggctacagcaccccctgggggtattttgactttaacagattccactgccacttctcaccacgtgactggcagcgactcatcaacaacaactggggattccggcccaagagactcaacttcaagctcttcaacatccaggtcaaggaggtcacgcagaatgaaggcaccaagaccatcgccaataaccttaccagcacgattcaggtctttacggactcggaataccagctcccgtacgtcctcggctctgcgcaccagggctgcctgcctccgttcccggcggacgtcttcatgattcctcagtacgggtacctgactctgaacaatggcagtcaggccgtgggccgttcctccttctactgcctggagtactttccttctcaaatgctgagaacgggcaacaactttgagttcagctaccagtttgaggacgtgccttttcacagcagctacgcgcacagccaaagcctggaccggctgatgaaccccctcatcgaccagtacctgtactacctgtctcggactcagtccacgggaggtaccgcaggaactcagcagttgctattttctcaggccgggcctaataacatgtcggctcaggccaaaaactggctacccgggccctgctaccggcagcaacgcgtctccacgacactgtcgcaaaataacaacagcaactttgcctggaccggtgccaccaagtatcatctgaatggcagagactctctggtaaatcccggtgtcgctatggcaacccacaaggacgacgaagagcgattttttccgtccagcggagtcttaatgtttgggaaacagggagctggaaaagacaacgtggactatagcagcgttatgctaaccagtgaggaagaaattaaaaccaccaacccagtggccacagaacagtacggcgtggtggccgataacctgcaacagcaaaacgccgctcctattgtaggggccgtcaacagtcaaggagccttacctggcatggtctggcagaaccgggacgtgtacctgcagggtcctatctgggccaagattcctcacacggacggaaactttcatccctcgccgctgatgggaggctttggactgaaacacccgcctcctcagatcctgattaagaatacacctgttcccgcggatcctccaactaccttcagtcaagctaagctggcgtcgttcatcacgcagtacagcaccggacaggtcagcgtggaaattgaatgggagctgcagaaagaaaacagcaaacgctggaacccagagattcaatacacttccaactactacaaatctacaaatgtggactttgctgttaacacagatggcacttattctgagcctcgccccatcggcacccgttacctcacccgtaatctgtaattgcttgttaatcaataaaccggttgattcgtttcagttgaactttggtctctgcgaagggcgaattc

SEQ ID NO: 391 - protein, 738 aa, synthetic construct; identical to SEQ ID NO: 7
  REGION 1..738: note = Description of Artificial Sequence: Synthetic polypeptide

SEQ ID NO: 392 - protein, 733 aa, synthetic construct
  REGION 1..733: note = Description of Artificial Sequence: Synthetic polypeptide
MAADGYLPDWLEDNLSEGIREWWDLRPGAPKPKANQQKQDDGRGLVLPGYKYLGPFNGLDKGEPVNEADAAALEHDKAYDKQLEQGDNPYLKYNHADAEFQERLQEDTSFGGNLGRAVFQAKKRVLEPLGLVEEGAKTAPGKKRPIESPDSSTGIGKKGQQPAKKRLNFGQTGDSESVPDPQPIGEPPAGPSGLGSGTMAAGGGAPMADNNEGADGVGSSSGNWHCDSTWLGDRVITTSTRTWALPTYNNHLYKQISNGTSGGSTNDNTYFGYSTPWGYFDFNRFHCHFSPRDWQRLINNNWGFRPKRLNFKLFNIQVKEVTQNEGTKTIANNLTSTIQVFTDSEYQLPYVLGSAHQGCLPPFPADVFMIPQYGYLTLNNGSQAVGRSSFYCLEYFPSQMLRTGNNFEFSYQFEDVPFHSSYAHSQSLDRLMNPLIDQYLYYLSRTQSTGGTAGTQQLLFSQAGPNNMSAQAKNWLPGPCYRQQRVSTTVSQNNNSNFAWTGATKYHLNGRDSLVNPGVAMATHKGDEERFFPSSGVLMFGKQGAGKDNVDYSSVMLTSEEEIKTTNPVATEQYGVVADNLQQQNAAPIVGAVNSQGALPGMVWQNRDVYLQGPIWAKIPHTDGNFHPSPLMGGFGLKHPPPQILIKNTPVPADPPTTFSQAKLASFITQYSTGQVSVEIEWELQKENSKRWNPEIQYTSNYYKSTNVDFAVNTEGTYSEPRPIGTRYLTRNL

SEQ ID NO: 393 - DNA, 2501 bp, Adeno-associated virus
  source 1..2501: mol_type = genomic DNA
gaattcgcccttggctgcgtcaactggaccaatgagaactttcccttcaacgattgcgtcgacaagatggtgatctggtgggaggagggcaagatgacggccaaggtcgtggagtccgccaaggccattcatcatctgctggggcgggctcccgagattgcttgctcggcctgcgatctggtcaacgtggacctggatgactgtgtttctgagcaataaatgacttaaaccaggtatggctgccgatggttatcttccagattggctcgaggacaacctctctgagggcattcgcgagtggtgggacttgagacctggagccccgaaacccaaagccaaccagcaaaagcaggacgacggccggggtctggtgcttcctggctacaagtacctcggacccttcaacggactcgacaagggagagccggtcaacgaggcagacgccgcggccctcgagcacgacaaggcctacgacaagcagctcgagcagggggacaacccgtacctcaagtacaaccacgccgacgccgagtttcaggagcgtcttcaagaagatacgtcttttgggggcaacctcgggcgagcagtcttccaggccaagaagcgggttctcgaacctctcggtctggttgaggaaggcgctaagacggctcctggaaagaagagacccatagaatcccccgactcctccacgggcatcggcaagaaaggccagcagcccgctaaaaagagactcaactttgggcagactggcgactcagagtcagtgcccgaccctcaaccaatcggagaaccccccgcaggcccctctggtctgggatctggcacaatggctgcaggcggtggcgctccaatggcagacaataacgaaggcgccgacggagtgggtagttcctcaggaaattggcattgcgattccacatggctgggcgacagagtcatcaccaccagcacccgaacctgggccctccccacctacaacaaccacctctacaagcaaatctccaacgggacatcgggaggaagcaccaacgacaacacctacttcggctacagcaccccctgggggtattttgactttaacagattccactgccacttctcaccacgtgactggcagcgactcatcaacaacaactggggattccggcccaagagactcaacttcaagctcttcaacatccaggtcaaggaggtcacgcagaatgaaggcaccaagaccatcgccaataaccttaccagcacgattcaggtctttacggactcggaataccagctcccgtacgtcctcggctctgcgcaccagggctgcctgcctccgttcccggcggacgtcttcatgattcctcagtacgggtacctgactctgaacaacggcagtcaggccgtgggccgttcctccttctactgcctggagtactttccttctcaaatgctgagaacgggcaacaactttgagttcagctaccagtttgaggacgtgccttttcacagcagctatgcgcacagccaaagcctggaccggctgatgaaccccctcatcgaccagtacctgtactacctgtctcggactcagtccacgggaggtaccgcaggaactcagcagttgctattttctcaggccgggcctaataacatgtcggctcaggccaaaaactggctacccgggccctgctaccggcagcaacgcgtctccacgacagtgtcgcaaaataacaacagcaactttgcttggaccggtgccaccaagtatcatctgaatggcagagactctctggtaaatcccggtgtcgctatggcaacgcacaagggcgacgaagagcgattttttccatccagcggagtcttgatgtttgggaaacagggagctggaaaagacaacgtagactatagcagcgttatgctaaccagtgaggaagaaatcaaaaccaccaacccagtggccacagaacagtacggcgtggtggccgataacctgcaacagcaaaacgccgctcctattgtaggggccgtcaacagtcaaggagccttacctggcatggtctggcagaaccgggacgtgtacctgcagggtcctatctgggccaagattcctcacacggacggcaactttcatccttcgccgctgatgggaggctttggactgaaacacccgcctcctcagatcctgattaagaatacacctgttcccgcggatcctccaactaccttcagtcaagccaagctggcgtcgttcatcacgcagtacagcaccggacaggtcagcgtggaaattgaatgggagctgcagaaagagaacagcaagcgctggaacccagagattcagtatacttccaactactacaaatctacaaatgtggactttgctgtcaatactgagggtacttattcagagcctcgccccattggcacccgttacctcacccgtaacctgtaattgcctgttaatcaataaaccggttgattcgtttcagttgaactttggtctcaagggcgaattc

SEQ ID NO: 394 - DNA, 2187 bp, Adeno-associated virus
  source 1..2187: mol_type = genomic DNA
atggctgccgatggttatcttccagattggctcgaggacaacctctctgagggcattcgcgagtggtgggacttgaaacctggagccccgaaacccaaagccaaccagcaaaagcaggacgacggccggggtctggtgcttcctggctacaagtacctcggacccttcaacggactcgacaagggagagccggtcaacgaggcagacgccgcggccctcgagcacgacaaggcctacgacaagcagctcgagcagggggacaacccgtacctcaagtacaaccacgccgacgccgagtttcaggagcgtcttcaagaagatacgtcttttgggggcaacctcgggcgagcagtcttccaggccaagaagcgggttctcgaacctctcggtctggttgaggaaggcgctaagacggctcctggaaagaagagacccatagaatcccccgactcctccacgggcatcggcaagaaaggccagcagcccgctaaaaagaagctcaactttgggcagactggcgactcagagtcagtgcccgacccccaacctctcggagaacctcccgccgcgccctcaggtctgggatctggtacaatggctgcaggcggtggcgcaccaatggcagacaataacgaaggcgccgacggagtgggtaatgcctccggaaattggcattgcgattccacatggctgggcgacagagtcatcaccaccagcacccgcacctgggccctgcccacctacaacaaccacctctacaagcagatatcaagtcagagcggggctaccaacgacaaccacttcttcggctacagcaccccctggggctattttgacttcaacagattccactgccacttctcaccacgtgactggcagcgactcatcaacaacaactggggattccggcccagaaagctgcggttcaagttgttcaacatccaggtcaaggaggtcacgacgaacgacggcgttacgaccatcgctaataaccttaccagcacgattcaggtcttctcggactcggagtaccaactgccgtacgtcctcggctctgcgcaccagggctgcctccctccgttccctgcggacgtgttcatgattcctcagtacggatatctgactctaaacaacggcagtcagtctgtgggacgttcctccttctactgcctggagtactttccttctcagatgctgagaacgggcaataactttgaattcagctacacctttgaggaagtgcctttccacagcagctatgcgcacagccagagcctggaccggctgatgaatcccctcatcgaccagtacctgtactacctggcccggacccagagcactacggggtccacaagggagctgcagttccatcaggctgggcccaacaccatggccgagcaatcaaagaactggctgcccggaccctgttatcggcagcagagactgtcaaaaaacatagacagcaacaacaacagtaactttgcctggaccggggccactaaataccatctgaatggtagaaattcattaaccaacccgggcgtagccatggccaccaacaaggacgacgaggaccagttctttcccatcaacggagtgctggtttttggcgaaacgggggctgccaacaagacaacgctggaaaacgtgctaatgaccagcgaggaggagatcaaaaccaccaatcccgtggctacagaagaatacggtgtggtctccagcaacctgcaatcgtctacggccggaccccagacacagactgtcaacagccagggggctctgcccggcatggtctggcagaaccgggacgtgtacctgcagggtcccatctgggccaaaattcctcacacggacggcaactttcacccgtctcccctgatgggcggatttggactcaaacacccgcctcctcaaattctcatcaaaaacaccccggtacctgctaatcctccagaggtgtttactcctgccaagtttgcctcatttatcacgcagtacagcaccggccaggtcagcgtggagatcgagtgggaactgcagaaagaaaacagcaaacgctggaatccagagattcagtacacctcaaattatgccaagtctaataatgtggaatttgctgtcaacaacgaaggggtttatactgagcctcgccccattggcacccgttacctcacccgtaacctgtaa

SEQ ID NO: 395 - protein, 728 aa, Adeno-associated virus; identical to SEQ ID NO: 63

SEQ ID NO: 396 - protein, 728 aa, Adeno-associated virus; identical to SEQ ID NO: 155

SEQ ID NO: 397 - protein, 728 aa, Adeno-associated virus; identical to SEQ ID NO: 155

SEQ ID NO: 398 - protein, 733 aa, synthetic construct
  REGION 1..733: note = Description of Artificial Sequence: Synthetic polypeptide
MAADGHLPDWLEDNLSEGIREWWDLKPGAPKPKANQQKQDDGRGLVLPGYKYLGPFNGLDKGEPVNAADAAALEHDKAYDQQLKAGDNPYLRYNHADAEFQERLQEDTSFGGNLGRAVFQAKKRVLEPLGLVEEGAKTAPGKKRPIESPDSSTGIGKKGQQPAKKKLNFGQTGDSESVPDPQPIGEPPAGPSGLGSGTMAAGGGAPMADNNEGADGVGSSSGNWHCDSTWLGDRVITTSTRTWALPTYNNHLYKQISNGTSGGSTNDNTYFGYSTPWGYFDFNRFHCHFSPRDWQRLINNSWGFRPKRLNFKLFNIQVKEVTQNEGTKTIANNLTSTIQVFTDSEYQLPYVLGSAHQGCLPPFPADVFMIPQYGYLTLNNGSQAVGRSSFYCLEYFPSQMLRTGNNFEFSYQFEDVPFHSSYAHSQSLDRLMNPLIDQYLYYLSRTQSTGGTAGTQQLLFSQAGPNNMSAQAKNWLPGPCYRQQRVSTTLSQNNNSNFAWTGATKYHLNGRDSLVNPGVAMATHKDDEERFFPSSGVLMFGKQGAGKDNVDYSSVMLTSEEEIKTTNPVATEQYGVVADNLQQQNAAPIVGAVNSQGALPGMVWQNRDVYLQGPIWAKIPHTDGNFHPSPLMGGFGLKHPPPQILIKNTPVPADPPTTFSQAKLASFITQYSTGQVSVEIEWELQKENSKRWNPEIQYTSNYYKSTNVDFAVNTEGTYSEPRPIGTRYLTRNL

SEQ ID NO: 399 - DNA, 3113 bp, Adeno-associated virus
  source 1..3113: mol_type = genomic DNA
gaattcgccctttctacggctgcgtcaactggaccaatgagaactttcccttcaacgattgcgtcgacaagatggtgatctggtgggaggagggcaagatgacggccaaggtcgtggagtccgccaaggccattctcggcggcagcaaggtgcgcgtggaccaaaagtgcaagtcgtccgcccagatcgatcccacccccgtgatcgtcacttccaacaccaacatgtgcgccgtgattgacgggaacagcaccaccttcgagcaccagcagccgttacaagaccggatgttcaaatttgaactcacccgccgtctggagcatgactttggcaaggtgacaaagcaggaagtcaaagagttcttccgctgggcgcaggatcacgtgaccgaggtggcgcatgagttctacgtcagaaagggtggagccaacaagagacccgcccccgatgacgcggataaaagcgagcccaagcgggcctgcccctcagtcgcggatccatcgacgtcagacgcggaaggagctccggtggactttgccgacaggtaccaaaacaaatgttctcgtcacgcgggcatgcttcagatgctgcttccctgcaagacatgcgagagaatgaatcagaatttcagcatttgcttcacgcacgggaccagagactgttcagaatgtttccccggcgtgtcagaatctcaaccggtcgtcagaaagaggacgtatcggaaactctgtgccattcatcatctgctggggcgggctcccgagattgcttgctcggcctgcgatctggtcaacgtggacctggatgactgtgtttctgagcaataaatgacttaaaccaggtatggctgccgatggtcatcttccagattggctcgaggacaacctctctgagggcattcgcgagtggtgggacttgaaacctggagccccgaaacccaaagccaaccagcaaaagcaggacgacggccggggtctggtgcttcctggctacaagtacctcggacccttcaacggactcgacaagggggagcccgtcaacgcggcggacgcagcggccctcgagcacgacaaggcctacgaccagcagctcaaagcgggtgacaatccgtacctgcggtataaccacgccgacgccgagtttcaggagcgtcttcaagaagatacgtcttttgggggcaacctcgggcgagcagtcttccaggccaagaagcgggttctcgaacctctcggtctggttgaggaaggcgctaagacggctcctggaaagaagagacccatagaatcccccgactcctccacgggcatcggcaagaaaggccagcagcccgctaaaaagaagctcaactttgggcagactggcgactcagagtcagtgcccgaccctcaaccaatcggagaaccccccgcaggcccctctggtctgggatctggtacaatggctgcaggcggtggcgctccaatggcagacaataacgaaggcgccgacggagtgggtagttcctcaggaaattggcattgcgattccacatagctgggcgacagagtcatcaccaccagcacccgaacctgggccctccccacctacaacaaccacctctacaagcaaatctccaacgggacatcgggaggaagcaccaacgacaacacctacttcggctacagcaccccctgggggtattttgactttaacagattccactgccacttctcaccacgtgactggcagcgactcatcaacaacagctggggattccggcccaagagactcaacttcaagctcttcaacatccaggtcaaggaggtcacgcagaatgaaggcaccaagaccatcgccaataaccttaccagcacgattcaggtctttacggactcggaataccagctcccgtacgtcctcggctctgcgcaccagggctgcctgcctccgttcccggcggacgtcttcatgattcctcagtacgggtacctgactctgaacaacggcagtcaggccgtgggccgttcctccttctactgcctggagtactttccttctcaaatgctgagaacgggcaacaactttgagttcagctaccagtttgaggacgtgccttttcacagcagctacgcgcacagccaaagcctggaccggctgatgaaccccctcatcgaccagtacctgtactacctgtctcggactcagtccacgggaggtaccgcaggaactcagcagttgctattttctcaggccgggcctaataacatgtcggctcaggccaaaaactggctacccgggccctgctaccggcagcaacgcgtctccacgacactgtcgcaaaataacaacagcaactttgcttggaccggtgccaccaagtatcatctgaatggcagagactctctggtaaatcccggtgtcgctatggcaacgcacaaggacgacgaagagcgattttttccatccagcggagtcttgatgtttgggaaacagggagctggaaaagacaacgtggactatagcagcgttatgctaaccagtgaggaagaaatcaaaaccaccaacccagtggccacagaacagtacggcgtggtggccgataacctgcaacagcaaaacgccgctcctattgtaggggccgtcaacagtcaaggagccttacctggcatggtctggcagaaccgggacgtgtacctgcagggtcctatctgggccaagattcctcacacggacggcaactttcatccttcgccgctgatgggaggctttggactgaaacacccgcctcctcagatcctgattaagaatacacctgttcccgcggatcctccaactaccttcagtcaagccaagctggcgtcgttcatcacgcagtacagcaccggacaggtcagcgtggaaattgaatgggagctgcagaaagagaacagcaagcgctggaacccagagattcagtatacttccaactactacaaatctacaaatgtggactttgctgtcaatactgagggtacttattcagagcctcgccccattggcacccgttacctcacccgtaacctgtaattgcctgttaatcaataaaccggttaattcgtttcagttgaactttggtctctgcgaagggcgaattc

SEQ ID NO: 400 - protein, 731 aa, synthetic construct
  REGION 1..731: note = Description of Artificial Sequence: Synthetic polypeptide
MAADGYLPDWLEDNLSEGIREWWDLKPGAPKPKANQQKQDDGRGLVLPGYKYLGPFNGLDKGEPVNEADAAALEHDKAYDKQLEQGDNPYLKYNHADAEFQERLQEDTSFGGNLGRAVFRAKKRVLEPLGLVEEGAKTAPGKKRPIESPDSSTGIGKKGQQPAKKKLNFGQTGDSESVPDPQPLGEPPAAPSGLGSGTMAAGGGAPMADNNEGADGVGNASGNWHCDSTWLGDRVITTSTRTWALPTYNNHLYKQISSQSGATNDNHFFGYSTPWGYFDFNRFHCHFSPRDWQRLINNNRGFRPRKLRFKLFNIQVKEVTTNDGVTTIANNLTSTIQVFSDSEYQLPYVLGSAHQGCLPPFPADVFMIPQYGYLTLNNGSQSVGRSSFYCLEYFPSQMLRTGNNFEFSYQFEDVPFHSSYAHSQSLDRLMNPLIDQYLYYLSRTQSTGGTAGTQQLLFSQAGPNNMSAQAKNWLPGPCYRQQRVSTTLSQNNNSNFAWTGATKYHLNGRDSLVNPGVAMATHKDDEERFFPSSGVLMFGKQGAGKDNVDYSSVMLTSEEEIKTTNPVATEQYGVVADNLQQQNAAPIVGAVNSQGALPGMAWQNRDVYLQGPIWAKIPHTDGNFHPSPLMGGFGLKHPPPQILIKNTPVPADPPTTFSQAKLASFITQYSTGQVSVEIEWELQKENSKRWNPEIQYTSNYYKSTNVDFAVNTEGTYSEPRPIGTRYLTRNL

SEQ ID NO: 401 - DNA, 3106 bp, Adeno-associated virus
  source 1..3106: mol_type = genomic DNA
gaattcgcccttctacggctgcgtcaactggaccaatgagaactttcccttcaacgattgcgtcgacaagatggtgatctggtgggaggagggcaagatgacggccaaggtcgtggagtccgccaaggccattctcggcggcagcaaggtgcgcgtggaccaaaagtgcaagtcgtccgcccagatcgaccccacccccgtgatcgtcacctccaacaccaacatgtgcgccgtgattgacgggaacagcaccaccttcgagcaccagcagccgttgcaggaccggatgttcaaatttgaactcacccgccgtctggagcatgactttggcaaggcgacaaagcaggaagtcaaagagttcttccgctgggcgcaggatcacgtgaccgaggtggcgcatgagttctacgtcagaaagggtggagccaacaagagacccgcccccgatgacgcggataaaagcgagcccaagcgggcccgcccctcagtcgcggatccatcgacgtcagacgcggaaggagctccggtggactttgccgacaggtaccaaaacaaatgttctcgtcacgcgggcatgcttcagatgctgtttccctgcaaaacatgcgagagaatgaatcagaatttcaacatttgcttcacgcacgggaccagagactgttcagaatgtttccccggcgtgtcagaatctcaaccggtcgtcagaaagaggacgtatcggaaactctgtgccattcatcatctgctggggcgggctcccgagattgcttgctcggcctgcgatctggtcaacgtggacctggatgactgtgtttctgagcaataaatgacttaaaccaggtatggctgccgatggttatcttccagattggctcgaggacaacctctctgagggcattcgcgagtggtgggacttgaaacctggagccccgaaacccaaagccaaccagcaaaagcaggacgacggccggggtctggtgcttcctggctacaagtacctcggacccttcaacggactcgacaagggagagccggtcaacgaggcagacgccgcggccctcgagcacgacaaggcctacgacaagcagctcgagcagggggacaacccgtacctcaagtacaaccacgccgacgccgagtttcaggagcgtcttcaagaagatacgtcttttgggggcaacctcgggcgagcagtcttccgggccaagaagcgggttctcgaacctctcggtctggttgaggaaggcgctaagacggctcctggaaagaagagacccatagaatcccccgactcctccacgggcatcggcaagaaaggccagcagcccgctaaaaagaagctcaactttgggcagactggcgactcagagtcagtgcccgacccccaacctctcggagaacctcccgccgcgccctcaggtctgggatctggtacaatggctgcaggcggtggcgcaccaatggcagacaataacgaaggcgccgacggagtgggtaatgcctccggaaattggcattgcgattccacatggctgggcgacagagtcatcaccaccagcacccgcacctgggccctgcccacctacaacaaccacctctacaagcagatatcaagtcagagcggggctaccaacgacaaccacttcttcggctacagcaccccctggggctattttgacttcaacagattccactgccacttctcaccacgtgactggcagcgactcatcaacaacaaccggggattccggcccagaaagctgcggttcaagttgttcaacatccaggtcaaggaggtcacgacgaacgacggcgttacgaccatcgctaataaccttaccagcacgattcaggtcttctcggactcggagtaccaactgccgtacgtcctcggctctgcgcaccagggctgcctccctccgttccctgcggacgtgttcatgattcctcagtacggatatctgactctaaacaacggcagtcagtctgtgggacgttcctccttctactgcctggagtactttccttctcagatgctgagaacgggcaataactttgaattcagctaccagtttgaggacgtgccctttcacagcagctacgcgcacagccaaagcctggaccggctgatgaaccccctcatcgaccagtacctgtactacctgtctcggactcagtccacgggaggtaccgcaggaactcagcagttgctattttctcaggccgggcctaataacatgtcggctcaggccaaaaactggctacccgggccctgctaccggcagcaacgcgtctccacgacactgtcgcaaaataacaacagcaactttgcttggaccggtgccaccaagtatcatctgaatggcagagactctctggtaaatcccggtgtcgctatggcaacgcacaaggacgacgaagagcgattttttccatccagcggagtcttgatgtttgggaaacagggagctggaaaagacaacgtggactatagcagcgttatgctaaccagtgaggaagaaatcaaaaccaccaacccagtggccacagaacagtacggcgtggtggccgataacctgcaacagcaaaacgccgctcctattgtaggggccgtcaacagtcaaggagccttacctggcatggcctggcagaaccgggacgtgtacctgcagggtcctatctgggccaagattcctcacacggacggcaactttcatccttcgccgctgatgggaggctttggactgaaacacccgcctcctcagatcctgattaagaatacacctgttcccgcggatcctccaactaccttcagtcaagccaagctggcgtcgttcatcacgcagtacagcaccggacaggtcagcgtggaaattgaatgggagctgcagaaagagaacagcaagcgctggaacccagagattcagtatacttccaactactacaaatctacaaatgtggactttgctgtcaatactgagggtacttattcagagcctcgccccattggcacccgttacctcacccgtaacctgtaattgcctgttaatcaataaaccggttaattcgtttcagttgaactttggtctctgcgaagggcgaattc

SEQ ID NO: 402 - protein, 738 aa, synthetic construct
  REGION 1..738: note = Description of Artificial Sequence: Synthetic polypeptide
MAADGYLPDWLEDNLSEGIREWWDLKPGAPKPKANQQKQDDGRGLVLPGYKYLGPFNGLDKGEPVNEADAAALEHDKAYDKQLEQGDNPYLKYNHADAEFQERLQEDTSFGGNLGRAVFQAKKRVLEPLGLVEEGAKTAPGKKRPVEPSPQRSPDSSTGIGKTGQQPAKKRLNFGQTGDSESVPDPQPIGEPPAGPSGLGSGTMAAGGGAPMADNNEGADGVGSSSGNWHCDSTWLGDRVITTSTRTWALPTYNNHLYKQISNGTSGGSTNDNTYFGYSTPWGYFDFNRFHCHFSPRDWQRLINNNWGFRPKRLNFKLFNIQVKEVTQNEGTKTIANNLTSTIQVFTDSEYQLPYVLGSAHQGCLPPFPADVFMIPQYGYLTLNNGSQAVGRSSFYCLEYFPSQMLRTGNNFEFSYQFEDVPFHSSYAHSQSLDRLMNPLIDQYLYYLSRTQSTGGTAGTQQLLFSQAGPNNMSAQAKNWLPGPCYRQQRVSTTLSQNNNSNFAWTGATKYHLNGRDSLVNPGVAMATHKDDEERFFPSSGVLMFGKQGAGKDNVDYSSVMLTSEEEIKTTNPVATEQYGVVADNLQQQNAAPIVGAVNSQGALPGMVWQNRDVYLQGPIWAKIPHTDGNFHPSPLMGGFGLKHPPPQILIKNTPVPADPPTTFSQAKLASFITQYSTGQVSVEIEWELQKENSKRWNPEIQYTSNYYKSTNVDFAVNTEGTYSEPRPIGTRYLTRNL

SEQ ID NO: 403 - DNA, 3197 bp, Adeno-associated virus
  source 1..3197: mol_type = genomic DNA
gaattcgccctttctacggctgcgtcaactggaccaatgagaactttcccttcaacgattgcgtcgacaagatggtgatctggtgggaggagggcaagatgacggccaaggtcgtggagtccgccaaggccattctcggcggcagcaaggtgcgcgtggaccaaaagtgcaagtcgtccgcccagatcgaccccacccccgtgatcgtcacctccaacaccaacatgtgcgccgtgattgacgggaacagcaccaccttcgagcaccagcagccgttacaagaccggatgttcaaatttgaactcacccgccgtctggagcacgactttggcaaggtgacaaagcaggaagtcaaagagttcttccgctgggcgcaggatcacgtgaccgaggtggcgcatgagttctacgtcagaaagggtggagccaacaagagacccgcccccgatgacgcggataaaagcgagcccaagcgggcctgcccctcagtcgcggatccatcgacgtcagacgcggaaggagctccggtggactttgccgacaggtaccaaaacaaatgttctcgtcacgcgggcatgcttcagatgctgtttccctgcaagacatgcgagagaatgaatcagaatttcaacatttgcttcacgcacgggaccagagactgttcagaatgtttccccggcgtgtcagaatctcaaccggtcgtcagaaagaggacgtatcggaaactctgtgccattcatcatctgctggggcgggctcccgagattgcttgctcggcctgcgatctggtcaacgtggacctggatgactgtgtttctgagcaataaatgacttaaaccaggtatggctgccgatggttatcttccagattggctcgaggacaacctctctgagggcattcgcgagtggtgggacttgaaacctggagccccgaaacccaaagccaaccagcaaaagcaggacgacggccggggtctggtgcttcctggctacaagtacctcggacccttcaacggactcgacaagggagagccggtcaacgaggcagacgccgcggccctcgagcacgacaaggcctacgacaagcagctcgagcagggggacaacccgtacctcaagtacaaccacgccgacgccgagtttcaggagcgtcttcaagaagatacgtcttttgggggcaacctcgggcgagcagtcttccaggccaagaagcgggttctcgaacctctcggtctggttgaggaaggcgctaagacggctcctggaaagaagagaccggtagagccatcaccccagcgttctccagactcctctacgggcatcggcaagacaggccagcagcccgcgaaaaagagactcaactttgggcagactggcgactcagagtcagtgcccgaccctcaaccaatcggagaaccccccgcaggcccctctggtctgggatctggtacaatggctgcaggcggtggcgctccaatggcagacaataacgaaggcgccgacggagtgggtagttcctcaggaaattggcattgcgattccacatggctgggcgacagagtcatcaccaccagcacccgaacctgggccctccccacctacaacaaccacctctacaagcaaatctccaacgggacatcgggaggaagcaccaacgacaacacctacttcggctacagcaccccctgggggtattttgactttaacagattccactgccacttctcaccacgtgactggcagcgactcatcaacaacaactggggattccggcccaagagactcaacttcaagctcttcaacatccaggtcaaggaggtcacgcagaatgaaggcaccaagaccatcgccaataaccttaccagcacgattcaggtctttacggactcggaataccagctcccgtacgtcctcggctctgcgcaccagggctgcctgcctccgttcccggcggacgtcttcatgattcctcagtacgggtacctgactctgaacaacggcagtcaggccgtgggccgttcctccttctactgcctggagtactttccttctcaaatgctgagaacgggcaacaactttgagttcagctaccagtttgaggacgtgccttttcacagcagctacgcgcacagccaaagcctggaccggctgatgaaccccctcatcgaccagtacctgtactacctgtctcggactcagtccacgggaggtaccgcaggaactcagcagttgctattttctcaggccgggcctaataacatgtcggctcaggccaaaaactggctacccgggccctgctaccggcagcaacgcgtctccacgacactgtcgcaaaataacaacagcaactttgcttggaccggtgccaccaagtatcatctgaatggcagagactctctggtaaatcccggtgtcgctatggcaacgcacaaggacgacgaagagcgattttttccatccagcggagtcttgatgtttgggaaacagggagctggaaaagacaacgtggactatagcagcgttatgctaaccagtgaggaagaaatcaaaaccaccaacccagtggccacagaacagtacggcgtggtggccgataacctgcaacagcaaaacgccgctcctattgtaggggccgtcaacagtcaaggagccttacctggcatggtctggcagaaccgggacgtgtacctgcagggtcctatctgggccaagattcctcacacggacggcaactttcatccttcgccgctgatgggaggctttggactgaaacacccgcctcctcagatcctgattaagaatacacctgttcccgcggatcctccaactaccttcagtcaagccaagctggcgtcgttcatcacgcagtacagcaccggacaggtcagcgtggaaattgaatgggagctgcagaaagagaacagcaagcgctggaacccagagattcagtatacttccaactactacaaatctacaaatgtggactttgctgtcaatactgagggtacttattcagagcctcgccccattggcacccgttacctcacccgtaacctgtaattgcctgttaatcaataaaccggttaattcgtttcagttgaactttggtctctgcgaagggcgaattcgtttaaacctgcaggactagtccctttagtgagggttaattctgagcttggcgtaatcatgggtcatag

SEQ ID NO: 404 - protein, 735 aa, synthetic construct
  REGION 1..735: note = Description of Artificial Sequence: Synthetic polypeptide
MAADGYLPDWLEDNLSEGIREWWDLKPGAPKPKANQQKQDDGRGLVLPGYKYLGPFNGLDKGEPVNEADAAALEHDKAYDKQLEQGDNPYLKYNHADAEFQERLQEDTSFGGNLGRAVFQAKKRVLEPLGLVEEGAKTAPGKKRPVEPSPQRSPDSSTGIGKTGQQPAKKRLNFGQTGDSESVPDPQPIGEPPAGPSGLGSGTMAAGGGAPMADNNEGADGVGSSSGNWHCDSTWLGDRVITTSTRTWALPTYNNHLYKQISNGTSGGSTNDNTYFGYSTPWGYFDFNRFHCHFSPRDWQRLINNNWGFRPRKLRFKLFNIQVKEVTTDDGVTTIANNLTSTIQVFSDSEYQLPYVLGSAHQGCLPPFPADVFMIPQYGYLTLNNGSQSVGRSSFYCLEYFPSQMLRTGNNFEFSYTFEEVPFHSSYAHSQSLDRLMNPLIDQYLYYLARTQSTTGSTRELQFHQAGPNTMAEQSKNWLPGPCYRQQRLSKNIDSNNNSNFAWTGATKYHLNGRNSLTNPGVAMATNKDDEDQFFPINGVLVFGKTGAANKTTLENVLMTSEEEIKTTNPVATEEYGVVSSNLQSSTAGPQTQTVNSQGALPGMVWQNRDVYLQGPIWAKIPHTDGNFHPSPLMDGFGLKHPPPQILIKNTPVPANPPEVFTPAKFASFITQYSTGQVSVEIEWELQKENSKRWNPEIQYTSNYAKSNNVEFAVNNEGVYTEPRPIGTRYLTRNL

SEQ ID NO: 405 - DNA, 3276 bp, Adeno-associated virus
  source 1..3276: mol_type = genomic DNA
gaattcgcccttcgcagagaccaaagttcaactgaaacgaattaaccggtttattgattaacaggcaattacaggttacgggtgaggtaacgggtgccaatggggcgaggctcagtataaaccccttcgttgttgacagcaaattccacattattagacttggcataatttgaggtgtactgaatctctggattccagcgtttgctgttttctttctgcagttcccactcgatctccacgctgacctggccggtgctgtactgcgtgataaatgaggcaaacttggcaggagtaaacacctctggaggattagcaggtaccggggtgtttttgatgagaatttgaggaggcgggtgtttgagtccaaatccgtccatcaggggagacgggtgaaagttgccgtccgtgtgaggaattttggcccagatgggaccctgcaggtacacgtcccggttctgccagaccatgccgggcagagccccctggctgttgacagtctgtgtctggggtccggccgtagacgattgcaggttgctggagaccacaccgtattcttctgtagccacgggattggtggttttgatctcctcctcgctggtcattagcacgttttccagcgttgtcttgttggcagcccccgttttgccaaaaaccagcactccgttgatgggaaagaactggtcctcgtcgtccttgttggtggccatggctacgcccgggttggttaatgaatttctaccattcagatggtatttagtggccccggtccaggcaaagttactgttgttgttgctgtctatgttttttgacagtctctgctgccgataacagggtccgggcagccagttctttgattgctcggccatggtgttgggcccagcctgatggaactgcagctcccttgtggaccccgtagtgctctgggtccgggccaggtagtacaggtactggtcgatgaggggattcatcagccggtccaggctctggctatgcgcatagctgctgtggaaaggcacttcctcaaaggtgtagctgaattcaaagttattgcccgttctcagcatctgagaaggaaagtactccaggcagtagaaggaggaacgtcccacagactgactgccgttgtttagagtcagatatccgtactgaggaatcatgaacacgtccgcagggaacggagggaggcagccctggtgcgcagagccgaggacgtacggcagttggtactccgagtccgagaagacctgaatcgtgctggtaaggttattagcgatggtcgtaacgccgtcgtccgtcgtgacctccttgacctggatgttgaacaacttgaaccgcagctttctgggccggaatccccagttgttgttgatgagtcgctgccagtcacgtggtgagaagtggcagtggaatctgttaaagtcaaaatacccccagggggtgctgtagccgaagtaggtgttgtcgttggtgcttcctcccgatgtcccgttggagatttgcttgtagaggtggttgttgtaggtggggagggcccaggttcgggtgctggtggtgatgactctgtcgcccagccatgtggaatcgcaatgccaatttcctgaggaactacccactccgtcggcgccttcgttattgtctgccattggagcgccaccgcctgcagccattgtaccagatcccagaccagaggggcctgcggggggttctccgattggttgagggtcgggcactgactctgagtcgccagtctgcccaaagttgagtctctttttcgcgggctgctggcctgtcttgccgatgcccgtagaggagtctggagaacgctggggtgatggctctaccggtctcttctttccaggagccgtcttagcgccttcctcaaccagaccgagaggttcgagaacccgcttcttggcctggaagactgctcgcccgaggttgcccccaaaagacgtatcttcttgaagacgctcctgaaactcggcgtcggcgtggttgtacttgaggtacgggttgtccccctgctcgagctgcttgtcgtaggccttgtcgtgctcgagggccgcggcgtctgcctcgttgaccggctctcccttgtcgagtccgttgaagggtccgaggtacttgtagccaggaagcaccagaccccggccgtcgtcctgcttttgctggttggctttgggtttcggggctccaggtttcaagtcccaccactcgcgaatgccctcagagaggttgtcctcgagccaatctggaagataaccatcggcagccatacctggtttaagtcatttattgctcagaaacacagtcatccaggtccacgttgaccagatcgcaggccgagcaagcaatctcgggagcccgccccagcagatgatgaatggcacagagtttccgatacgtcctctttctgacgaccggttgagattctgacacgccggggaaacattctgaacagtctctggtcccgtgcgtgaagcaaatgttgaaattctgattcattctctcgcatgtcttgcagggaaacagcatctgaagcatgcccgcgtgacgagaacacttgttttggtacctgtcggcaaagtccaccggagctccttccgcgtctgacgtcgatggatgcaaaatgtcgcaaaagcactcacgtgacagctaatacaggaccactcccctatgacgtgatttacgtcagcgctatgcccgcgtgacgagaacatttgttttggtacctgtcggcaaagtccaccggagctccttccgcgtctgacgtcgatggatccgcgactgaggggcaggcccgcttgggctcgcttttatccgcgtcatcgggggcgggtctcttgttggctccaccctttctgacgtagaactcatgcgccacctcggtcacgtgatcctgcgcccagcggaagaactctttgacttcctgctttgtcaccttgccaaagtcatgctccagacggcgggtgagttcaaatttgaacatccggtcctgcaacggctgctggtgctcgaaggtggtgctgttcccgtcaatcacggcgcacatgttggtgttggaagtgacgatcacgggggtgggatcgatctgggcggaagacttgcacttttggtccacgcgcaccttgctgccgccgagaatggccttggcggactccacgaccttggccgtcatcttgccctcctcccaccagatcaccatcttgtcgacgcaatcgttgaagggaaagttctcattggtccagttgacgcagccgtagaaagggcgaattc

SEQ ID NO: 406 - protein, 738 aa, Adeno-associated virus; identical to SEQ ID NO: 71

SEQ ID NO: 407 - protein, 738 aa, Adeno-associated virus
MAADGYLPDWLEDNLSEGIREWWDLKPGAPKPKANQQKQDDGRGLVLPGYKYLGPFNGLDKGEPVNAADAAALEHDKAYDQQLKAGDNPYLRYNHADAEFQERLQEDTSFGGNLGRAVFQAKKRVLEPLGLVEEGAKTAPGKKRPVEPSPQRSPDSSTGIGKKGHQPARKRLNFGQTGDSESVPDPQPIGEPPAGPSGLGSGTMAAGGGAPMADNNEGADGVGSSSGNWHCDSTWLGDRVITTSTRTWALPTYNNHLYKQISNGTSGGSTNDNTYFGYSTPWGYFDFNRFHCHFSPRDWQRLINNNWGFRPKRLNFKLFNIQVKEVTQNEGTKTIANNLTSTIQVFTDSEYQLPYVPGSAHQGCLPPFPADVFMIPQYGYLTLNNGSQAVGRSSFYCLEYFPSQMLRTGNNFEFSYTFEDVPFHSSYAHSQSLDRLMNPLIDQYLYYLSRTQSTGGTQGTQQLLFSQAGPANMSAQAKNWLPGPCYRQQRVSTTLSQNNNSNFAWTGATKYHLNGRDSLVNPGVAMATHKDDEERFFPSSGVLMFGKQGAGKDNVDYSSVMLTSEEEIKTTNPVATEQYGVVADNLQQTNGAPIVGTVNSQGALPGMVWQNRDVYLQGPIWAKIPHTDGNFHPSPLMGGFGLKHPPPQILIKNTPVPADPPTTFSQAKLASFITQYSTGQVSVEIEWELQKENSKRWNPEIQYTSNYYKSTNVDFAVNTEGTYSEPRPIGTRYLTRNL

SEQ ID NO: 408 - protein, 738 aa, Adeno-associated virus; identical to SEQ ID NO: 69

SEQ ID NO: 409 - protein, 728 aa, synthetic construct
  REGION 1..728: note = Description of Artificial Sequence: Synthetic polypeptide
MAADGYLPDWLEDNLSEGIREWWDLKPGAPKPKANQQKQDDGRGLVLPGYKYLGPFNGLDKGEPVNEADAAALEHDKAYDKQLEQGDNPYLKYNHADAEFQERLQEDTSFGGNLGRAVFQAKKRVLEPLGLVEEGAKTAPGKKRPIESPDSSTGIGRKGQQPAKKKLNFGQTGDSESVPDPQPIGEPPAGPSGLGSGTMAAGGGAPMADNNEGADGVGNASGNWHCDSTWLGDRVITTSTRTWALPTYNNHLYKQISSQSGATNDNHFFGYSTPWGYFDFNRFHCHFSPRDWQRLINNNWGFRPRKLRFKLFNIQVKEVTTNDGVTTIANNLTSTIQVFSDSEYQLPYVLGSAHQGCLPPFPADVFMIPQYGYLTLNNGSQSVGRSSFYCLEYFPSQMLRTGNNFEFSYTFEEVPFHSSYAHSQSLDRLMNPLIDQYLYYLARTQSTTGSTRELQFHQAGPNTMAEQSKNWLPGPCYRQQRLSKNIDSNNNSNFAWTGATKYHLNGRNSLTNPGVAMATNKDDEDQFFPINGVLVFGKTGAANKTTLENVLMTSEEEIKTTNPVATEEYGVVSSNLQSSTAGPQTQTVNSQGALPGMVWQNRDVYLQGPIWAKIPHTDGNFHPSPLMGGFGLKHPPPQILIKNTPVPANPPEVFTPAKFASFITQYSTGQVSVEIEWELQKENSKRWNPEIQYTSNYAKSNNVEFAVNNEGVYTEPRPIGTRYLTRNL

SEQ ID NO: 410 - DNA, 2489 bp, Adeno-associated virus
  source 1..2489: mol_type = genomic DNA
gaattcgccctttctacggctgcgtcaactggaccaatgagaactttcccttcaacgattgcgtcgacaagatggtgatctggtgggaggagggcaagatgacggccaaggtcgtgaagtccgccaaggccattcatcatctgctggggcgggctcccgagattgcttgctcggcctgcgatctggtcaacgtggacctggatgactgtgtttctgagcaataaatgacttaaaccaggtatggctgccgatggttatcttccagattggctcgaggacaacctctctgagggcattcgcgagtggtgggacttgaaacctggagccccgaaacccaaagccaaccagcaaaagcaggacgacggccggggtctggtgcttcctggctacaagtacctcggacccttcaacggactcgacaagggagagccggtcaacgaggcagacgccgcggccctcgagcacgacaaggcctacgacaagcagctcgagcagggggacaacccgtacctcaagtacaaccacgccgacgccgagtttcaggagcgtcttcaagaagatacgtcttttgggggcaacctcgggcgagcagtcttccaggccaagaagcgggttctcgaacctctcggtctggttgaggaaggcgctaagacggctcctggaaagaagagacccatagaatcccccgactcctccacgggcatcggcaggaaaggccagcagcccgctaaaaagaagctcaactttgggcagactggcgactcagagtcagtgcccgaccctcaaccaatcggagaaccccccgcaggcccctctggtctgggatctggtacaatggctgcaggcggtggcgctccaatggcagacaataacgaaggcgccgacggagtgggtaatgcctccggaaattggcattgcgattccacatggctgggcgacagagtcatcaccaccagcacccgcacctgggccctgcccacctacaacaaccacctctacaagcagatatcaagtcagagcggggctaccaacgacaaccacttcttcggctacagcaccccctggggctattttgacttcaacagattccactgccacttctcaccacgtgactggcagcgactcatcaacaacaactggggattccggcccagaaagctgcggttcaagttgttcaacatccaggtcaaggaggtcacgacgaacgacggcgttacgaccatcgccaataaccttaccagcacgattcaggtcttctcggactcggagtaccaactgccgtacgtcctcggctctgcgcaccagggctgcctccctccgttccctgcggacgtgttcatgattcctcagtacggatatctgactctaaacaacggcagtcagtctgtgggacgttcctccttctactgcctggagtactttccttctcagatgctgagaacgggcaataactttgaattcagctacacctttgaggaagtgcctttccacagcagctatgcgcacagccagagcctggaccggctgatgaatcccctcatcgaccagtacctgtactacctggcccggacccagagcactacggggtccacaagggagctgcagttccatcaggctgggcccaacaccatggccgagcaatcaaagaactggctgcccggaccctgttatcggcagcagagactgtcaaaaaacatagacagcaacaacaacagtaactttgcctggaccggggccactaaataccatctgaatggtagaaattcattaaccaacccgggcgtagccatggccaccaacaaggacgacgaggaccagttctttcccatcaacggagtgctggtttttggcaaaacgggggctgccaacaagacaacgctggaaaacgtgctaatgaccagcgaggaggagatcaaaaccaccaatcccgtggctacagaagaatacggtgtggtctccagcaacctgcaatcgtctacggccggaccccagacacagactgtcaacagccagggggctctgcccggcatggtctggcagaaccgggacgtgtacctgcagggtcccatctgggccaaaattcctcacacggacggcaactttcacccgtctcccctgatgggcggatttggactcaaacacccgcctcctcaaattctcatcaaaaacaccccggtacctgctaatcctccagaggtgtttactcctgccaagtttgcctcatttatcacgcagtacagcaccggccaggtcagcgtggagatcgagtgggaactgcagaaagaaaacagcaaacgctggaatccagagattcagtacacctcaaattatgccaagtctaataatgtggaatttgctgtcaacaacgaaggggtttatactgagcctcgccccattggcacccgttacctcacccgtaacctgtaattgcctgttaatcaataaaccggttaattcgtttcagttgaactttggtcaagggcgaattc

SEQ ID NO: 411 - protein, 728 aa, synthetic construct
  REGION 1..728: note = Description of Artificial Sequence: Synthetic polypeptide
MAADGYLPDWLEDNLSEGIREWWDLKPGAPKPKANQQKQDDGRGLVLPGYKYLGPFNGLDKGEPVNAADAAALEHDKAYDQQLKAGDNPYLRYNHADAEFQERLQEDTSFGGNLGRAVFQAKKRVLEPLGLVEEGAKTAPGKKRPIESPDSSTGIGKKGQQPAKKKLNFGQTGDSESVPDPQPIGEPPAGPSGLGSGTMAAGGGAPMADNNEGADGVGNASGNWHCDSTWLGDRVITTSTRTWALPTYNNHLYKQISSQSGATNDNHFFGYSTPWGYFDFNRFHCHFSPRDWQRLINNNWGFRPRKLRFKLFNIQVKEVTTNDGVTTIANNLTSTIQVFSDSEYQLPYVLGSAHQGCLPPFPADVFMIPQYGYLTLNNGSQSVGRSSFYCLEYFPSQMLRTGNNFEFSYTFEEVPFHSSYAHSQSLDRLMNPLIDQYLYYLARTQSTTGSTRELQFHQAGPNTMAEQSKNWLPGPCYRRQRLSKDIDSNNNSNFAWTGATKYHLNGRNSLTNPGVAMATNKDDEDQFFPINGVLVFGKTGAANKTTLENVLMTSEEEIKTTNPVATEEYGVVSSNLQSSTAGPQTQTVNSQGALPGMVWQNRDVYLQGPIWAKIPHTDGNFHPSPLMGGFGLKHPPPQILIKNTPVPANPPEVFTPAKFASFITQYSTGQVSVEIEWELQKENSKRWNPEIQYTSNYAKSNNVEFAVNNEGVYTEPRPIGTRYLTRNL

SEQ ID NO: 412 - DNA, 3098 bp, Adeno-associated virus
  source 1..3098: mol_type = genomic DNA
gaattcgccctttctacggctgcgtcaactggaccaatgagaactttcccttcaacgattgcgtcgacaagatggtgatctggtgggaggagggcaagatgacggccaaggtcgtggagtccgccaaggccattctcggcggcagcaaggtgcgcgtggaccaaaagtgcaagtcttccgcccagatcgatcccacccccgtgatcgtcacttccaacaccaacatgtgcgccgtgattgacgggaacagcaccaccttcgagcaccagcagccgttacaagaccggatgttcaaatttgaactcacccgccgtctggagcacgactttggcaaggtgacaaagcaggaagtcaaagagttcttccgctgggcgcaggatcacgtgaccgaggtggcgcatgagttctacgtcagaaagggtggagccaacaagagacccgcccccgatgacgcggataaaagcgagcccaagcgggcctgcccctcagtcgcggatccatcgacgtcagacgcggaaggagctccggtggactttgccgacaggtaccaaaacaaatgttctcgtcacgcgggcatgcttcagatgctgtttccctgcaagacatgcgagagaatgaatcagaatttcaacatttgcttcacgcacgggaccggagactgttcagaatgtttccccggcgtgtcagaatctcaaccggtcgtcagaaagaggacgtatcggaaactctgtgccattcatcatctgctggggcgggctcccgagattgcttgctcggcctgcgatctggtcaacgtggacctggatgactgtgtttctgagcaataaatgacttaaaccaggtatggctgccgatggttatcttccagattggctcgaggacaacctctctgagggcattcgcgagtggtgggacttgaaacctggagccccgaaacccaaagccaaccagcaaaagcaggacgacggccggggtctggtgcttcctggctacaagtacctcggacccttcaacggactcgacaagggagagccggtcaacgcggcggacgcagcggccctcgagcacgacaaggcctacgaccagcagctcaaagcgggtgacaatccgtacctgcggtataaccacgccgacgccgagtttcaggagcgtcttcaagaagatacgtcttttgggggcaacctcgggcgagcagtcttccaggccaagaagcgggttctcgaacctctcggtctggttgaggaaggcgctaagacggctcctggaaagaagagacccatagaatcccccgactcctccacgggcatcggcaagaaaggccagcagcccgctaaaaagaagctcaactttgggcagactggcgactcagagtcagtgcccgaccctcaaccaatcggagaaccccccgcaggcccctctggtctgggatctggtacaatggctgcaggcggtggcgctccaatggcagacaataacgaaggcgccgacggagtgggtaatgcctccggaaattggcattgcgattccacatggctgggcgacagagtcatcaccaccagcacccgcacctgggccctgcccacctacaacaaccacctctacaagcagatatcaagtcagagcggggctaccaacgacaaccacttcttcggctacagcaccccctggggctattttgacttcaacagattccactgccacttctcaccacgtgactggcagcgactcatcaacaacaactggggattccggcccagaaagctgcggttcaagttgttcaacatccaggtcaaggaggtcacgacgaacgacggcgttacgaccatcgctaataaccttaccagcacgattcaggtcttctcggactcggagtaccaactgccgtacgtcctcggctctgcgcaccagggctgcctccctccgttccctgcggacgtgttcatgattcctcagtacggatatctgactctaaacaacggcagtcagtctgtgggacgttcctccttctactgcctggagtactttccttctcagatgctgagaacgggcaataactttgaattcagctacacctttgaggaagtgcctttccacagcagctatgcgcacagccagagcctggaccggctgatgaatcccctcatcgaccagtacctgtactacctggcccggacccagagcactacggggtccacaagggagctgcagttccatcaggctgggcccaacaccatggccgagcaatcaaagaactggctgcccggaccctgttatcggcggcagagactgtcaaaagacatagacagcaacaacaacagtaactttgcctggaccggggccactaaataccatctgaatggtagaaattcattaaccaacccgggcgtagccatggccaccaacaaggacgacgaggaccagttctttcccatcaacggagtgctggtttttggcaaaacgggggctgccaacaagacaacgctggaaaacgtgctaatgaccagcgaggaggagatcaaaaccaccaatcccgtggctacagaagaatacggtgtggtctccagcaacctgcaatcgtctacggccggaccccagacacagactgtcaacagccagggggctctgcccggcatggtctggcagaaccgggacgtgtacctgcagggtcccatctgggccaaaattcctcacacggacggcaactttcacccgtctcccctgatgggcggatttggactcaaacacccgcctcctcaaattctcatcaaaaacaccccggtacctgctaatcctccagaggtgtttactcctgccaagtttgcctcatttatcacgcagtacagcaccggccaggtcagcgtggagatcgagtgggaactgcagaaagagaacagcaaacgctggaatccagagattcagtacacctcaaattatgccaagtctaataatgtggaatttgctgtcaacaacgaaggggtttatactgagcctcgccccattggcacccgttacctcacccgtaacctgtaattacttgttaatcaataaaccggttgattcgtttcagttgaactttggtctctgcgaagggcgaattc

SEQ ID NO: 413 - protein, 685 aa, synthetic construct
  REGION 1..685: note = Description of Artificial Sequence: Synthetic polypeptide
MAADGYLPDWLEDNLSEGIREWWDLKPGAPKPKANQQKQDDGRGLVLPGYKYLGPFNGLDKGEPVNEADAAALEHDKAYDKQLEQGDNPYLKYNHADAEFQERLQEDTSFGGNLGRAVFQAKKRVLEPLGLVEEGAKTAPGKKRPVEPSPQRSPDSSTGIGKTGQQPAKKRLNFGQTGDSESVPDPQPIGEPPAGPSGLGSGTMAAGGGAPMADNNEGADGVGSSSGNWHCDSTWLGDRVITTSTRTWALPTYNNHLYKQISNGTSGGSTNDNTYFGYSTPWGYFDFNRFHCHFSPRDWQRLINNNWGFRPKRLNFKLFNIQVKEVTQNEGTKTIANNLTSTIQVFTDSEYQLPYVLGSAHQGCLPPFPADVFMIPQYGYLTLNNGSQAVGRSSFYCLEYFPSQMLRTGNNFEFSYQFEDVPFHSSYAHSQSLDRLTNPLIDQYLYYLARTQSTTGSTRGLQFHQAGPNTMAEQSKNWLPGPCYRQQRLSKNIDSNNNSNFAWTGATKYHLNGRNSLTNPGVAMATNKDDEDQFFPINGVLVFGKTGAANKTTLENVLMTSEEEIKTTNPVATEEYGVVSSNLQSSTAGPQTQTVNSQGALPGMVWQNRDVYLQGPIWAKIPHTDGNFHPSPLMGGFGLKHPPPQILIKYTSNYYKSTNVDFAVNTEGTYSEPRPIGTRYLTRNL

SEQ ID NO: 414 - DNA, 2969 bp, Adeno-associated virus
  source 1..2969: mol_type = genomic DNA
gaattcgccctttctacggctgcgtcaactggaccaatgagaactttcccttcaacgattgcgtcgacaagatggtgatctggtgggaggagggcaagatgacggccaaggtcgtggagtccgccaaggccattctcggcggcagcaaggtgcgcgtggaccaaaagtgcaagtcgtccgcccagatcgaccccacccccgtgatcgtcacctccaacaccaacatgtgcgccgtgattgacgggaacagcaccaccttcgagcaccagcagccgttacaagaccggatgttcaaatttgaactcacccgccgtctggagcacgactttggcaaggtgacaaagcaggaagtcaaagagttcttccgctgggcgcaggatcacgtgaccgaggtggcgcatgagttctacgtcagaaagggtggagccaacaagagacccgcccccgatgacgcggataaaagcgagcccaagcgggcctgcccctcagtcgcggatccatcgacgtcagacgcggaaggagctccggtggactttgccgacaggtaccaaaacaaatgttctcgtcacgcgggcatgcttcagatgctgtttccctgcaagacatgcgagagaatgaatcagaatttcaacatttgcttcacgcacgggaccagagactgttcagaatgtttccccggcgtgtcagaatctcaaccggtcgtcagaaagaggacgtatcggaaactctgtgccattcatcatctgctggggcgggctcccgagattgcttgctcggcctgcgatctggtcaacgtggacctggatgactgtgtttctgagcaataaatgacttaaaccaggtatggctgccgatggttatcttccagattggctcgaggacaacctctctgagggcatccgcgagtggtgggacttgaaacctggagccccgaaacccaaagccaaccagcaaaagcaggacgacggccggggtctggtgcttcctggctacaagtacctcggacccttcaacggactcgacaagggagagccggtcaacgaggcagacgccgcggccctcgagcacgacaaggcctacgacaagcagctcgagcagggggacaacccgtacctcaagtacaaccacgccgacgccgagtttcaggagcgtcttcaagaagatacgtcttttgggggcaacctcgggcgagcagtcttccaggccaagaagcgggttctcgaacctctcggtctggttgaggaaggcgctaagacggctcctggaaagaagagaccggtagagccatcaccccagcgttctccagactcctctacgggcatcggcaagacaggccagcagcccgcgaaaaagagactcaactttgggcagactggcgactcagagtcagtgcccgaccctcaaccaatcggagaaccccccgcaggcccctctggtctgggatctggtacaatggctgcaggcggtggcgctccaatggcagacaataacgaaggcgccgacggagtgggtagttcctcaggaaattggcattgcgattccacatggctgggcgacagagtcatcaccaccagcacccgaacctgggccctccccacctacaacaaccacctctacaagcaaatctccaacgggacatcgggaggaagcaccaacgacaacacctacttcggctacagcaccccctgggggtattttgactttaacagattccactgccacttctcaccacgtgactggcagcgactcatcaacaacaactggggattccggcccaagagactcaacttcaagctcttcaacatccaggtcaaggaggtcacgcagaatgaaggcaccaagaccatcgccaataaccttaccagcacgattcaggtctttacggactcggaataccagctcccgtacgtcctcggctctgcgcaccagggctgcctgcctccgttcccggcggacgtcttcatgattcctcagtacgggtacctgactctgaacaacggcagtcaggccgtgggccgttcctccttctactgcctggagtactttccttctcaaatgctgagaacgggcaacaactttgagttcagctaccagtttgaggacgtgccttttcacagcagctacgcgcacagccaaagcctggaccggctgacgaaccccctcatcgaccagtacctgtactacctggcccggacccagagcactacggggtccacaagggggctgcagttccatcaggctgggcccaacaccatggccgagcaatcaaagaactggctgcccggaccctgttatcggcagcagagactgtcaaaaaacatagacagcaacaacaacagtaactttgcctggaccggggccactaaataccatctgaatggtagaaattcattaaccaacccgggcgtagccatggccaccaacaaggacgacgaggaccagttctttcccatcaacggagtgctggtttttggcaaaacgggggctgccaacaagacaacgctggaaaacgtgctaatgaccagcgaggaggagatcaaaaccaccaatcccgtggctacagaagaatacggtgtggtctccagcaacctgcaatcgtctacggccggaccccagacacagactgtcaacagccagggggctctgcccggcatggtctggcagaaccgggacgtgtacctgcagggtcccatctgggccaaaattcctcacacggacggcaactttcacccgtctcccctgatgggcggatttggactcaaacacccgcctcctcaaattctcatcaagtatacttccaactactacaaatctacaaatgtggactttgctgtcaatactgagggtacttattcagagcctcgccccattggcacccgttacctcacccgtaacctgtaattgcctgttaatcaataaaccggttaattcgtttcagttgaactttggtctctgcgaagggcgaattc

SEQ ID NO: 415 - protein, 733 aa, synthetic construct
  REGION 1..733: note = Description of Artificial Sequence: Synthetic polypeptide
MAADGYLPDWLEDNLSEGIREWWDLKPGAPKPKANQQKQDDGRGLVLPGYKYLGPFNGLDKGEPVNAADAAALEHDKAYDQQLKAGDNPYLRYNHADAEFQERLQEDTSFGGNLGRAVFQAKKRVLEPLGLVEEGAKTAPGKKRPIESPDSSTGIGKKGQQPAKKKLNFGQTGDSESVPDPQPIGEPPAGPSGLGSGTMAAGGGAPMADNNEGADGVGSSSGNWHCDSTWLGDRVITTSTRTWALPTYNNHLYKQISNGTSGGSTNDNTYFGYSTPWGYFDFNRFHCHFSPRDWQRLINNNWGFRPKRLNFKLFNIQVKEVTQNEGTKTIANNLTSTIQVFTDSEYQLPYVLGSAHQGCLPPFPADVFMIPQYGYLTLNNGSQAVGRSSFYCLEYFPSQMLRTGNNFEFSYQFEDVPFHSSYAHSQSLDRLMNPLIDQYLYYLSRTQSTGGTAGTQQLLFSQAGPNNMSAQAKNWLPGPCYRQQRVSTTVSQNNNSNFAWTGATKYHLNGRDSLVNPGVAMATHKGDEERFFPSSGVLMFGKQGAGKDNVDYSSVMLTSEEEIKTTNPVATEQYGVVADNLQQQNAAPIVGAVNSQGALPGMVWQNRDVYLQGPIWAKIPHTDGNFHPSPLMGGFGLKHPPPQILIKNTPVPADPPTTFSQAKLASFITQYSTGQVSVEIEWELQKENSKRWNPEIQYTSNYYKSTNVDFAVNTEGTYSEPRPIGTRYLTRSL

SEQ ID NO: 416 - DNA, 3113 bp, Adeno-associated virus
  source 1..3113: mol_type = genomic DNA
gaattcgccctttctacggctgcgtcaactggaccaatgagaactttcccttcaacgattgcgtcgacaagatggtgatctggtgggaggagggcaagatgacggccaaggtcgtggagtccgccaaggccattctcggcggcagcaaggtgcgcgtggaccaaaagtgcaagtcgtccgcccagatcgatcccacccccgtgatcgtcacttccaacaccaacatgtgcgccgtgattgacgggaacagcaccaccttcgagcaccagcagccgttacaagaccggatgttcaaatttgaactcacccgccgtctggagcatgactttggcaaggtgacaaagcaggaagtcaaagagttcttccgctgggcgcaggatcacgtgaccgaggtggcgcatgagttctacgtcagaaagggtggagccaacaagagacccgcccccgatgacgcggataaaagcgagcccaagcgggcctgcccctcagtcgcggatccatcgacgtcagacgcggaaggagctccggtggactttgccgacaggtaccaaaacaaatgttctcgtcacgcgggcatgcttcagatgctgtttccctgcaagacatgcgagagaatgaatcagaatttcaacatttgcttcacgcacgggaccagagactgttcagaatgtttccccggcgtgtcagaatctcaaccggtcgtcagaaagaggacgtatcggaaactctgtgccattcatcatctgctggggcgggctcccgagattgcttgctcggcctgcgatctggtcaacgtggacctggatgactgtgtttctgagcaataaatgacttaaaccaggtatggctgccgatggttatcttccagattggctcgaggacaacctctctgagggcattcgcgagtggtgggacttgaaacctggagccccgaaacccaaagccaaccagcaaaagcaggacgacggccggggtctggtgcttcctggctacaagtacctcggacccttcaacggactcgacaagggggagcccgtcaacgcggcggacgcagcggccctcgagcacgacaaggcctacgaccagcagctcaaagcgggtgacaatccgtacctgcggtataaccacgccgacgccgagtttcaggagcgtcttcaagaagatacgtcttttgggggcaacctcgggcgagcagtcttccaggccaagaagcgggttctcgaacctctcggtctggttgaggaaggcgctaagacggctcctggaaagaagagacccatagaatcccccgactcctccacgggcatcggcaagaaaggccagcagcccgctaaaaagaagctcaactttgggcagactggcgactcagagtcagtgcccgaccctcaaccaatcggagaaccccccgcaggcccctctggtctgggatctggtacaatggctgcaggcggtggcgctccaatggcagacaataacgaaggcgccgacggagtgggtagttcctcaggaaattggcattgcgattccacatggctgggcgacagagtcatcaccaccagcacccgaacctgggccctccccacctacaacaaccacctctacaagcaaatctccaacgggacatcgggaggaagcaccaacgacaacacctacttcggctacagcaccccctgggggtattttgactttaacagattccactgccacttctcaccacgtgactggcagcgactcatcaacaacaactggggattccggcccaagagactcaacttcaagctcttcaacatccaggtcaaggaggtcacgcagaatgaaggcaccaagaccatcgccaataaccttaccagcacgattcaggtctttacggactcggaataccagctcccgtacgtcctcggctctgcgcaccagggctgcctgcctccgttcccggcggacgtcttcatgattcctcagtacgggtacctgactctgaacaacggcagtcaggccgtgggccgttcctccttctactgcctggagtactttccttctcaaatgctgagaacgggcaacaactttgagttcagctaccagtttgaggacgtgccttttcacagcagctatgcgcacagccaaagcctggaccggctgatgaaccccctcatcgaccagtacctgtactacctgtctcggactcagtccacgggaggtaccgcaggaactcagcagttgctattttctcaggccgggcctaataacatgtcggctcaggccaaaaactggctacccgggccctgctaccggcagcaacgcgtctccacgacagtgtcgcaaaataacaacagcaactttgcttggaccggtgccaccaagtatcatctgaatggcagagactctctggtaaatcccggtgtcgctatggcaacgcacaagggcgacgaagagcgattttttccatccagcggagtcttgatgtttgggaaacagggagctggaaaagacaacgtggactatagcagcgttatgctaaccagtgaggaagaaatcaaaaccaccaacccagtggccacagaacagtacggcgtggtggccgataacctgcaacagcaaaacgccgctcctattgtaggggccgtcaacagtcaaggagccttacctggcatggtctggcagaaccgggacgtgtacctgcagggtcctatctgggccaagattcctcacacggacggcaactttcatccttcgccgctgatgggaggctttggactgaaacacccgcctcctcagatcctgattaagaatacacctgttcccgcggatcctccaactaccttcagtcaagccaagctggcgtcgttcatcacgcagtacagcaccggacaggtcagcgtggaaattgaatgggagctgcagaaagagaacagcaagcgctggaacccagagattcagtatacttccaactactacaaatctacaaatgtggactttgctgtcaatactgagggtacttattcagagcctcgccccattggcacccgttacctcacccgtagcctgtaattgcctgttaatcaataaaccggttgattcgtttcagttgaactttggtctctgcgaagggcgaattc

SEQ ID NO: 417 - protein, 738 aa, synthetic construct
  REGION 1..738: note = Description of Artificial Sequence: Synthetic polypeptide
MAADGYLPDWLEDNLSEGIREWWDLKPGAPKPKANQQKQDDGRGLVLPGYKYLGPFNGLDKGEPVNAADAAALEHDKAYDQQLKAGDNPYLRYNHADAEFQERLQEDTSFGGNLGRAVFQAKKRVLEPLGLVEEGAKTAPGKKRPVEPSPQRSPDSSTGIGKTGQQPAKKRLNFGQTGDSESVPDPQPIGEPPAGPSGLGSGTMAAGGGAPMADNNEGADGVGSSSGNWHCDSTWLGDRVITTSTRTWALPTYNNHLYKQISNGTSGGSTNDNTYFGYSTPWGYFDFNRFHCHFSPRDWQRLINNNWGFRPKRLNFKLFNIQVKEVTQNEGTKTIANNLTSTIQVFTDSEYQLPYVLGSAHQGCPPPFPADVFMIPQYGYLTLNNGSQAVGRSSFYCLEYFPSQMRRTGNNFEFSYQFEDVPFHSSYAHSQSLDRLMNPLIDQYLYYLSRTQSTGGTAGTQQLLFSQAGPNNMSAQAKNWLPGPCYRQQRVSTTLSQNNNSNFAWTGATKYHLNGRDSLVNPGVAMATHKDDEERFFPSSGVLMFGKQGAGKDNVDYSSVMLTSEEEIKTTNPVATEQYGVVADNLQQQNAAPIVGAVNSQGALPGMVWQNRDVYLQGPIWAKIPHTDGNFHPSPLMGGFGLKHPPPQILIKNTPVPADPPTTFSQAKLASFITQYSTGQVSVEIEWELQKENSKRWNPEIQYTSNYYKSTNVDFAVNTEGTYSEPRPIGTRYLTRNL

SEQ ID NO: 418 - DNA, 3128 bp, Adeno-associated virus
  source 1..3128: mol_type = genomic DNA
gaattcgccctttctacggctgcgtcaactggaccaatgagaactttcccttcaacgattgcgtcgacaagatggtgatctggtgggaggagggcaagatgacggccaaggtcgtggagtccgccaaggccattctcggcggcagcaaggtgcgcgtggaccaaaagtgcaagtcgtccgcccagatcgaccccacccccgtgatcgtcacctccaacaccaacatgtgcgccgtgattgacgggaacagcaccaccttcgagcaccagcagccgttgcaggaccggatgttcaaatttgaactcacccgccgtctggagcatgactttggcaaggtgacaaagcaggaagtcaaagagttcttccgctgggcgcaggatcacgtgaccgaggtggcgcatgagttctacgtcagaaagggtggagccaacaagagacccgcccccgatgacgcggataaaagcgagcccaagcgggcctgcccctcagtcgcggatccatcgacgtcagacgcggaaggagctccggtggactttgccgacaggtaccaaaacaaatgttctcgtcacgcgggcatgcttcagatgctgtttccctgcaagacatgcgagagaatgaatcagaatttcaacatttgcttcacgcgcgggaccagagactgttcagaatgtttcccgggcgtgtcagaatctcaaccggtcgtcagaaagaggacgtatcggaaactctgtgccattcatcatctgctggggcgggctcccgagattgcttgctcggcctgcgatctggtcaacgtggacctggatgactgtgtttctgagcaataaatgacttaaaccaggtatggctgccgatggttatcttccagattggctcgaggacaacctctctgagggcattcgcgagtggtgggacttgaaacctggagccccgaaacccaaagccaaccagcaaaagcaggacgacggccggggtctggtgcttcctggctacaagtacctcggacccttcaacggactcgacaagggggagcccgtcaacgcggcggacgcagcggccctcgagcacgacaaggcctacgaccagcagctcaaagcgggtgacaatccgtacctgcggtataaccacgccgacgccgagtttcaggagcgtctgcaagaagatacgtcttttgggggcaacctcgggcgagcagtcttccaggccaagaagcgggttctcgaacctctcggtctggttgaggaaggcgctaagacggctcctggaaagaagagaccggtagagccatcaccccagcgttctccagactcctctacgggcatcggcaagacaggccagcagcccgcgaaaaagagactcaactttgggcagactggcgactcagagtcagtgcccgaccctcaaccaatcggagaaccccccgcaggcccctctggtctgggatctggtacaatggctgcaggcggtggcgctccaatggcagacaataacgaaggcgccgacggagtgggtagttcctcaggaaattggcattgcgattccacatggctgggcgacagagtcatcaccaccagcacccgaacctgggccctccccacctacaacaaccacctctacaagcaaatctccaacgggacatcgggaggaagcaccaacgacaacacctacttcggctacagcaccccctgggggtattttgactttaacagattccactgccacttctcaccacgtgactggcagcgactcatcaacaacaactggggattccggcccaagagactcaacttcaagctcttcaacatccaggtcaaggaggtcacgcagaatgaaggcaccaagaccatcgccaataaccttaccagcacgattcaggtctttacggactcggaataccagctcccgtacgtcctcggctctgcgcaccagggctgcccgcctccgttcccggcggacgtcttcatgattcctcagtacgggtacctgactctgaacaacggcagtcaggccgtgggccgttcctccttctactgcctggagtactttccttctcaaatgcggagaacgggcaacaactttgagttcagctaccagtttgaggacgtgccttttcacagcagctacgcgcatagccaaagcctggaccggctgatgaaccccctcatcgaccagtacctgtactacctgtctcggactcagtccacgggaggtaccgcaggaactcagcagttgctattttctcaggccgggcctaataacatgtcggctcaggccaaaaactggctacccgggccctgctaccggcagcaacgcgtctccacgacactgtcgcaaaataacaacagcaactttgcttggaccggtgccaccaagtatcatctgaatggcagagactctctggtaaatcccggtgtcgctatggcaacgcacaaggacgacgaagagcgattttttccatccagcggagtcttgatgtttgggaaacagggagctggaaaagacaacgtggactatagcagcgttatgctaaccagtgaggaagaaatcaaaaccaccaacccagtggccacagaacagtacggcgtggtggccgataacctgcaacagcaaaacgccgctcctattgtaggggccgtcaacagtcaaggagccttacctggcatggtctggcagaaccgggacgtgtacctgcagggtcctatctgggccaagattcctcacacggacggcaactttcatccttcgccgctgatgggaggctttggactgaaacacccgcctcctcagatcctgattaagaatacacctgttcccgcggatcctccaactaccttcagtcaagccaagctggcgtcgttcatcacgcagtacagcaccggacaggtcagcgtggaaattgaatgggagctgcagaaagagaacagcaagcgctggaacccagagattcagtatacttccaactactacaaatctacaaatgtggactttgctgtcaatactgagggtacttattcagagcctcgccccattggcacccgttacctcacccgtaacctgtaattgcctgttaatcaataaaccggttaattcgtttcagttgaactttggtctctgcgaagggcgaattc

SEQ ID NO: 419 - protein, 738 aa, Adeno-associated virus; identical to SEQ ID NO: 407

SEQ ID NO: 420 - DNA, 1933 bp, Adeno-associated virus
  variation 1302: note = n is a, c, t, or g
  source 1..1933: mol_type = genomic DNA
caaggcctacgaccagcagctcaaagcgggtgacaatccgtacctgcggtataaccacgccgacgccgagtttcaggagcgtcttcaagaagatacgtcttttgggggcaacctcgggcgagcagtcttccaggccaaaaagcgggttctcgaacctcttggtctggttgagacgccagctaagacggcacctggaaagaagcgaccggtagactcgccagactccacctcgggcatcggcaagaaaggccagcagcccgcgaaaaagagactcaactttgggcagactggcgactcagagtcagtccccgaccctcaaccaatcggagaaccaccagcaggcccctctggtctgggatctggtacaatggctgcaggcggtggcgcaccaatggctgacaataacgagggcgccgacggagtgggtaatgcctcaggaaattggcattgcgattccacatggctgggcgacagagtcatcaccaccagcacccgaacctgggccctgcccacctacaacaaccacctctacaagcaaatctccagtcagtcagcagggagcaccaacgataacgtctatttcggctacagcaccccctgggggtattttgacttcaacagattccattgccacttctcaccacgtgactggcagcgacttatcaacaacaactggggattccggcccaagaagctcaacttcaagctcttcaacatccaggtcaaggaggtcacgacgaatgacggtgtcacaaccatcgctaataaccttaccagcacggttcaggtcttttcggactcggaatatcaactgccgtacgtcctcggctccgcgcaccagggctgcctgcctccgttcccggcagacgtgttcatgattccgcagtacggatacctgactctgaacaatggcagccaatcggtaggccgttcctccttctactgcctggagtactttccttctcagatgctgagaacgggcaacaacttcacctttagctacaccttcgaggacgtgcctttccacagcagctacgcgcacagccagagtctggaccggctgatgaatcccctcatcgaccagtacctgtactacttggccagaacacagagcaacgcaggaggtactgctggcaatcgggaactgcagttttatcagggcggacctaccaccatggccgaacaagcaaagaactggctgcccggaccttgcttccggcaacagagagtatccaagacgctggatcaaaataacaacagcaactttgcctggactggtgccacaaaataccatttaaatgnaagaaattcattggttaatcccggtgtcgccatggcaacccacaaggacgacgaggaacgcttcttcccttcgagcggagttctaatttttggcaaaactggagcagctaataaaactacattagaaaacgtgctcatgacaaatgaagaagaaattcgtcctaccaacccggtagctaccgaggaatacgggattgtaagcagcaacttgcaggcggctagcaccgcagcccagacacaagttgttaacaaccagggagccttacctggcatggtctggcagaaccgggacgtgtacctgcaaggtcccatttgggccaagattcctcacacggacggcaactttcacccgtctcctctaatgggtggctttggactgaaacacccgcctccccagatcctgatcaaaaacacaccggtacctgctaatcctccagaagtgtttactcctgccaagtttgcttccttcatcacgcagtacagcaccgggcaagtcagcgttgagatcgagtgggagctgcagaaagagaacagcaagcgctggaacccagagattcagtacacctccaactttgacaaacagactggagtggactttgctgttgacagccagggtgtttactctgagcct

SEQ ID NO: 421 - protein, 733 aa, synthetic construct
  REGION 1..733: note = Description of Artificial Sequence: Synthetic polypeptide
MAADGYLPDWLEDNLSEGIREWWDLKPGAPKPKANQQKQDDGRGLVLPGYKYLGPFNGLDKGEPVNAADAAALEHDKAYDQQLKAGDNPYLRYNHADAEFQERLQEDTSFGGNLGRAVFQAKKRVLEPLGLVEEGAKTAPGKKRPLESPQEPDSSSGIGKKGKQPAKKRLNFEEDTGAGDGPPEGSDTSAMSSDIEMRAAPGGNAVDAGQGSDGVGNASGDWHCDSTWSEGKVTTTSTRTWVLPTYNNHLYLRLGTTSNSNTYNGFSTPWGYFDFNRFHCHFSPRDWQRLINNNWGLRPKAMRVKIFNIQVKEVTTSNGETTVANNLTSTVQIFADSSYELPYVMDAGQEGSLSPFPNDVFMVPQYGYCGIVTGENQNQTDRNAFYCLEYFPSQMLRTGNNFEMAYNFGKVPFHSMYAYSQSPDRLMNPLLDQYLWHLQSTTSGETLNQGNAATTFGKIRSGDFAFYRKNWLPGPCVKQQRLSKTASQNYKIPASGGNALLKYDTHYTLNNRWSNIAPGPPMATAGPSDGDFSNAQLIFPGPSVTGNTTTSANNLLFTSEEEIAATNPRDTDMFGQIADNNQNATTAPITGNVTAMGVLPGMVWQNRDIYYQGPIWAKIPHADGHFHPSPLIGGFGLKHPPPQIFIKNTPVPANPATTFTAARVDSFITQYSTGQVAVQIEWEIEKERSKRWNPEVQFTSNYGNQSSMLWAPDTTGKYTEPRVIGSRYLTNHL

SEQ ID NO: 422 - DNA, 3105 bp, Adeno-associated virus
  source 1..3105: mol_type = genomic DNA
gaattcgcccttgctgcgtcaactggaccaatgagaactttcccttcaacgattgcgtcgacaagatggtgatctggtgggaggagggcaagatgaccgccaaggtcgtggagtccgccaaggccattctgggcggaagcaaggtgcgcgtggaccaaaagtgcaagtcatcggcccagatcgaccccacgcccgtgatcgtcacctccaacaccaacatgtgcgccgtgatcgacgggaacagcaccaccttcgagcaccagcagccgctgcaggaccgcatgttcaagttcgagctcacccgccgtctggagcacgactttggcaaggtgaccaagcaggaagtcaaagagttcttccgctgggctcaggatcacgtgactgaggtggcgcatgagttctacgtcagaaagggcggagccaccaaaagacccgcccccagtgacgcggatataagcgagcccaagcgggcctgcccctcagttgcggagccatcgacgtcagacgcggaagcaccggtggactttgcggacaggtaccaaaacaaatgttctcgtcacgcgggcatgcttcagatgctgtttccctgcaagacatgcgagagaatgaatcagaatttcaacgtctgcttcacgcacggggtcagagactgctcagagtgcttccccggcgcgtcagaatctcaacccgtcgtcagaaaaaagacgtatcagaaactgtgcgcgattcatcatctgctggggcgggcacccgagattgcgtgttcggcccgcgatctcgtcaacgtggacttggatgactgtgtttctgagcaataaatgacttaaaccaggtatggctgctgacggttatcttccagattggctcgaggacaacctctctgagggcattcgcgagtggtgggacctgaaacctggagcccccaagcccaaggccaaccagcagaagcaggacgacggccggggtctggtgcttcctggctacaagtacctcggacccttcaacggactcgacaagggggagcccgtcaacgcggcggacgcagcggccctcgagcacgacaaggcctacgaccagcagctcaaagcgggtgacaatccgtacctgcggtataaccacgccgacgccgagtttcaggagcgtctgcaagaagatacgtcttttgggggcaacctcgggcgagcagtcttccaggccaagaagagggtactcgaacctctgggcctggttgaagaaggtgctaagacggctcctggaaagaagagaccgttagagtcaccacaagagcccgactcctcctcaggaatcggcaaaaaaggcaaacaaccagccaaaaagagactcaactttgaagaggacactggagccggagacggaccccctgaaggatcagataccagcgccatgtcttcagacattgaaatgcgtgcagcaccgggcggaaatgctgtcgatgcgggacaaggttccgatggagtgggtaatgcctcgggtgattggcattgcgattccacctggtctgagggcaaggtcacaacaacctcgaccagaacctgggtcttgcccacctacaacaaccacttgtacctgcggctcggaacaacatcaaacagcaacacctacaacggattctccaccccctggggatactttgactttaacagattccactgtcacttctcaccacgtgactggcaaagactcatcaacaacaactggggactacgaccaaaagccatgcgcgttaaaatcttcaatatccaagttaaggaggtcacaacgtcgaacggcgagactacggtcgctaataaccttaccagcacggttcagatatttgcggactcgtcgtatgagctcccgtacgtgatggacgctggacaagagggaagtctgtctcctttccccaatgacgtcttcatggtgcctcaatatggctactgtggcattgtgactggcgaaaatcagaaccagacggacagaaatgctttctactgcctggagtattttccttcacaaatgctgagaactggcaataactttgaaatggcttacaactttgggaaggtgccgttccactcaatgtatgcttacagccagagcccggacagactgatgaatcccctcctggaccagtacctgtggcacttacagtcgaccacctctggagagactctgaatcaaggcaatgcagcaaccacatttggaaaaatcaggagtggagactttgccttttacagaaagaactggctgcctgggccttgtgttaaacagcagagactctcaaaaactgccagtcaaaattacaagattcctgccagcgggggcaacgctctgttaaagtatgacacccactataccttaaacaaccgctggagcaacatagcgcctggacctccaatggcaacagctggaccttcagatggggacttcagcaacgcccagctcatcttccctggaccatcagtcaccggaaacacaacaacctcagcaaacaatctgttgtttacatcagaagaagaaattgctgccaccaacccaagagacacggacatgtttggtcagattgctgacaataatcagaatgctacaactgctcccataaccggcaacgtgactgctatgggagtgcttcctggcatggtgtggcaaaacagagacatttactaccaagggccaatttgggccaagatcccacacgcggacggacattttcatccttcaccgctaattggcggttttggactgaaacatccgcctccccagatatttatcaaaaacacccccgtacctgccaatcctgcgacaaccttcactgcagccagagtggactctttcatcacacaatacagcaccggccaggtcgctgttcagattgaatgggaaatcgaaaaggaacgctccaaacgctggaatcctgaagtgcagtttacttcaaactatgggaaccagtcttctatgttgtgggctcccgatacaactgggaagtatacagagccgcgggttattggctctcgttatttgactaatcatttgtaactgcctagttaatcaataaaccgtgtgattcgtttcagttgaactttggtctctgcgaagggcgaattc

SEQ ID NO: 423 - protein, 733 aa, Adeno-associated virus
MAADGYLPDWLEDNLSEGIREWWDLKPGAPKPKANQQKQDDGRGLVLPGYKYLGPFNGLDKGEPVNAADAAALEHDKAYDQQLKAGDNPYLRYNHADAEFQERLQEDTSFGGNLGRAVFQAKKRVLEPLGLVEEGAKTAPGKKRPLESPQEPDSSSGIGKKGKQPAKKRLNFEEDTGAGDGPPEGSDTSAMSSDIEMRAAPGGNAVDAGQGSDGVGNASGDWHCDSTWSEGKVTTTSTRTWVLPTYNNHLYLRLGTTSNSNTYNGFSTPWGYFDFNRFHCHFSPRDWQRLINNNWGLRPKAMRVKIFNIQVKEVTTSNGETTVANNLTSTVQIFADSSYELPYVMDAGQEGSLPPFPNDVFMVPQYGYCGIVTGENQNQTDRNAFYCLEYFPSQMLRTGNNFEMAYNFEKVPFHSMYAHSQSLDRLMNPLLDQYLWHLQSTTSGETLNQGNAATTFGKIRSGDFAFYRKNWLPGPCVKQQRFSKTASQNYKIPASGGNALLKYDTHYTLNNRWSNIAPGPPMATAGPSDGDFSNAQLIFPGPSVTGNTTTSANNLLFTSEEEIAATNPRDTDMFGQIADNNQNATTAPITGNVTAMGVLPGMVWQNRDIYYQGPIWAKIPHADGHFHPSPLIGGFGLKHPPPQIFIKNTPVPANPATTFTAARVDSFITQYSTGQVAVQIEWEIEKERSKRWNPEVQFTSNYGNQSSMLWAPDTTGKYTEPRVIGSRYLTNHL

SEQ ID NO: 424 - DNA, 3105 bp, Adeno-associated virus
  source 1..3105: mol_type = genomic DNA
gaattcgcccttgctgcgtcaactggaccaatgagaactttcccttcaacgattgcgtcgacaagatggtgatctggtgggaggagggcaagatgaccgccaaggtcgtggagtccgccaaggccattctgggcggaagcaaggtgcgcgtggaccaaaagtgcaagtcatcggcccagatcgaccccacgcccgtgatcgtcacctccaacaccaacatgtgcgccgtgatcgacgggaacagcaccaccttcgagcaccagcagccgctgcaggaccgcatgttcaagttcgagctcacccgccgtctggagcacgactttggcaaggtgaccaagcaggaagtcaaagagttcttccgctgggctcaggatcacgtgactgaggtggcgcatgagttctacgtcagaaagggcggagccaccaaaagacccgcccccagtgacgcggatataagcgagcccaagcgggcctgcccctcagttgcggagccatcgacgtcagacgcggaagcaccggtggactttgcggacaggtaccaaaacaaatgttctcgtcacgcgggcatgcttcagatgctgtttccctgcaagacatgcgagagaatgaatcagaatttcaacgtctgcttcacgcacggggtcagagactgctcagagtgcttccccggcgcgtcagaatctcaacccgtcgtcagaaaaaagacgtatcagaaactgtgcgcgattcatcatctgctggggcgggcacccgagattgcgtgttcggcctgcgatctcgtcaacgtggacttggatgactgtgtttctgagcaataaatgacttaaaccaggtatggctgctgacggttatcttccagattggctcgaggacaacctctctgagggcattcgcgagtggtgggacctgaaacctggagcccccaagctcaaggccaaccagcagaagcaggacgacggccggggtctggtgcttcctggctacaagtacctcggacccttccacggactcgacaagggggagcccgtcaacgcggcggacgcagcggccctcgagcacgacaaggcctacgaccagcagctcaaagcgggtgacaatccgtacctgcggtataaccacgccgacgccgagtttcaggagcgtctgcaagaagatacgtcttttgggggcaacctcgggcgagcagtcttccaggccaagaagagggtactcgaaccactgggcctggttgaagaaggtgctaagacggctcctggaaagaagagaccgttagagtcaccacaagagcccgactcctcctcaggaatcggcaaaaaaggcaaacaaccagccaaaaagagactcaactttgaagaggacactggagccggagacggaccccctgaaggatcagataccagcgccatgtcttcagacattgaaatgcgtgcagcaccgggcggaaatgctgtcgatgcgggacaaggttccgatggagtgggtaatgcctcgggtgattggcattgcgattccacctggtctgagggcaaggtcacaacaacctcgaccagaacctgggtcttgcccacctacaacaaccacttgtacctgcggctcggaacaacatcaaacagcaacacctacaacggattctccaccccctggggatactttgactttaacagattccactgtcacttctcaccacgtgactggcaaagactcatcaacaacaactggggactacgaccaaaagccatgcgcgttaaaatcttcaatatccaagttaaggaggtcacaacgtcgaacggcgagactacggtcgctaataaccttaccagcacggttcagatatttgcggactcgtcgtatgagctcccgtacgtgatggacgctggacaagagggaagtctgcctcctttccccaatgacgtcttcatggtgcctcaatatggctactgtggcattgtgactggcgaaaatcagaaccagacggacagaaatgctttctactgcctggagtattttccttcacaaatgctgagaactggcaataactttgaaatggcttacaactttgagaaggtgccgttccactcaatgtatgctcacagccagagcctggacagactgatgaatcccctcctggaccagtacctgtggcacttacagtcgaccacctctggagagactctgaatcaaggcaatgcagcaaccacatttggaaaaatcaggagtggagactttgccttttacagaaagaactggctgcctgggccttgtgttaaacagcagagattctcaaaaactgccagtcaaaattacaagattcctgccagcgggggcaacgctctgttaaagtatgacacccactataccttaaacaaccgctggagcaacatagcgcctggacctccaatggcaacagctggaccttcagatggggacttcagcaacgcccagctcatcttccctggaccatcagtcaccggaaacacaacaacctcagcaaacaatctgttgtttacatcagaaggagaaattgctgccaccaacccaagagacacggacatgtttggtcagattgctgacaataatcagaatgctacaactgctcccataaccggcaacgtgactgctatgggagtgcttcctggcatggtgtggcaaaacagagacatttactaccaagggccaatttgggccaagatcccacacgcggacggacattttcatccttcaccgctaattggcggttttggactgaaacatccgcctccccagatatttatcaaaaacacccccgtacctgccaatcctgcgacaaccttcactgcagccagagtggactctttcatcacacaatacagcaccggccaggtcgctgttcagattgaatgggaaatcgaaaaggaacgctccaaacgccggaatcctgaagtgcagtttacttcaaactatgggaaccagtcttctatgttgtgggctcccgatacaactgggaagtatacagagccgcgggttattggctctcgttatttgactaatcatttgtaactgcctagttaatcaataaaccgtgtgattcgtttcagttgaactttggtctctgcgaagggcgaattc

SEQ ID NO: 425 - protein, 733 aa, synthetic construct
  REGION 1..733: note = Description of Artificial Sequence: Synthetic polypeptide
MAADGYLPDWLEDNLSEGIREWWDLKPGAPKPKANQQKQDDGRGLVLPGYEYLGPFNGLDKGEPVNAADAAALEHDKAYDQQLKAGDNPYLRYNHADAEFQERLQEDTSFGGNLGRAVFQAKKRVLEPLGLVEEGAKTAPGKKRPLESPQEPDSSSGIGKKGKQPAKKRLNFEEDTGAGDGPPEGSDTSAMSSDIEMRAAPGGNAVDAGQGSDGVGNASGDWHCDSTWSEGKVTTTSTRTWVLPTYNNHLYLRLGTTSNSNTYNGFSTPWGYFDFNRFHCHFSPRDWQRLINNNWGLRPKAMRVKIFNIQVKEVTTSNGETTVANNLTSTVQIFADSSYELPYVMDAGQEGSLPPFPNDVFMVPQYGYCGIVTGENQNQTDRNAFYCLEYFPSQMLRTGNNFETAYNFEKVPFHSMYAHSQSLDGLMNPLLDQYLWHLQSTTSGETLNQGNAATTFGKIRSGDFAFYRKNWLPGPCVKQQRFSKTASQNYKIPASGGNALLKYDTHYTLNNRWSNIAPGPPMATAGPSDGDFSNAQLIFPGPSVTGNTTTSANNLLFTSEEEIAATNPRDTDMFGQIADNNQNATTAPITGNVTAMGVLPGMVWQNRDIYYQGPIWAKIPHADGHFHPSPLIGGFGLKHPPPQIFIKNTPVPAYPATTFTAARVDSFITQYSTGQVAVQIEWEIEKERSKRWNPEVQFTSNCGNQSSMLWAPDTTGKYTEPRVIGSRYLTNHL

SEQ ID NO: 426 - DNA, 3105 bp, Adeno-associated virus
  source 1..3105: mol_type = genomic DNA
gaattcgcccttcgcagagaccaaagttcaactgaaacgaatcacacggtttattgattaactaggcagttacaaatgattagtcaaataacgagagccaataacccgcggctctgtatacttcccagttgtatcgggagcccacaacatagaagactggttcccacagtttgaagtaaactgcacttcaggattccagcgtttggagcgttccttttcgatttcccattcaatctgaacagcgacctggccggtgctgtattgtgtgatgaaagagtccactctggctgcagtgaaggttgtcgcaggataggcaggtacgggggtgtttttgataaatatctggggaggcggatgtttcagtccaaaaccgccaattagcggtgaaggatgaaaatgtccgtccgcgtgtgggatcttggcccaaattggcccttggtagtaaatgtctctgttttgccacaccatgccaggaagcactcccatagcagtcacgttgccggttatgggagcagttgtagcattctgattattgtcagcaatctgaccaaacatgtccgtgtctcttgggttggtggcagcaatttcttcttctgatgtaaacaacagattgtttgctgaggttgttgtgtttccggtgactgatggtccagggaagatgagctgggcgttgctgaagtccccatctgaaggtccagctgttgccattggaggtccaggcgctatgttgctccagcggttgtttaaggtatagtgggtgtcatactttaacagagcgttgcccccgctggcaggaatcttgtaattttgactggcagtttttgagaatctctgctgtttaacacaaggcccaggcagccagttctttctgtaaaaggcaaagtctccactcctgatttttccaaatgtggttgctgcattgccttgattcagagtctctccagaggtggtcgactgtaagtgccacaggtactggtccaggaggggattcatcagtccgtccaggctctggctgtgagcatacattgagtggaacggcaccttctcaaagttgtaagccgtttcaaagttattgccagttctcagcatttgtgaaggaaaatactccaggcagtagaaagcatttctgtccgtctggttctgattttcgccagtcacaatgccacagtagccatattgaggcaccatgaagacgtcattggggaaaggaggcagacttccctcttgtccagcgtccatcacgtacgggagctcatacgacgagtccgcaaatatctgaaccgtgctggtaaggttattagcgaccgtagtctcgccgttcgacgttgtgacctccttaacttggatattgaagattttaacgcgcatggcttttggtcgtagtccccagttgttgttgatgagtctttgccagtcacgtggtgagaagtgacagtggaatctgttaaagtcaaagtatccccagggggtggagaatccgttgtaggtgttgctgtttgatgttgttccgagccgcaggtacaagtggttgttgtaggtgggcaagacccaggttctggtcgaggttgttgtgaccttgccctcagaccaggtggaatcgcaatgccaatcacccgaggcattacccactccatcggaaccttgtcccgcatcgacagcatttccgcccggtgctgcacgcatttcaatgtctgaagacatggcgctggtatctgatccttcagggggtccgtctccggctccagtgtcctcttcaaagttgagtctctttttggctggttgtttgccttttttgccgattcctgaggaggagtcgggctcttgtggtgactctaacggtctcttctttccaggagccgtcttagcaccttcttcaaccaggcccagaggttcgagtaccctcttcttggcctggaagactgctcgcccgaggttgcccccaaaagacgtatcttcttgcagacgctcctgaaactcggcgtcggcgtggttataccgcaggtacggattgtcacccgctttgagctgctggtcgtaggccttgtcgtgctcgagggccgctgcgtccgccgcgttgacgggctcccccttgtcgagtccgttgaagggtccgaggtactcgtagccaggaagcaccagaccccggccgtcgtcctgcttctgctggttggccttgggcttgggggctccaggtttcaggtcccaccactcgcgaatgccctcagagaggttgtcctcgagccaatctggaagataaccgtcagcagccatacctggtttaagtcatttattgctcagaaacacagtcatccaagtccacgttgacgagatcgcaggccgaacacgcaatctcgggtgcccgccccagcagatgatgaatcgcgcacagtttctgatacgtcttttttctgacgacgggttgagattctgacgcgccggggaagcactctgagcagtctctgaccccgtgcgtgaagcagacgttgaaattctgattcattctctcgcatgtcttgcagggaaacagcatctgaagcatgcccgcgtgacgagaacatttgttttggtacctgtccgcaaggtccaccggtgcttccgcgtctgacgtcgatggctccgcaactgaggggcaggcccgcttgggctcgcttatatccgcgtcactgggggcgggtcttttggtggctccgccctttctgacgtagaactcatgcgccacctcagtcacgtgatcctgagcccagcggaagaactctttgacttcctgcttggtcaccttgccaaagtcgtgctccagacggcgggtgagctcgaacttgaacatgcggtcctgcagcggctgctggtgctcgaaggtggtgctgttcccgtcgatcacggcgcacatgttggtgttggaggtgacgatcacgggcgtggggtcgatctgggccgatgacttgcacttttggtccacgcgcaccttgcttccgcccagaatggccttggcggactccacgaccttggcggtcatcttgccctcctcccaccagatcaccatcttgtcgacgcaatcgttgaagggaaagttctcattggtccagttgacgcagcaagggcgaattc

SEQ ID NO: 427 - protein, 729 aa, synthetic construct
  REGION 1..729: note = Description of Artificial Sequence: Synthetic polypeptide
MAADGYLPDWLEDNLSEGIREWWDLKPGAPKPKANQQKQDDGRGLVLPGYKYLGPFNGLDKGEPVNAADAAALEHDKAYDQQLKAGDNPYLRYNHADAEFQERLQEDTSFGGNLGRAVFQAKKRVLEPLGLVEEGAKTAPGKKRPIDSPDSSTGIGKKGQQPAKKKLNFGQTGDSESVPDPQPLGEPPAAPSSVGSGTMAAGGGAPMADNNEGADGVGNASGNWHCDSTWLGDRVITTSTRTWALPTYNNHLYKQISSSSSGATNDNHYFGYSTPWGYFDFNRFHCHFSPRDWQRLINNNWGFRPKKLRFKLFNIQVKEVTTNDGVTTIANNLTSTVQVFSDSEYQLPYVLGSAHQGCLPPFPADVFMIPQYGYLTLNNGSQSVGRSSFYCLEYFPSQMLRTGNNFEFSYSFEDVPFHSSYAHSQSLDRLMNPLIDQYLYYLARTQSTTGSTRELQFHQAGPNTMAEQSKNWLPGPCYRQQGLSKNLDFNNNSNFAWTAATKYHLNGRNSLTNPGIPMATNKDDEDQFFPINGVLVFGKTGAANKTTLENVLMTSEEEIKTTNPVATEEYGVVSSNLQPSTAGPQSQTINSQGALPGMVWQNRDVYLQGPIWAKIPHTDGNFHPSPLMGGFGLKHPPPQILIKNTPVPANPPEVFTPAKFASFITQYSTGQVSVEIEWELQKENSKRWNPEIQYTSNYAKSNNVEFAVNPDGVYTEPRPIGTRYLPRNL

SEQ ID NO: 428 - DNA, 3094 bp, Adeno-associated virus
  source 1..3094: mol_type = genomic DNA
gaattcgcccttgctgcgtcaactggaccaagagaactttcccttcaacgattgcgtcgacaagatggtgatctggtgggaggagggcaagatgacggccaaggtcgtggagtccgccaaagccattctgggcggaagcaaggtgcgcgtcgaccaaaagtgcaagtcctcggcccagatcgatcccacccccgtgatcgtcacctccaacaccaacatgtgcgccgtgatcgacgggaacagcaccaccttcgagcaccagcagccgttgcaggaccggatgttcaaatttgaactcacccgccgtctggaacacgactttggcaaggtgaccaagcaggaagtcaaagagttcttccgctgggctagtgatcacgtgactgaggtgacgcatgagttctacgtcagaaagggcggagccagcaaaagacccgcccccgatgacgcggatataagcgagcccaagcgggcctgtccctcagtcacggacccatcgacgtcagacgcggaaggagctccggtggactttgccgacaggtaccaaaacaaatgttctcgtcacgcgggcatgcttcagatgctgtttccctgcaaaacgtgcgagagaatgaatcagaatttcaacatttgcttcacgcacggggtcagagactgtttagaatgtttccccggcgtgtcagaatctcaaccggtcgtcagaaaaaagacgtatcggaagctgtgtgcgattcatcatctgctggggcgggcacccgagattgcttgctcggcctgcgacctggtcaacgtggacctggacgactgtgtttctgagcaataaatgacttaaaccgggtatggctgccgatggttatcttccagattggctcgaggacaacctctctgagggcattcgcgagtggtgggacctgaaacctggagccccgaaacccaaagccaaccagcaaaagcaggacgacggccggggtctggtgcttcctggctacaagtacctcggacccttcaacggactcgacaagggggagcccgtcaacgcggcggacgcagcggccctcgagcacgacaaggcctacgaccagcagctcaaagcgggtgacaatccgtacctgcggtataaccacgccgacgccgagtttcaggagcgtctgcaagaagatacgtcatttgggggcaacctcgggcgagcagtcttccaggccaagaagcgggttctcgaacctctcggtctggttgaggaaggcgctaagacggctcctggaaagaagagacccatagactctccagactcctccacgggcatcggcaaaaaaggccagcagcccgctaaaaagaagctcaattttggtcagactggcgactcagagtcagtccccgaccctcaacctcttggagaacctccagcagcgccctctagtgtgggatctggtacaatggctgcaggcggtggcgcaccaatggcagacaataacgaaggtgccgacggagtgggtaatgcctcaggaaattggcattgcgattccacatggctgggcgacagagtcatcaccaccagcaccagaacctgggccctccccacctacaacaaccacctctacaagcaaatctccagcagcagctcaggagccaccaatgacaaccactacttcggctacagcaccccctgggggtattttgactttaacagattccactgccacttctcaccacgtgactggcagcgactcatcaacaacaactggggattccggcccaagaagctgcggttcaagctcttcaacatccaggtcaaggaggtcacaacgaatgacggcgtcacgaccatcgctaataaccttaccagcacggttcaggtcttctcggactcggaataccagctgccgtacgtcctcggctctgcgcaccagggctgcctgcctccgttcccggcggacgtcttcatgattcctcagtacggctacctgactctgaacaacggcagccaatcggtgggccgttcctccttctactgcctggaatatttcccctctcaaatgctgagaacgggcaacaactttgagttcagttacagcttcgaggacgtgcctttccacagcagctacgcgcacagccagagcctagaccggctgatgaaccctctcatcgaccagtacctgtactacctggcccggacccagagcaccacgggttccaccagggaactgcaatttcatcaagctgggcccaatactatggccgagcagtcaaagaactggctgcctggaccctgctataggcaacagggactgtcaaagaacttggactttaacaacaacagcaattttgcctggactgctgccactaaatatcatctgaatggcagaaactctttgaccaatcctggcattcccatggcaaccaacaaggatgatgaggaccagttctttcccatcaacggggtactggtttttggcaagacgggagctgccaacaaaactacgctggaaaacgttctgatgaccagcgaggaggagatcaagaccactaaccctgtggctacagaagaatacggtgtggtctccagcaacctgcagccgtctacagccgggcctcaatcacagactatcaacagccagggagcactgcctggcatggtctggcagaaccgggacgtgtatctgcagggtcccatctgggccaaaattcctcacacggatggcaactttcacccgtctcctctgatgggcggttttggactcaaacacccgcctccacagatcctgatcaaaaacacacctgtacctgctaatcctccggaggtgtttactcctgccaagtttgcctccttcatcacgcagtacagcaccggacaagtcagcgtggaaatcgagtgggagctgcagaaagaaaacagcaagcgctggaacccagaaattcagtatacttccaattatgccaagtctaataatgttgaatttgctgtgaaccctgatggtgtttatactgagcctcgccccattggcactcgttacctcccccgtaatctgtaattgcttgttaatcaataaaccggttgattcgtttcagttgaactttggtctctgcgaagggcgaattc

SEQ ID NO: 429 - protein, 1458 aa, synthetic construct
  REGION 1..1458: note = Description of Artificial Sequence: Synthetic polypeptide
MAADGYLPDWLEDNLSEGIREWWDLKPGAPKPKANQQKQDDGRGLVLPGYKYLGPFNGLDKGEPVNAADAAALEHDKAYDQQLKAGDNPYLRYNHADAEFQERLQEDTSFGGNLGRAVFQAKKRVLEPLGLVEEGAKTAPGKKRPIDSPDSSTGIGKKGQQPAKKKLNFGQTGDSESVPDPQPLGEPPAAPSSVGSGTMAAGGGAPTADNNEGADGVGNASGNWHCDSTWLGDRVITTSTRTWALPTYNNHLYKQISSSSSGATNDNHYFGYSTPWGYFDFNRFHCHFSPRDWQRLINNNWGFRPKKLRFKLFNIQVKEVTTNDGVTTIANNLTSTVQVFSDSEYQLPYVLGSAHQGCLPPFPADVFMIPQYGYLTLNNGSQSVGRSSFYCLEYFPSQMLRTGNNFEFSYSFEDVPFHSSYAHSQSLDRLMNPLIDQYLYYLARTQSTTGSTRELQFHQAGPNTMAEQSKNWLPGPCYRQQRLSKNLDFNNNSNFAWTAATKYHLNGRNSLTNPGIPMATNKDDEDQFFPINGVLVFGKTGAANKTTLENVLMTSEEEIKTTNPVATEEYGVVSSNLQSSTAGPQSQTINSQGALPGMVWQNRDVYLQGPIWAKIPHTDGNFHPSPLMGGFGLEHPPPQILIKNTPVPANPPEVFTPAKFASFITQYSTGQVSVEIEWELQKENSKRWNPEIQYTSNYAKSNNVEFAVNPDGVYTEPRPIGTRYLTRNLMAADGYLPDWLEDNLSEGIREWWDLKPGAPKPKANQQKQDDGRGLVLPGYKYLGPFNGLDKGEPVNAADAAALEHDKAYDQQLKAGDNPYLRYNHADAEFQERLQEDTSFGGNLGRAVFQAKKRVLEPLGLVEEGAKTAPGKKRPIGSPDSSTGIGKKGQQPAKKKLNFGQTGDSESVPDPQPLGEPPAAPSSVGSGTMAAGGGAPMADNNEGADGVGNASGNWHCDSTWLGDRVITTSTRTWALPTYNNHLYKQISSSSSGATNDNHYFGYSTPWGYFDFNRFHCHFSPRDWQRLINNNWGFRPKKLRFKLLNIQVKEVTTNDGVTTIANNLTSTVQVFSDSEYQLPYVLGSAHQGCLPPFPADVFMIPQYGYLTLDNGSQSVGRSSFYCLEYFPSQMLRTGNNFEFSYSFEDVPFHSSYAHSQSLDRLMNPLIDQYLYYLARTQSTTGSTRELQFHQAGPNTMAEQSKNWLPGPCYRQQRLSKNLDFNNNSNFAWTAATKYHLNGRNSLTNPGIPMATNKDDEDQFFPINGVLVFGKTGAANKTTLENVLMTSEEEIKTTNPVATEEYGVVSSNLQSSTAGPQSQTINSQGALPGMVWQNRDVYLQGPIWAKIPHTDGNFHPSPLMGGFGLKHPPPQILIKNTPVPANPPEVFTPAKFASFITQYSTGQVSVEIEWELQKENSKRWNPEIQYTSNYAKSNNVEFAVNPDGVYTEPRPIGTRYLTRNL

SEQ ID NO: 430 - DNA, 3095 bp, Adeno-associated virus
  source 1..3095: mol_type = genomic DNA
gaattcgcccttcgcagagaccaaagttcaactgaaacgaatcaaccggtttattgattaacaagcaattacagattacgggtgaggtaacgagtgccaatggggcgaggctcagtataaacaccatcagggttcacagcaaattcaacattattagacttggcataattggaagtatactgaatttctgggttccagcgcttgctgttttctttctgcagctcccactcgatttccacgctgacttgtccggtgctgtactgcgtgatgaaggaggcaaacttggcaggagtaaacacctccggaggattagcaggtacaggtgtgtttttgatcaggatctgtggaggcgggtgtttgagtccaaaaccgcccatcagaggagacgggtgaaagttgccatccgtgtgaggaattttggcccagatgggaccctgcagatacacgtcccggttctgccagaccatgccaggcagtgctccctggctgttgatagtctgtgattgaggcccggctgtagacgactgcaggttgctggagaccacaccgtattcttctgtagccacagggttagtggtcttgatctcctcctcgctggtcatcagaacgttttccagcgtagttttgttggcagctcccgtcttgccaaaaaccagtaccccgttgatgggaaagaactggtcctcatcatccttgttggttgccatgggaatgccaggattggtcaaagagtttctgccattcagatgatatttagtggcagcagtccaggcaaaattgctgttgttgttaaagtccaagttctttgacagtctctgttgcctatagcagggtccaggcagccagttctttgactgctcggccatagtattgggcccagcttgatgaaattgcagttccctggtggaacccgtggtgctctgggtccgggccaggtagtacaggtactggtcgatgagagggttcatcagccggtctaggctctggctgtgcgcgtagctgctgtggaaaggcacgtcctcgaagctgtaactgaactcaaagttgttgcccgttctcagcatttgagaggggaaatattccaggcagtagaaggaggaacggcccaccgattggctgccgttgtccagagtcaggtagccgtactgaggaatcatgaagacgtccgccgggaacggaggcaggcagccctggtgcgcagagccgaggacgtacggcagctggtattccgagtccgagaagacctgaaccgtgctggtaaggttattagcgatggtcgtgacgccgtcattcgttgtgacctccttgacctggatgttgaggagcttgaaccgcagcttcttgggccggaatccccagttgttgttgatgagtcgctgccagtcacgtggtgagaagtggcagtggaatctgttaaagtcaaaatacccccagggggtgctgtagccgaagtagtggttgtcattggtggctcctgagctgctgctggagatttgcttgtagaggtggttgttgtaggtggggagggcccaggttctggtgctggtggtgatgactctgtcgcccagccatgtggaatcgcaatgccaatttcctgaggcattacccactccgtcggcaccttcgttattgtctgccattggtgcgccaccgcctgcagccattgtaccagatcccacactagagggcgctgctggaggttctccaagaggttgagggtcggggactgactctgagtcgccagtctgaccaaaattgagcttctttttagcgggctgctggccttttttgccgatgcccgtggaggagtctggagagcctatgggtctcttctttccaggagccgtcttagcgccttcctcaaccagaccgagaggttcgagaacccgcttcttggcctggaagactgctcgcccgaggttgcccccaaatgacgtatcttcttgcagacgctcctgaaactcggcgtcggcgtggttataccgcaggtacggattgtcacccgctttgagctgctggtcgtaggccttgtcgtgctcgagggccgctgcgtccgccgcgttgacgggctcccccttgtcgagtccgttgaagggtccgaggtacttgtagccaggaagcaccagaccccggccgtcgtcctgcttttgctggttggctttgggtttcggggctccaggtttcaggtcccaccactcgcgaatgccctcagagaggttgtcctcgagccaatctggaagataaccatcggcagccatacctggtttaagtcatttattgctcagaaacacagtcgtccaggtccacgttgaccaggtcgcaggccgagcaagcaatctcgggtgcccgccccagcagatgatgaatcgcacacagcttccgatacgtcttttttctgacgaccggttgagattctgacacgccggggaaacattctaaacagtctctgaccccgtgcgtgaagcaaatgttgaaattctgattcattctctcgcacgttttgcagggaaacagcacctgaagcatgcccgcgtgacgagaacatttgttttggtacctgtcggcaaagtccaccggagctccttccgcgtctgacgtcgatgggtccgtgactgagggacgggcccgcttgggctcgcttatatccgcgtcatcgggggcgggtcttttgctggctccgccctttctgacgtagaactcatgcgtcacctcagtcacgtgatcactagcccagcggaagaactctttgacttcctgctttgtcaccttgccaaagtcgtgttccagacggcgggtgagttcaaatttgaacatccggtcctgcaacggttgctggtgctcgaaggtggtgctgttcccgtcgatcacggcgcacatgttggtgttggaggtgacgatcacgggggtgggatcgatctgggcggacgacttgcacttttggtccacgcgcaccttgctgccgccgagaatggccttggcggactccacgaccttggccgtcatcttgccctcctcccaccagatcaccatcttgtcgacgcaatcgttgaagggaaagttctcattggtccagttgacgcagcaagggcgaattc

SEQ ID NO: 431 - DNA, 3095 bp, Adeno-associated virus
  source 1..3095: mol_type = genomic DNA
gaattcgcccttcgcagagaccaaagttcaactgaaacgaatcaaccggtttattgattaacaagcaattacagattacgggtgaggtaacgagtgccaatggggcgaggctcagtataaacaccatcagggttcacagcaaattcaacattattagacttggcataattggaagtatactgaatttctgggttccagcgcttgctgttttctttctgcagctcccactcgatttccacgctgacttgtccggtgctgtactgcgtgatgaaggaggcaaacttggcaggagtaaacacctccggaggattagcaggtacaggtgtgtttttgatcaggatctgtggaggcgggtgttcgagtccaaaaccgcccatcagaggagacgggtgaaagttgccatccgtgtgaggaattttggcccagatgggaccctgcagatacacgtcccggttctgccagaccatgccaggcagtgctccctggctgttgatagtctgtgattgaggcccggctgtagacgactgcaggttgctggagaccacaccgtattcttctgtagccacagggttagtggtcttgatctcctcctcgctggtcatcagaacgttttccagcgtagttttgttggcagctcccgtcttgccaaaaaccagtaccccgttgatgggaaagaactggtcctcatcatccttgttggttgccatgggaatgccaggattggtcaaagagtttctgccattcagatgatatttagtggcagcagtccaggcaaaattgctgttgttgttaaagtccaagttctttgacagtctctgttgcctatagcagggtccaggcagccagttctttgactgctcggccatagtattgggcccagcttgatgaaattgcagttccctggtggaacccgtggtgctctgggtccgggccaggtagtacaggtactggtcgatgagagggttcatcagccggtctaggctctggctgtgcgcgtagctgctgtggaaaggcacgtcctcgaagctgtaactgaactcaaagttgttgcccgttctcagcatttgagaggggaaatattccaggcagtagaaggaggaacggcccaccgattggctgccgttgttcagagtcaggtagccgtactgaggaatcatgaagacgtccgccgggaacggaggcaggcagccctggtgcgcagagccgaggacgtacggcagctggtattccgagtccgagaagacctgaaccgtgctggtaaggttattagcgatggtcgtgacgccgtcattcgttgtgacctccttgacctggatgttgaagagcttgaaccgcagcttcttgggccggaatccccagttgttgttgatgagtcgctgccagtcacgtggtgagaagtggcagtggaatctgttaaagtcaaaatacccccagggggtgctgtagccgaagtagtggttgtcattggtggctcctgagctgctgctggagatttgcttgtagaggtggttgttgtaggtggggagggcccaggttctggtgctggtggtgatgactctgtcgcccagccatgtggaatcgcaatgccaatttcctgaggcattacccactccgtcggcaccttcgttattgtctgccgttggtgcgccaccgcctgcagccattgtaccagatcccacactagagggcgctgctggaggttctccaagaggttgagggtcggggactgactctgagtcgccagtctgaccaaaattgagcttctttttagcgggctgctggccttttttgccgatgcccgtggaggagtctggagagtctatgggtctcttctttccaggagccgtcttagcgccttcctcaaccagaccgagaggttcgagaacccgcttcttggcctggaagactgctcgcccgaggttgcccccaaatgacgtatcttcttgcaggcgctcctgaaactcggcgtcggcgtggttataccgcaggtacggattgtcacccgctttgagctgctggtcgtaggccttgtcgtgctcgagggccgctgcgtccgccgcgttgacgggctcccccttgtcgagtccgttgaagggtccgaggtacttgtagccaggaagcaccagaccccggccgtcgtcctgcttttgctggttggctttgggtttcggggctccaggtttcaggtcccaccactcgcgaatgccctcagagaggttgtcctcgagccaatctggaagataaccatcggcagccatacctggtttaagccatttattgctcagaaacacagtcgtccaggtccacgttgaccaggtcgcaggccgagcaggcaatctcgggtgcccgccccagcagatgatgaatcgcacacagcttccgatacgtcttttttctgacgaccggttgagattctgacacgccggggaaacattctaaacagtctctgaccccgtgcgtgaagcaaatgttgaaattctgattcattctctcgcacgttttgcagggaaacagcatctgaagcatgcccgcgtggcgagaacatttgttttggtacctgtcggcaaagtccaccggagctccttccgcgtctgacgtcgatgggtccgtgactgagggacaggcccgcttgggctcgcttatatccgcgtcatcgggggcgggtcttttgctggctccgccctttctgacgtagaactcatgcgtcacctcagtcacgtgatcactagcccagcggaagaactctttgacttcctgctttgtcaccttgccaaagtcgtgttccagacggcgggtgagttcaaatttgaacatccggtcctgcaacggctgctggtgctcgaaggtggtgctgttcccgtcgatcacggcgcgcatgttggtgttggaggtgacgatcacgggggtgggatcgatctgggcggacgacttgcacttttggtccacgcgcaccttgctgccgccgagaatggccttggcggactccacgaccttggccgtcatcttgccctcctcccaccagatcaccatcttgtcgacgcaatcgttgaagggaaagttctcattggtccagttgacgcagcaagggcgaattc

SEQ ID NO: 432 - protein, 729 aa, Adeno-associated virus; identical to SEQ ID NO: 160

SEQ ID NO: 433 - protein, 729 aa, Adeno-associated virus
MAADGYLPDWLEDNLSEGIREWWDLKPGAPKPKANQQKQDDGRGLVLPGYKYLGPFNGLDKGEPVNAADAAALEHDKAYDQQLKAGDNPYLRYNHADAEFQERLQEDTSFGGNLGRAVFQAKKRVLEPLGLVEEGAKTAPGKKRPIDSPDSSTGIGKKGQQPAKKKLNFGQTGDSESVPDPQPLGEPPAAPSSVGSGTMAAGGGAPTADNNEGADGVGNASGNWHCDSTWLGDRVITTSTRTWALPTYNNHLYKQISSSSSGATNDNHYFGYSTPWGYFDFNRFHCHFSPRDWQRLINNNWGFRPKKLRFKLFNIQVKEVTTNDGVTTIANNLTSTVQVFSDSEYQLPYVLGSAHQGCLPPFPADVFMIPQYGYLTLNNGSQSVGRSSFYCLEYFPSQMLRTGNNFEFSYSFEDVPFHSSYAHSQSLDRLMNPLIDQYLYYLARTQSTTGSTRELQFHQAGPNTMAEQSKNWLPGPCYRQQRLSKNLDFNNNSNFAWTAATKYHLNGRNSLTNPGIPMATNKDDEDQFFPINGVLVFGKTGAANKTTLENVLMTSEEEIKTTNPVATEEYGVVSSNLQSSTAGPQSQTINSQGALPGMVWQNRDVYLQGPIWAKIPHTDGNFHPSPLMGGFGLKHPPPQILIKNTPVPANPPEVFTPAKFASFITQYSTGQVSVEIEWELQKENSKRWNPEIQYTSNYAKSNNVEFAVNPDGVYTEPRPIGTRYLTRNL

SEQ ID NO: 434 - protein, 729 aa, Adeno-associated virus
MAADGYLPDWLEDNLSEGIREWWDLKPGAPKPKANQQKQDDGRGLVLPGYKYLGPFNGLDKGEPVNAADAAALEHDKAYDQQLKAGDNPYLRYNHADAEFQERLQEDTSFGGNLGRAVFQAKKRVLEPLGLVEEGAKTAPGKKRPIDSPDSSTGIGKKGQQPAKKKLNFGQTGDSESVPDPQPLGEPPAAPSSVGSGTMAAGGGAPMADNNEGADGVGNASGNWHCDSTWLGDRVITTSTRTWALPTYNNHLYKQISSSSSGATNDNHYFGYSTPWGYFDFNRFHCHFSPRDWQRLINNNWGFRPKKLRFKLFNIQVKEVTTNDGVTTIANNLTSTVQVFSDSEYQLPYVLGSAHQGCLPPFPADVFMIPQYGYLTLNNGSQSVGRSSFYCLEYFPSQMLRTGNNFEFSYSFEDVPFHSSYAHSQSLDRLMNPLIDQYLYYLARTQSTTGSTRELQFHQAGPNTMAEQSKNWLPGPCYRQQRLSKNLDFNNNSNFAWTAATKYHLNGRNSLTNPGIPMATNKDDEDQFFPINGVLVFGKTGAANKTTLENVLMTSEEEIKTTNPVATEEYGVVSSNLQSSTAGPQSQTINSQGALPGMVWQNRDVYLQGPIWAKIPHTDGNFHPSPLMGGFGLKHPPPQILIKNTPVPANPPEVFTPAKFASFITQYSTGQVSVEIEWELQKENSKRWNPEIQYTSNYAKSNNVEFAVNPDGVYTEPRPIGTRYLTRNL

SEQ ID NO: 435 - DNA, 2217 bp, Adeno-associated virus
  source 1..2217: mol_type = genomic DNA
atggctgctgacggttatcttccagattggctcgaggacaacctctctgagggcattcgcgagtggtgggacctgaaacctggagcccccaagcccaaggccaaccagcagaagcaggacgacggccggggtctggtgcttcctggctacaagtacctcggacccttcaacggactcgacaagggggagcccgtcaacgcggcggacgcagcggccctcgagcacgacaaggcctacgaccagcagctcaaagcgggtgacaatccgtacctgcggtataaccacgccgacgccgagtttcaggagcgtctacaagaagatacgtcttttgggggcaacctcgggcgagcagtcttccaggccaagaagcgggttctcgaacctctcggtctggttgaggaagctgctaagacggctcctggaaagaagagaccggtagaaccgtcacctcagcgttcccccgactcctccacgggcatcggcaagaaaggccagcggcccgctaaaaagagactgaactttggtcagactggcgactcagagtcagtccccgaccctcaaccaatcggagaaccaccagcaggcccctctggtctgggatctggtacaatggctgcaggcggtggcgctccaatggcagacaataacgaaggcgccgacggagtgggtagttcctcaggaaattggcattgcgattccacatggctgggcgacagagtcatcaccaccagcacccgaacctgggccctgcccacctacaacaaccacctctacaagcaaatatccaatgggacatcgggaggaagcaccaacgacaacacctacttcggctacagcaccccctgggggtattttgacttcaacagattccactgccacttctcaccacgtgactggcagcgactcatcaacaacaactggggattccggccaaaaagactcagcttcaagcccttcaacatccaggtcaaggaggtcacgcagaatgaaggcaccaagaccatcgccaataaccttaccagcacgattcaggtatttacggactcggaataccagctgccgtacgtcctcggctccgcgcaccagggctgcctgcctccgttcccggcggacgtcttcatgattccccagtacggctaccttacactgaacaatggaagtcaagccgtaggccgttcctccttctactgcctggaatattttccatctcaaatgctgcgaactggaaacaattttgaattcagctacaccttcgaggacgtgcctttccacagcagctacgcacacagccagagcttggaccgactgatgaatcctctcatcgaccagtacctgcactacttatccagaactcagtccacaggaggaactcaaggtacccagcaattgttattttctcaagctgggcctgcaaacatgtcggctcaggctaagaactggctacctggaccttgctaccggcagcagcgagtctctacgacactgtcgcaaaacaacaacagcaactttgcttggactggtgccaccaaatatcacctgaacggaagagactctttggtaaatcccggtgtcgccatggcaacccacaaggacgacgaggaacgcttcttcccgtcgagtggagtcctgatgtttggaaaacagggtgctggaagagacaatgtggactacagcagcgttatgctaaccagcgaagaagaaattaaaaccactaaccctgtagccacagaacaatacggtgtggtggctgacaacttgcagcaaaccaatacagggcctattgtgggaaatgtcaacagccaaggagccttacctggcatggtctggcagaaccgagacgtgtacctgcagggtcccatctgggccaagattcctcacacggacggcaacttccacccttcaccgctaatgggaggatttggactgaagcacccacctcctcagatcctgatcaagaacacgccggtacctgcggatcctccaacaacgttcagccaggcgaaattggcttccttcattacgcagtacagcaccggacaggtcagcgtggaaatcgagtgggagctgcagaaggagaacagcaaacgctggaacccagagattcagtacacttcaaactactacaaatctacaaatgtggactttgctgtcaatacagagggaacttattctgagcctcgccccattggtactcgctacctcacccgtaatctgtaa

SEQ ID NO: 436 - protein, 738 aa, Adeno-associated virus
MAADGYLPDWLEDNLSEGIREWWDLKPGAPKPKANQQKQDDGRGLVLPGYKYLGPFNGLDKGEPVNAADAAALEHDKAYDQQLKAGDNPYLRYNHADAEFQERLQEDTSFGGNLGRAVFQAKKRVLEPLGLVEEAAKTAPGKKRPVEPSPQRSPDSSTGIGKKGQRPAKKRLNFGQTGDSESVPDPQPIGEPPAGPSGLGSGTMAAGGGAPMADNNEGADGVGSSSGNWHCDSTWLGDRVITTSTRTWALPTYNNHLYKQISNGTSGGSTNDNTYFGYSTPWGYFDFNRFHCHFSPRDWQRLINNNWGFRPKRLSFKPFNIQVKEVTQNEGTKTIANNLTSTIQVFTDSEYQLPYVLGSAHQGCLPPFPADVFMIPQYGYLTLNNGSQAVGRSSFYCLEYFPSQMLRTGNNFEFSYTFEDVPFHSSYAHSQSLDRLMNPLIDQYLHYLSRTQSTGGTQGTQQLLFSQAGPANMSAQAKNWLPGPCYRQQRVSTTLSQNNNSNFAWTGATKYHLNGRDSLVNPGVAMATHKDDEERFFPSSGVLMFGKQGAGRDNVDYSSVMLTSEEEIKTTNPVATEQYGVVADNLQQTNTGPIVGNVNSQGALPGMVWQNRDVYLQGPIWAKIPHTDGNFHPSPLMGGFGLKHPPPQILIKNTPVPADPPTTFSQAKLASFITQYSTGQVSVEIEWELQKENSKRWNPEIQYTSNYYKSTNVDFAVNTEGTYSEPRPIGTRYLTRNL

SEQ ID NO: 437 - DNA, 2217 bp, Adeno-associated virus
  source 1..2217: mol_type = genomic DNA
atggctgctgacggttatcttccagattggctcgaggacaacctctctgagggcattcgcgagtggtgggacctgaaacctggagcccccaagcccaaggccaaccagcagaagcaggacgacggccggggtctggtgcttcctggctacaagtacctcggacccttcaacggactcgacaagggggagcccgtcaacgcggcggacgcagcggccctcgagcacgacaaggcctacgaccagcagctcaaagcgggtgacaatccgtacctgcggtataaccacgccgacgccgagtttcaggagcgtctgcaagaagatacgtcttttgggggcaacctcgggcgagcagtcttccaggccaagaagcgggttctcgaacctctcggtctggttgaggaagctgctaagacggctcctggaaagaagagaccggtagaaccgtcacctcagcgttcccccgactcctccacgggcatcggcaagaaaggccagcagcccgctaaaaagagactgaactttggtcagactggcgactcagagtcagtccccgaccctcaaccaatcggagaaccaccagcaggcccctctggtctgggatctggtacaatggctgcaggcggtggcgctccaatggcagacaataacgaaggcgccgacggagtgggtagttcctcaggaaattggcattgcgattccacatggctgggcgacagagtcatcaccaccagcacccgaacctgggccctgcccacctacaacaaccacctctacaagcaaatatccaatgggacatcgggaggaagcaccaacgacaacacctacttcggctacagcaccccctgggggtattttgacttcaacagattccactgccacttctcaccacgtgactggcagcgactcatcaacaacaactggggattccggccaaaaagactcagcttcaagctcttcaacatccaggtcaaggaggtcacgcagaatgaaggcaccaagaccatcgccaataaccttaccagcacgattcaggtatttacggactcggaataccagctgccgtacgtcctcggctccgcgcaccagggctgcctgcctccgttcccggcggacgtcttcatgattccccagtacggctaccttacactgaacaatggaagtcaagccgtaggccgttcctccttctactgcctggaatattttccatctcaaatgctgcgaactggaaacaattttgaattcagctacaccttcgaggacgtgcctttccacagcagctacgcacacagccagagcttggaccgactgatgaatcctctcatcgaccagtacctgtactacttatccagaactcagtccacaggaggaactcaaggtacccagcaattgttattttctcaagctgggcctgcaaacatgtcggctcaggctaagaactggctacctggaccttgctaccggcagcagcgagtctctacgacactgtcgcaaaacaacaacagcaactttgcttggactggtgccaccaaatatcacctgaacggaagagactctttggtaaatcccggtgtcgccatggcaacccacaaggacgacgaggaacgcttcttcccgtcgagtggagtcctgatgtttggaaaacagggtgctggaagagacaatgtggactacagcagcgttatgctaaccagcgaagaagaaattaaaaccactaaccctgtagccacagaacaatacggtgtggtggctgataacttgcagcaaaccaatacggggcctattgtgggaaatgtcaacagccaaggagccttacctggcatggtctggcagaaccgagacgtgtacctgcagggtcccatctgggccaagattcctcacacggacggcaacttccacccttcaccgctaatgggaggatttggactgaagcacccacctcctcagatcctgatcaagaacacgccggtacctgcggatcctccaacaacgttcagccaggcgaaattggcttccttcattacgcagtacagcaccggacaggtcagcgtggaaatcgagtgggagctgcagaaggagaacagcaaacgctggaacccagagattcagtacacttcaaactactacaaatctacaaatgtggactttgctgtcaatacagagggaacttattctgagcctcgccccattggtactcgttacctcacccgtaatctgtaa

SEQ ID NO: 438 - protein, 738 aa, Adeno-associated virus; identical to SEQ ID NO: 90

SEQ ID NO: 439 - protein, 738 aa, Adeno-associated virus
MAADGYLPDWLEDNLSEGIREWWDLKPGAPKPKANQQKQDDGRGLVLPGYKYLGPFNGLDKGEPVNAADAAALEHDKAYDQQLKAGDNPYLRYNHADAEFQERLQEDTSFGGNLGRAVFQAKKRVLEPLGLVEEAAKTAPGKKRPVEPSPQRSPDSSTGIGKKGQQPAKKRLNFGQTGDSESVPDPQPIGEPPAGPSGLGSGTMAAGGGAPMADNNEGADGVGSSSGNWHCDSTWLGDRVITTSTRTWALPTYNNHLYKQISNGTSGGSTNDNTYFGYSTPWGYFDFNRFHCHFSPRDWQRLINNNWGFRPKRLSFKLFNIQVKEVTQDEGTKTIANNLTSTIQVFTDSEYQLPYVLGSAHQGCLPPFPADVFMIPQYGYLTLNNGSQAVGRSSFYCLEYFPSQMLRTGNNFEFSYTFEDVPFHSSYAHSQSLDRLMNPLIDQYLYYLSRTQSTGGTQGTQQLLFSQAGPANMSARAKNWLPGPCYRQQRVSTTLSQNNNSNFAWTGATKYHLNGRDSLVNPGVAMATHKDDEERFFPSSGVLMFGKQGAGRDNVDYSSVMLTSEEEIKTTNPVATEQYGVVADNLQQANTGPIVGNVNSQGALPGMVWQNRDVYLQGPIWAKIPHTDGNFHPSPLMGGFGLKHPPPQILIKNTPVPADPPTTFSQAKLASFITQYSTGQVSVEIEWELQKENSKRWNPEIQYTSNYYKSTNVDFAVNSEGTYSEPRPIGTRYLTRNL

SEQ ID NO: 440 - DNA, 2217 bp, Adeno-associated virus
  source 1..2217: mol_type = genomic DNA
atggctgctgacggttatcttccagattggctcgaggacaacctctctgagggcattcgcgagtggtgggacctgaaacctggagcccccaagcccaaggccaaccagcagaagcaggacgacggccggggtctggtgcttcctggctacaagtacctcggacccttcaacggactcgacaagggggagcccgtcaacgcggcggacgcagcggccctcgagcacgacaaggcctacgaccagcagctcaaagcgggtgacaatccgtacctgcggtataaccacgccgacgccgagtttcaggagcgtctgcaagaagatacgtcttttgggggcaacctcgggcgagcagtcttccaggccaagaagcgggttctcgaacctctcggtctggttgaggaagctgctaagacggctcctggaaagaagagaccggtagaaccgtcacctcagcgttcccccgactcctccacgggcatcggcaagaaaggccagcagcccgctaaaaagagactgaactttggtcagactggcgactcagagtcagtccccgaccctcaaccaatcggagaaccaccagcaggcccctctggtctgggatctggtacaatggctgcaggcggtggcgctccaatggcagacaataacgaaggcgccgacggagtgggtagttcctcaggaaattggcattgcgattccacatggctgggcgacagagtcatcaccaccagcacccgaacctgggccctgcccacctacaacaaccacctctacaagcaaatatccaatgggacatcgggaggaagcaccaacgacaacacctacttcggctacagcaccccctgggggtattttgacttcaacagattccactgccacttctcaccacgtgactggcagcgactcatcaacaacaactggggattccggccaaaaagactcagcttcaagctcttcaacatccaggtcaaggaggtcacgcaggatgaaggcaccaagaccatcgccaataaccttaccagcacgattcaggtatttacggactcggaataccagctgccgtacgtcctcggctccgcgcaccagggctgcctgcctccgttcccggcggacgtcttcatgattccccagtacggctaccttacactgaacaatggaagtcaagccgtaggccgttcctccttctactgcctggaatattttccatctcaaatgctgcgaactggaaacaattttgaattcagctacaccttcgaggacgtgcctttccacagcagctacgcacacagccagagcttggaccgactgatgaatcctctcatcgaccagtacctgtactacttatccagaactcagtccacaggaggaactcaaggtacccagcaattgttattttctcaagctgggcctgcaaacatgtcggctcgggctaagaactggctacctggaccttgctaccggcagcagcgagtctctacgacactgtcgcaaaacaacaacagcaactttgcttggactggtgccaccaaatatcacctgaacggaagagactctttggtaaatcccggtgttgctatggcaacgcataaggacgacgaggaacgtttctttccatcgagcggagtcctgatgtttggaaaacagggtgctggaagagacaatgtggactatagcagcgttatgctaaccagcgaggaagaaattaaaaccactaaccctgtagccacagaacaatacggtgtggtggctgacaacttgcagcaagccaatacagggcctattgtgggaaatgtcaacagccaaggagccttacctggcatggtctggcagaaccgagacgtgtacctgcagggtcccatctgggccaaaattcctcacacggacggcaattttcacccgtctcctctgatgggcggctttggactgaagcacccacctccccagatcctgatcaagaatacgccggtacctgcggatcctccaacgacgttcagccaggcaaaattggcttccttcatcacgcagtacagcaccggccaggtcagcgtggagatcgagtgggagctgcagaaggagaacagcaagcgatggaacccagaaattcagtacacttccaactactacaaatctacaaatgtggactttgctgtcaattctgagggtacatattcagagcctcgccccattggtactcgttatctgacacgtaatctgtaa

SEQ ID NO: 441 - DNA, 2211 bp, Adeno-associated virus
  source 1..2211: mol_type = genomic DNA
atggctgccgatggttatcttccagattggctcgaggacaacctctctgagggcattcgcgagtggtgggacttgaaacctggagccccgaaacccaaagccaaccagcaaaagcaggacgacggccggggcctggtgcttcctggctacaagtacctcggacccttcaacggactcgacaagggggagcccgtcaacgcggcggacgcagcggccctcgagcacgacaaggcctacgaccagcagctcgaagcgggtgacaatccgtacctgcggtataaccacgccgacgccgagtttcaggagcgtctgcaagaagatacgtcttttgggggcaacctcgggcgagcagtcttccaggccaagaagcgggttctcgaacctctcggtctggttgaggaaggcgctaagacggctcctggaaagaagagaccagtagagcagtcaccccaagaaccagactcctcctcgggcatcggcaagaaaggccaacagcccgccagaaaaagactcaattttggccagactggcgactcagagtcagttccagaccctcaacctctcggagaacctccagcagcgccctctggtgtgggacctaatacaatggctgcaggcggtggcgcaccaatggcagacaataacgaaggcgccgacggagtgggtagttcctcgggaaattggcattgcgattccacatggctgggcgacagagtcatcaccaccagcacccgaacctgggccctgcccacctacaacaaccacctctacaagcaaatctccaacgggacatcgggaggagccaccaacgacaacacctacttcggctacagcaccccctgggggtattttgactttaacagattccactgccacttttcaccacgtgactggcagcgactcatcaacaacaactggggattccggcccaagagactcagcttcaagctcttcaacatccaggtcaaggaggtcacgcagaatgaaggcaccaagaccatcgccaataacctcaccagcaccatccaggtgtttacggactcggagtaccagctgccgtacgttctcggctctgcccaccagggctgcctgcctccgttcccggcggacgtgttcatgattccccagtacggctacctaacactcaacaacggtagtcaggccgtgggacgctcctccttctactgcctggaatactttccttcgcagatgctgagaaccggcaacaacttccagtttacttacaccttcgaggacgtgcctttccacagcagctacgcccacagccagagcttggaccggctgatgaatcctctgattgaccagtacctgtactacttgtctcggactcaaacaacaggaggcacggcaaatacgcagactctgggcttcagccaaggtgggcctaatacaatggccaatcaggcaaagaactggctgccaggaccctgttaccgccaacaacgcgtctcaacgacaaccgggcaaaacaacaatagcaactttgcctggactgctgggaccaaataccatctgaatggaagaaattcattggctaatcctggcatcgctatggcaacacacaaagacgacgaggagcgttttttcccagtaacgggatcctgtttttggcaacaaaatgctgccagagacaatgcggattacagcgatgtcatgctcaccagcgaggaagaaatcaaaaccactaaccctgtggctacagaggaatacggtatcgtggcagataacttgcagcagcaaaacacggctcctcaaattggaactgtcaacagccagggggccttacccggtatggtctggcagaaccgggacgtgtacctgcagggtcccatctgggccaagattcctcacacggacggcaacttccacccgtctccgctgatgggcggctttggcctgaaacatcctccgcctcagatcctgatcaagaacacgcctgtacctgcggatcctccgaccaccttcaaccagtcaaagctgaactctttcatcacgcaatacagcaccggacaggtcagcgtggaaattgaatgggagctacagaaggaaaacagcaagcgctggaaccccgagatccagtacacctccaactactacaaatctacaagtgtggactttgctgttaatacagaaggcgtgtactctgaaccccgccccattggcacccgttacctcacccgtaatctgtaa

SEQ ID NO: 442 - protein, 736 aa, Adeno-associated virus
MAADGYLPDWLEDNLSEGIREWWDLKPGAPKPKANQQKQDDGRGLVLPGYKYLGPFNGLDKGEPVNAADAAALEHDKAYDQQLEAGDNPYLRYNHADAEFQERLQEDTSFGGNLGRAVFQAKKRVLEPLGLVEEGAKTAPGKKRPVEQSPQEPDSSSGIGKKGQQPARKRLNFGQTGDSESVPDPQPLGEPPAAPSGVGPNTMAAGGGAPMADNNEGADGVGSSSGNWHCDSTWLGDRVITTSTRTWALPTYNNHLYKQISNGTSGGATNDNTYFGYSTPWGYFDFNRFHCHFSPRDWQRLINNNWGFRPKRLSFKLFNIQVKEVTQNEGTKTIANNLTSTIQVFTDSEYQLPYVLGSAHQGCLPPFPADVFMIPQYGYLTLNNGSQAVGRSSFYCLEYFPSQMLRTGNNFQFTYTFEDVPFHSSYAHSQSLDRLMNPLIDQYLYYLSRTQTTGGTANTQTLGFSQGGPNTMANQAKNWLPGPCYRQQRVSTTTGQNNNSNFAWTAGTKYHLNGRNSLANPGIAMATHKDDEERFFPVTGSCFWQQNAARDNADYSDVMLTSEEEIKTTNPVATEEYGIVADNLQQQNTAPQIGTVNSQGALPGMVWQNRDVYLQGPIWAKIPHTDGNFHPSPLMGGFGLKHPPPQILIKNTPVPADPPTTFNQSKLNSFITQYSTGQVSVEIEWELQKENSKRWNPEIQYTSNYYKSTSVDFAVNTEGVYSEPRPIGTRYLTRNL

SEQ ID NO: 443 - DNA, 2214 bp, Adeno-associated virus
  source 1..2214: mol_type = genomic DNA
atggctgctgacggttatcttccagattggctcgaggacaacctctctgagggcattcgcgagtggtgggacctgaaacctggagcccccaagcccaaggccaaccagcagaagcaggacgacggccggggtctggtgcttcctggctacaagtacctcggacccttcaacggactcgacaagggggagcccgtcagcgcggcggacgcagcggccctcgagcacgacaaggcctgcgaccagcggctcaaagcgggtgacaatccgtacctgcggtataaccacgccgacgccgagtttcaggagcgtctgcaagaagatacgtcttttgggggcaacctcgggcgagcagtcttccaggccaagaagcgggttctcgaacctctcggtctggttgaggaagctgctaagacggctcctggaaagaagggaccggtagaaccgtcacctcagcgttcccccgactcctccacgggcatcggcaagaaaggccagcagcccgctagaaagagactgaactttgggcagactggcgactcagagtcagtccccgaccctcaaccaatcggagaaccaccagcaggcccctctggtctgggatctggtacaatggctgcaggcggtggcgcaccaatggctgacaataacgagggcgccgacggagtgggtaatgcctcaggaaattggcattgcgattccacatggctgggcgacagagtcatcaccaccagcacccgaacctgggctttgcccacctacaacaatcacctctacaagcaaatctccagtcagtcagcaggtagcaccaacgacaacgtctacttcggctacagcaccccctgggggtattttgacttcaacagattccactgtcacttctcaccacgtgactggcagcggctcatcaacaacaactggggattccggcccaagaagctcaacttcaagctgttcaacatccaggtcaaggaggtcacaacgaatgacggcgtcacgaccatcgccaataaccttaccagcacggttcaggtcttttcggactcggaataccagctgccctacgtcctcggctccgcacaccagggctgcctgcctccgttcccggcggacgtcttcatgattccccagtacggctacctgactctgaacaatggcagccaatcggtgggtcgttcctctttctactgcctggaatatttcccttctcaaatgctgagaacgggcaacaacttcaccttcagctacaccttcgaggacgttcccttccacagcagctacgcacacagccagagcctggaccggctgatgaatcctcttatcgaccagtacctgtattacctggccagaacacagagcaacgcaggaggcacagctggcaatcgggaactgcagttttatcagggcgggcctaccaccatggccgaacaagccaaaaactggctgcctggaccttgcttccggcaacaaagagtctccaagacgctggatcaaaacaacaacagcaactttgcttggactggtgccaccaaataccatctaaatggaagaaattcattggttaatcccggtgtcgccatggcaacccacaaggacgacgaggaacgcttcttcccttcgagcggagtcctgatttttggaaaaactggagcagctaataagactacactggaaaatgtgttaatgacaaatgaagaggaaattcgtcctaccaacccggtagccaccgaggaatacgggactgttagcagcaacctgcaggcggctaacactgcagcccagacacaagttgtcaacaaccagggagccttacctggtatggtctggcagaaccgggacgtgtacctgcagggtcccatctgggccaagattcctcacacggacggcaactttcacccgtctccgctgatgggcggctttggactgaagcatccgcctcctcagatcctgatcaaaaacactcctgttcctgctaatcccccggaggtgtttacgcctgccaagtttgcttctttcatcacacagtacagcaccggccaggtcagcgtggagatcgagtgggagctgcagaaggagaacagcaagcgctggaacccagagattcagtatacctccaattttgacgaacagactggtgtggactttgccgttgacagccagggtgtttattctgagcctcgccccattggtactcgttacctcacccgtaatctgtaa

SEQ ID NO: 444 - protein, 737 aa, Adeno-associated virus
MAADGYLPDWLEDNLSEGIREWWDLKPGAPKPKANQQKQDDGRGLVLPGYKYLGPFNGLDKGEPVSAADAAALEHDKACDQRLKAGDNPYLRYNHADAEFQERLQEDTSFGGNLGRAVFQAKKRVLEPLGLVEEAAKTAPGKKGPVEPSPQRSPDSSTGIGKKGQQPARKRLNFGQTGDSESVPDPQPIGEPPAGPSGLGSGTMAAGGGAPMADNNEGADGVGNASGNWHCDSTWLGDRVITTSTRTWALPTYNNHLYKQISSQSAGSTNDNVYFGYSTPWGYFDFNRFHCHFSPRDWQRLINNNWGFRPKKLNFKLFNIQVKEVTTNDGVTTIANNLTSTVQVFSDSEYQLPYVLGSAHQGCLPPFPADVFMIPQYGYLTLNNGSQSVGRSSFYCLEYFPSQMLRTGNNFTFSYTFEDVPFHSSYAHSQSLDRLMNPLIDQYLYYLARTQSNAGGTAGNRELQFYQGGPTTMAEQAKNWLPGPCFRQQRVSKTLDQNNNSNFAWTGATKYHLNGRNSLVNPGVAMATHKDDEERFFPSSGVLIFGKTGAANKTTLENVLMTNEEEIRPTNPVATEEYGTVSSNLQAANTAAQTQVVNNQGALPGMVWQNRDVYLQGPIWAKIPHTDGNFHPSPLMGGFGLKHPPPQILIKNTPVPANPPEVFTPAKFASFITQYSTGQVSVEIEWELQKENSKRWNPEIQYTSNFDEQTGVDFAVDSQGVYSEPRPIGTRYLTRNL

SEQ ID NO: 445 - DNA, 2214 bp, Adeno-associated virus
  source 1..2214: mol_type = genomic DNA
atggctgccgatggttatcttccagattggctcgaggacaacctctctgagggcattcgcgagtggtgggacctgaaacctggagccccgaaacccaaagccaaccagcaaaagcaggacgacggccggggtctggtgcttcctggctacaagtacctcggacccttcaacggactcgacaagggggagcccgtcaacgcggcggacgcagcggccctcgagcacgacaaggcctacgaccagcagctcaaagcgggtgacaatccgtacctgcggtataaccacgccgacgccgagtttcaggagcgtctgcaagaagatacgtcttttgggggcaacctcgggcgagcagtcttccaggccaagaagcgggttctcgaacctctcggtctggttgaggaagctgctaagacggctcctggaaagaagagaccggtagaaccgtcacctcagcgttcccccgactcctccacgggcatcggcaagaaaggccagcagcccgctagaaagagactgaactttgggcagactggcgactcagagtcagtccccgaccctcaaccaatcggagaaccaccagcaggcccctctggtctgggatctggtacaatggctgcaggcggtggcgctccaatggcagacaataacgaaggcgccgacggagtgggtaatgcctcaggaaattggcattgcgattccacatggctgggcgacagagtcatcaccaccagcacccgaacctgggctttgcccacctacaacaaccacctctacaagcaaatctccagtcagtcagcaggtagcaccaacgacaacgtctacttcggctacagcaccccctgggggtattttgacttcaacagattccactgtcacttctcaccacgtgactggcagcggctcatcaacaacaactggggattccggcccaagaagctcaacttcaagctgttcaacatccaggtcaaggaggtcacaacgaatgacggcgtcacgaccatcgccaataaccttaccagcacggttcaggtcttttcggactcggaataccagctgccctacgtcctcggctccgcacaccagggctgcctgcctccgttcccggcggacgtcttcatgattcctcagtacggctacctgactctcaacaacggtagtcaggccgtgggacgttcctccttctactgcctggagtacttcccctctcagatgctgagaacgggcaacaacttttccttcagctacactttcgaggacgtgcctttccacagcagctacgcgcacagccagagtttggacaggctgatgaatcctctcatcgaccagtacctgtactacctgtcaagaacccagtctacgggaggcacagcgggaacccagcagttgctgttttctcaggccgggcctagcaacatgtcgactcaggccagaaactggctgcctggaccctgctacagacagcagcgcgtctccacgacactgtcgcaaaacaacaacagcaactttgcctggactggtgccaccaagtatcatctgaacggcagagactctctggtgaatccgggcgtcgccatggcaaccaacaaggacgacgaggaccgcttcttcccatccagcggcatcctcatgtttggcaagcagggagctggaaaagacaacgtggactatagcaacgtgatgctaaccagcgaggaagaaatcaagaccaccaaccccgtggccacagaacagtatggcgtggtggctgataacctacagcagcaaaacaccgctcctattgtgggggccgtcaacagccagggagccttacctggcatggtctggcagaaccgggacgtgtacctgcagggtcctatttgggccaagattcctcacacagatggcaactttcacccgtctcctttaatgggcggctttggacttaaacatccgcctcctcagatccttatcaaaaacactcctgttcctgcggatcctccaacagcgttcaaccaggccaagctgaattctttcatcacgcagtacagcaccggacaagtcagcgtggagatcgagtgggagctgcagaaggagaacagcaagcgctggaacccagagattcagtatacttccaactactacaaatctacaaatgtggactttgctgttaatactgagggtgcttactctgagcctcgccccattggcactcgttacctcacccgtaatctgtaa

SEQ ID NO: 446 - protein, 737 aa, Adeno-associated virus
MAADGYLPDWLEDNLSEGIREWWDLKPGAPKPKANQQKQDDGRGLVLPGYKYLGPFNGLDKGEPVNAADAAALEHDKAYDQQLKAGDNPYLRYNHADAEFQERLQEDTSFGGNLGRAVFQAKKRVLEPLGLVEEAAKTAPGKKRPVEPSPQRSPDSSTGIGKKGQQPARKRLNFGQTGDSESVPDPQPIGEPPAGPSGLGSGTMAAGGGAPMADNNEGADGVGNASGNWHCDSTWLGDRVITTSTRTWALPTYNNHLYKQISSQSAGSTNDNVYFGYSTPWGYFDFNRFHCHFSPRDWQRLINNNWGFRPKKLNFKLFNIQVKEVTTNDGVTTIANNLTSTVQVFSDSEYQLPYVLGSAHQGCLPPFPADVFMIPQYGYLTLNNGSQAVGRSSFYCLEYFPSQMLRTGNNFSFSYTFEDVPFHSSYAHSQSLDRLMNPLIDQYLYYLSRTQSTGGTAGTQQLLFSQAGPSNMSTQARNWLPGPCYRQQRVSTTLSQNNNSNFAWTGATKYHLNGRDSLVNPGVAMATNKDDEDRFFPSSGILMFGKQGAGKDNVDYSNVMLTSEEEIKTTNPVATEQYGVVADNLQQQNTAPIVGAVNSQGALPGMVWQNRDVYLQGPIWAKIPHTDGNFHPSPLMGGFGLKHPPPQILIKNTPVPADPPTAFNQAKLNSFITQYSTGQVSVEIEWELQKENSKRWNPEIQYTSNYYKSTNVDFAVNTEGAYSEPRPIGTRYLTRNL

SEQ ID NO: 447 - DNA, 2217 bp, Adeno-associated virus
  source 1..2217: mol_type = genomic DNA
atggctgccgatggttatcttccagattggctcgaggacaacctctctgagggcattcgcgagtggtgggacctgaaacctggagccccgaaacccaaagccaaccagcaaaagcaggacgacggccggggtctggtgcttcctggctacaagtacctcggacccttcaacggactcgacaagggggagcccgtcaacgcggcggacgcagcggccctcgagcacgacaaggcctacgaccagcagctcaaagcgggtgacaatccgtacctgcggtataatcacgccgacgccgagtttcaggagcgtctgcaagaagatacgtcttttgggggcaacctcgggcgagcagtcttccaggccaagaagcgggttctcgaacctctcggtctggttgaggaaggcgctaagacggctcctggaaagaagagaccggtagagccgtcaccacagcgttcccccgactcctccacgggcatcggcaagaaaggccagcagcccgccagaaagagactcaatttcggtcagactggcgactcagagtcagtccccgaccctcaacctatcggagaacctccagcagcgccctctagtgtgggatctggtacaatggctgcaggcggtggcgcaccaatggcagacaataacgaaggtgccgacggagtgggtagttcctcgggaaattggcattgcgattccacatggctgggcgacagagtcatcaccaccagcacccgaacctgggccctgcccacctacaacaaccacctctacaagcaaatctccaacgggacctcgggaggcagcaccaacgacaacacctactttggctacagcaccccctgggggtattttgactttaacagattccactgccacttctcaccacgtgactggcagcgactcatcaacaacaactggggattccggcccaagagactcagcttcaagctcttcaacatccaggtcaaagaggtcacgcagaatgaaggcaccaagaccatcgccaataacctcaccagcaccatccaggtgtttacggactcggaataccagctgccgtacgtcctcggctctgcccaccagggctgcctgcctccgttcccggcggacgtcttcatgattcctcagtacggctacctgactctcaacaacggtagtcaggccgtgggacgttcctccttctactgcctggagtacttcccctctcagatgctgagaacgggcaacaacttttccttcagctacactttcgaggacgtgcctttccacagcagctacgcgcacagccagagtttggacaggctgatgaatcctctcatcgaccagtacctgtactacctgtcaagaacccagtctacgggaggcacagcgggaacccagcagttgctgttttctcaggccgggcctagcaacatgtcggctcaggccagaaactggctgcctggaccctgctacagacagcagcgcgtctccacgacactgtcgcaaaacaacaacagcaactttgcctggactggtgccaccaagtatcatctgaacggcagagactctctggtgaatccgggcgtcgccatggcaaccaacaaggacgacgaggaccgcttcttcccatccagcggcatcctcatgtttggcaagcagggagctggaaaagacaacgtggactatagcaacgtgatgctaaccagcgaggaagaaatcaaggccaccaaccccgtggccacagaacagtatggcgtggtggctgataacctacagcagcaaaacaccgctcctattgtgggggccgtcaacagccagggagccttacctggcatggtctggcagaaccgggacgtgtacctgcagggtcctatttgggccaagattcctcacacagatggcaactttcacccgtctcctttaatgggcggctttggacttaaacatccgcctcctcagatcctcatcaaaaacactcctgttcctgcggatcctccaacagcgttcaaccaggccaagctgaattctttcatcacgcagtacagcaccggacaagtcagcgtggagatcgagtgggagctgcagaaggagaacagcaagcgctggaacccagagattcagtatacttccaactactacaaatctacaaatgtggactttgctgttaatactgagggtgtttactctgagcctcgccccattggcactcgttacctcacccgtaatctgtaa

SEQ ID NO: 448 - protein, 738 aa, Adeno-associated virus
MAADGYLPDWLEDNLSEGIREWWDLKPGAPKPKANQQKQDDGRGLVLPGYKYLGPFNGLDKGEPVNAADAAALEHDKAYDQQLKAGDNPYLRYNHADAEFQERLQEDTSFGGNLGRAVFQAKKRVLEPLGLVEEGAKTAPGKKRPVEPSPQRSPDSSTGIGKKGQQPARKRLNFGQTGDSESVPDPQPIGEPPAAPSSVGSGTMAAGGGAPMADNNEGADGVGSSSGNWHCDSTWLGDRVITTSTRTWALPTYNNHLYKQISNGTSGGSTNDNTYFGYSTPWGYFDFNRFHCHFSPRDWQRLINNNWGFRPKRLSFKLFNIQVKEVTQNEGTKTIANNLTSTIQVFTDSEYQLPYVLGSAHQGCLPPFPADVFMIPQYGYLTLNNGSQAVGRSSFYCLEYFPSQMLRTGNNFSFSYTFEDVPFHSSYAHSQSLDRLMNPLIDQYLYYLSRTQSTGGTAGTQQLLFSQAGPSNMSAQARNWLPGPCYRQQRVSTTLSQNNNSNFAWTGATKYHLNGRDSLVNPGVAMATNKDDEDRFFPSSGILMFGKQGAGKDNVDYSNVMLTSEEEIKATNPVATEQYGVVADNLQQQNTAPIVGAVNSQGALPGMVWQNRDVYLQGPIWAKIPHTDGNFHPSPLMGGFGLKHPPPQILIKNTPVPADPPTAFNQAKLNSFITQYSTGQVSVEIEWELQKENSKRWNPEIQYTSNYYKSTNVDFAVNTEGVYSEPRPIGTRYLTRNL

SEQ ID NO: 449 - DNA, 2217 bp, Adeno-associated virus
  source 1..2217: mol_type = genomic DNA
atggctgccgatggttatcttccagattggctcgaggacaacctctctgagggcattcgcgagtggtgggacctgaaacctggagccccgaaacccaaagccaaccagcaaaagcaggacgacggccggggtctggtgcttcctggctacaagcacctcggacccttcaacggactcgacaagggggagcccgtcaacgcggcggacgcagcggccctcgagcacgacaaggcctacgaccagcagctcaaagcgggtgacaatccgtacctgcggtataatcacgctgacgccgagtttcaggagcgtctgcaagaagatacgtcttttgggggcaacctcgggcgagcagtcttccaggccaagaagcgggttctcgaacctctcggtctggttgaggaaggcgctaagacggctcctggaaagaagagaccggtagagccgtcaccacagcgttcccccgactcctccacgggcatcggcaagaaaggccagcagcccgccagaaagagactcaatttcggtcagactggcgactcagagtcagtccccgaccctcaacctatcggagaacctccagcagcgccctctagtgtgggatctggtacaatggctgcaggcggtggcgcaccaatggcagacaataacgaaggtgccgacggagtgggtagttcctcgggaaattggcattgcgattccacatggctgggcgacagagtcatcaccaccagcacccgaacctgggccctgcccacctacaacaaccacctctacaagcaaatctccaacgggacctcgggaggcagcaccaacgacaacacctactttggctacagcaccccctgggggtattttgactttaacagattccactgccacttctcaccacgtgactggcagcgactcatcaacaacaactggggattccggcccaagagactcagcttcaagctcttcaacatccaggtcaaagaggtcacgcagaatgaaggcaccaagaccatcgccaataaccttaccagcacggttcaggtcttttcggactcggaataccagctgccctacgtcctcggctccgcacaccagggctgcctgcctccgttcccggcggacgtcttcatgattccccagtacggctacctgactctgaacaatggcagccaatcggtgggtcgttcctctttctactgcctggaatatttcccttctcaaatgctgagaacgggcaacaacttcaccttcagctacaccttcgaggacgttcccttccacagcagctacgcacacagccagagcctggaccggctgatgaatcctcttatcgaccagtacctgtattacctggccagaacacagagcaacgcaggaggcacagctggcaatcgggaactgcagttttatcagggcgggcctaccaccatggccgaacaagccaaaaactggctgcctggaccttgcttccggcaacaaagagtctccaagacgctggatcaaaacaacaacagcaactttgcttggactggtgccaccaaataccatctaaatggaagaaattcattggttaatcccggtgtcgccatggcaacccacaaggacgacgaggaacgcttcttcccttcgagcggagtcctgatttttggaaaaactggagcagctaataagactacactggaaaatgtgttaatgacaaatgaagaggaaattcgtcctaccaacccggtagccaccgaggaatacgggactgttagcagcaacctgcaggcggctaacactgcagcccagacacaagttgtcaacaaccagggagccttacctggtatggtctggcagaaccgggacgtgtacctgcagggtcccatctgggccaagattcctcacacggacggcaactttcacccgtctccgctgatgggcggctttggactgaagcatccgcctcctcagatcctgatcaaaaacactcctgttcctgctaatcccccggaggtgtttacgcctgccaagtttgcttctttcatcacacagtacagcaccggccaggtcagcgtggagatcgagtgggagctgcagaaggagaacagcaagcgctggaacccagagattcagtatacctccaattttgacaaacagactggtgtggactttgccgttgacagccagggtgtttattctgagcctcgccccattggtactcgttacctcacccgtaatctgtaa

SEQ ID NO: 450 - protein, 738 aa, Adeno-associated virus
MAADGYLPDWLEDNLSEGIREWWDLKPGAPKPKANQQKQDDGRGLVLPGYKHLGPFNGLDKGEPVNAADAAALEHDKAYDQQLKAGDNPYLRYNHADAEFQERLQEDTSFGGNLGRAVFQAKKRVLEPLGLVEEGAKTAPGKKRPVEPSPQRSPDSSTGIGKKGQQPARKRLNFGQTGDSESVPDPQPIGEPPAAPSSVGSGTMAAGGGAPMADNNEGADGVGSSSGNWHCDSTWLGDRVITTSTRTWALPTYNNHLYKQISNGTSGGSTNDNTYFGYSTPWGYFDFNRFHCHFSPRDWQRLINNNWGFRPKRLSFKLFNIQVKEVTQNEGTKTIANNLTSTVQVFSDSEYQLPYVLGSAHQGCLPPFPADVFMIPQYGYLTLNNGSQSVGRSSFYCLEYFPSQMLRTGNNFTFSYTFEDVPFHSSYAHSQSLDRLMNPLIDQYLYYLARTQSNAGGTAGNRELQFYQGGPTTMAEQAKNWLPGPCFRQQRVSKTLDQNNNSNFAWTGATKYHLNGRNSLVNPGVAMATHKDDEERFFPSSGVLIFGKTGAANKTTLENVLMTNEEEIRPTNPVATEEYGTVSSNLQAANTAAQTQVVNNQGALPGMVWQNRDVYLQGPIWAKIPHTDGNFHPSPLMGGFGLKHPPPQILIKNTPVPANPPEVFTPAKFASFITQYSTGQVSVEIEWELQKENSKRWNPEIQYTSNFDKQTGVDFAVDSQGVYSEPRPIGTRYLTRNL

SEQ ID NO: 451 - protein, 737 aa, Adeno-associated virus
MAADGYLPDWLEDNLSEGIREWWDLKPGAPKPKANQQKQDDGRGLVLPGYKYLGPFNGLDKGEPVNAADAAALEHDKAYDQQLKAGDNPYLRYNHADAEFQERLQEDTSFGGNLGRAVFQAKKRVLEPLGLVEEAAKTAPGKKRPVEPSPQRSPDSSTGIGKKGQQPARKRLNFGQTGDSESVPDPQPIGEPPAGPSGLGSGTMAAGGGAPMADNNKGADGVGNASGNWHCDSTWLGDRVITTSTRTWALPTYNNHLYKQISSQSAGSTNDNVYFGYSTPWGYFDFNRFHCHFSPRDWQRLINSNWGFRPKKLNFKLFNIQVKEVTTNDGVTTIANNLTSTVQVFSDSEYQLPYVLGSAHQGCLPPFPADVFMIPQYGYLTLNNGSQSVGRSSFYCLEYFPSQMLRTGNNFTFSYTFEDVPFHSSYAHSQSLDRLMNPLIDQYLYYLARTQSNAGGTAGNRELQFYQGGPTTMAEQAKNWLPGPCFRQQRVSKTLDQNNNSNFAWTGATKYHLNGRNSLVNPGVAMATHKDDEERFFPSSGVLIFGKTGAANKTTLENVLMTNEEEIRPTNPVATEEYGTVSSNLQAANTAAQTQVVNNQGALPGMVWQNRDVYLQGPIWAKIPHTDGNFHPSPLMGGFGLKHPPPQILIKNTPVPANPPEVFTPAKFASFITQYSTGQVSVEIEWELQKENSKRWNPEIQYTSNFDKQTGVDFAVDSQGVYSEPRPIGTRYLTRNL

SEQ ID NO: 452 - protein, 737 aa, Adeno-associated virus
MAADGYLPDWLEDNLSEGIREWWDLKPGAPKPKANQQKQDDGRGLVLPGYKYLGPFNGLDKGEPVNAADAAALEHDKAYDQQLKAGDNPYLRYNHADAEFQERLQEDTSFGGNLGRAVFQAKKRVLEPLGLVEEAAKTAPGKKRPVEPSPQRSPDSSTGIGKKGQQPARKRLNFGQTGDSESVPDPQPIGEPPAGPSGLGSGTMAAGGGAPMADNNEGADGVGNASGNWHCDSTWLGDRVITTSTRTWALPTYNNHLYKQISSQSAGSTNDNVYFGYSTPWGYFDFNRFHCHFSPRDWQRLINSNWGFRPKKLNFKLFNIQVKEVTTNDGVTTIANNLTSTVQVFSDSEYQLPYVLGSAHQGCLPPFPADVFMIPQYGYLTLNNGSQSVGRSSFYCLEYFPSQMLRTGNNFTFSYTFEDVPFHSSYAHSQSLDRLMNPLIDQYLYYLARTQSNAGGTAGNRELQFYQGGPTTMAEQAKNWLPGPCFRQQRVSKTLDQNNNSNFAWTGATKYHLNGRNSLVNPGVAMATHKDDEERFFPSSGVLIFGKTGAANKTTLENVLMTNEEEIRPTNPVATEEYGTVSSNLQAANTAAQTQVVNNQGALPGMVWQNRDVYLQGPIWAKIPHTDGNFHPSPLMGGFGLKHPPPQILIKNTPVPANPPEVFTPAKFASFITQYSTGQVSVEIEWELQKENSKRWNPEIQYTSNFDKQTGVDFAVDSQGVYSEPRPIGTRYLTRNL

SEQ ID NO: 453 - protein, 737 aa, Adeno-associated virus
MAADGYLPDWLEDNLSEGIREWWDLKPGAPKPKANQQKQDDGRGLVLPGYKYLGPFNGLDKGEPVNAADAAALEHDKAYDQQLKAGDNPYLRYNHADAEFQERLQEDTSFGGNLGRAVFQAKKRVLEPLGLVEEAAKTAPGKKRPVEPSPQRSPDSSTGIGKKGQQPARKRLNFGQTGDSESVPDPQPIGEPPAGPSGLGSGTMAAGGGAPMADNNEGADGVGNASGNWHCDSTWLGDRVITTSTRTWALPTYNNHLYKQISSQSAGSTNDNVYFGYSTPWGYFDFNRFHCHFSPRDWQRLINNNWGFRPKKLNFKLFNIQVKEVTTNDGVTTIANNLTSTVQVFSDSEYQLPYVLGSAHQGCLPPFPADVFMIPQYGYLTLNNGSQSVGRSSFYCLEYFPSQMLRTGNNFTFSYTFEDVPFHSSYAHSQSLDRLMNPLIDQYLYYLARTQSNAGGTAGNRELQFYQGGPTTMAEQAKNWLPGPCFRQQRVSKTLDQNNNSNFAWTGATKYHLNGRNSLVNPGVAMATHKDDEERFFPSSGVLIFGKTGAANKTTLENVLMTNEEEIRPTNPVATEEYGTVSSNLQAANTAAQTQVVNNQGALPGMVWQNRDVYLQGPIWAKIPHTDGNFHPSPLMGGFGLKHPPPQILIKNTPVPANPPEVFTPAKFASFITQYSTGQVSVEIEWELQKENSKRWNPEIQYTSNFDKQTGVDFAVDSQGVYSEPRPIGTRYLTRNL

SEQ ID NO: 454 - protein, 737 aa, Adeno-associated virus
MAADGYLPDWLEDNLSEGIREWWDLKPGAPKPKANQQKQDDGRGLVLPGYKYLGPFNGLDKGEPVNAADAAALEHDKAYDQQLKAGDNPYLRYNHADAEFQERLQEDTSFGGNLGRAVFQAKKRVLEPLGLVEEAAKTAPGKKRPVEPSPQRSPDSSTGIGKKGQQPARKRLNFGQTGDSESVPDPQPIGEPPAGPSGLGSGTMAAGGGAPMADNNKGADGVGNASGNWHCDSTWLGDRVITTSTRTWALPTYNNHLYKQISSQSAGSTNDNVYFGYSTPWGYFDFNRFHCHFSPRDWQRLINNNWGFRPKKLNFKLFNIQVKEVTTNDGVTTIANNLTSTVQVFSDSEYQLPYVLGSAHQGCLPPFPADVFMIPQYGYLTLNNGSQSVGRSSFYCLEYFPSQMLRTGNNFTFSYTFEDVPFHSSYAHSQSLDRLMNPLIDQYLYYLARTQSNAGGTAGNRELQFYQGGPTTMAEQAKNWLPGPCFRQQRVSKTLDQNNNSNFAWTGATKYHLNGRNSLVNPGVAMATHKDDEERFFPSSGVLIFGKTGAANKTTLENVLMTNEEEIRPTNPVATEEYGTVSSNLQAANTAAQTQVVNNQGALPGMVWQNRDVYLQGPIWAKIPHTDGNFHPSPLMGGFGLKHPPPQILIKNTPVPANPPEVFTPAKFASFITQYSTGQVSVEIEWELQKENSKRWNPEIQYTSNFDKQTGVDFAVDSQGVYSEPRPIGTRYLTRNL

SEQ ID NO: 455 - DNA, 2214 bp, Adeno-associated virus
  source 1..2214: mol_type = genomic DNA
atggctgctgacggttatcttccagattggctcgaggacaacctctctgagggcattcgcgagtggtgggacctgaaacctggagcccccaagcccaaggccaaccagcagaagcaggacgacggccggggtctggtgcttcctggctacaagtacctcggacccttcaacggactcgacaagggggagcccgtcaacgcggcggacgcagcggccctcgagcacgacaaggcctacgaccagcagctcaaagcgggtgacaatccgtacctgcggtataaccacgccgacgccgagtttcaggagcgtctgcaagaagatacgtcttttgggggcaacctcgggcgagcagtcttccaggccaagaagcgggttctcgaacctctcggtctggttgaggaagctgctaagacggctcctggaaagaagagaccggtagaaccgtcacctcagcgttcccccgactcctccacgggcatcggcaagaaaggccagcagcccgctagaaagagactgaactttgggcagactggcgactcagagtcagtccccgaccctcaaccaatcggagaaccaccagcaggcccctctggtctgggatctggtacaatggctgcaggcggtggcgcaccaatggctgacaataacaagggcgccgacggagtgggtaatgcctcaggaaattggcattgcgattccacatggctgggcgacagagtcatcaccaccagcacccgaacctgggctttgcccacctacaacaaccacctctacaagcaaatctccagtcagtcagcaggtagcaccaacgacaacgtctacttcggctacagcaccccctgggggtattttgacttcaacagattccactgtcacttctcaccacgtgactggcagcggctcatcaacagcaactggggattccggcccaagaagctcaacttcaagctgttcaacatccaggtcaaggaggtcacaacgaatgacggcgtcacgaccatcgccaataaccttaccagcacggttcaggtcttttcggactcggaataccagctgccctacgtcctcggctccgcacaccagggctgcctgcctccgttcccggcggacgtcttcatgattccccagtacggctacctgactctgaacaatggcagccaatcggtgggtcgttcctctttctactgcctggaatatttcccttctcaaatgctgagaacgggcaacaacttcaccttcagctacaccttcgaggacgttcccttccacagcagctacgcacacagccagagcctggaccggctgatgaatcctcttatcgaccagtacctgtattacctggccagaacacagagcaacgcaggaggcacagctggcaatcgggaactgcagttttatcagggcgggcctaccaccatggccgaacaagccaaaaactggctgcctggaccttgcttccggcaacaaagagtctccaagacgctggatcaaaacaacaacagcaactttgcttggactggtgccaccaaataccatctaaatggaagaaattcattggttaatcccggtgtcgccatggcaacccacaaggacgacgaggaacgcttcttcccttcgagcggagtcctgatttttggaaaaactggagcagctaataagactacactggaaaatgtgttaatgacaaatgaagaggaaattcgtcctaccaacccggtagccaccgaggaatacgggactgttagcagcaacctgcaggcggctaacactgcagcccagacacaagttgtcaacaaccagggagccttacctggtatggtctggcagaaccgggacgtgtacctgcagggtcccatctgggccaagattcctcacacggacggcaactttcacccgtctccgctgatgggcggctttggactgaagcatccgcctcctcagatcctgatcaaaaacactcctgttcctgctaatcccccggaggtgtttacgcctgccaagtttgcttctttcatcacacagtacagcaccggccaggtcagcgtggagatcgagtgggagctgcagaaggagaacagcaagcgctggaacccagagattcagtatacctccaattttgacaaacagactggtgtggactttgccgttgacagccagggtgtttattctgagcctcgccccattggtactcgttacctcacccgtaatctgtaa

SEQ ID NO: 456 - DNA, 2217 bp, Adeno-associated virus
  source 1..2217: mol_type = genomic DNA
atggctgccgatggttatcttccagattggctcgaggacaacctctctgagggcattcgcgagtggtgggacctgaaacctggagccccgaaacccaaagccaaccagcaaaagcaggacgacggccggggtctggtgcttcctggctacaagtacctcggacccttcaacggactcgacaagggggagcccgtcaacgcggcggacgcagcggccctcgagcacgacaaggcctacgaccagcagctcaaagcgggtgacaatccgcacctgcggtataatcacgccgacgccgagtttcaggagcgtctgcaagaagatacgtcttttgggggcaacctcgggcgagcagtcttccaggccaagaagcgggttctcgaacctctcggtctggttgaggaaggcgctaagacggctcctggaaagaagagaccggtagagccgtcaccacagcgttcccccgactcctccacgggcatcggcaagaaaggccagcagcccgccagaaagagactcaatttcggtcagactggcgactcagagtcagtccccgaccctcaacttatcggagaacctccagcagcgccctctagtgtgggatctggtacaatggctgcaggcggtggcgcaccaatggcagacaataacgaaggtgccgacggagtgggtagttcctcgggaaattggcattgcgattccacatggctgggcgacagagtcatcaccaccagcacccgaacctgggccctgcccacctacaacaaccacctctacaagcaaatctccaacgggacctcgggaggcagcaccaacgacaacacctactttggctacagcaccccctgggggtattttgactttaacagattccactgccacttctcaccacgtgactggcagcgactcatcaacaacaactggggattccggcccaagagactcagcttcaagctcttcaacatccaggtcaaagaggtcacgcagaatgaaggcaccaagaccatcgccaataacctcaccagcaccatccaggtgtttacggactcggagtaccagctgccgtacgtcctcggctctgcccaccagggctgcctgcctccgttcccggcggacgtcttcatgattcctcagtacggcaacctgactctcaacaacggtagtcaggccgtgggacgttcctccttctactgcctggagtacttcccctctcagatgctgagaacgggcaacaacttttccttcagctacactttcgaggacgtgcctttccacagcagctacgcgcacagccagagtttggacaggctgatgaatcctctcatcgaccagtacctgtactacctgtcaagaacccagtctacgggaggcacagcgggaacccagcagttgctgttttctcaggccgggcctagcaacatgtcggctcaggccagaaactggctgcctggaccctgctacagacagcagcgcgtctccacgacactgtcgcaaaacaacaacagcaactttgcctggactggtgccaccaagtatcatctgaacggcagagactctctggtgaatccgggcgtcgccatggcaaccaacaaggacgacgaggaccgcttcttcccatccagcggcatcctcatgtttggcaagcagggagctggaaaagacaacatgggctatagcaacgtgatgctaaccagcgaggaagaaatcaagaccaccaaccccgtggccacagaacagtatggcgtggtggctgataacctacagcagcaaaacaccgctcctattgtgggggccgtcaacagccagggagccttacctggcatggtctggcagaaccgggacgtgtacctgcagggtcctatttgggccaagattcctcacacagatggcaactttcacccgtctcctttaatgggcggctttggacttaaacatccgcctcctcagatcctcatcaaaaacactcctgttcctgcggatcctccaacagcgttcaaccaggccaagctgaattctttcatcacgcagtacggcaccggacaagtcagcgtggagatcgagtgggagctgcagaaggagaacagcaagcgctggaacccagagattcagtatacttccaactactacaaatctacaaatgtggactttgctgttaatactgagggtgtttactctgagcctcgccccattggcactcgttacctcacccgtaatctgtaa

SEQ ID NO: 457 - protein, 738 aa, Adeno-associated virus
MAADGYLPDWLEDNLSEGIREWWDLKPGAPKPKANQQKQDDGRGLVLPGYKYLGPFNGLDKGEPVNAADAAALEHDKAYDQQLKAGDNPHLRYNHADAEFQERLQEDTSFGGNLGRAVFQAKKRVLEPLGLVEEGAKTAPGKKRPVEPSPQRSPDSSTGIGKKGQQPARKRLNFGQTGDSESVPDPQLIGEPPAAPSSVGSGTMAAGGGAPMADNNEGADGVGSSSGNWHCDSTWLGDRVITTSTRTWALPTYNNHLYKQISNGTSGGSTNDNTYFGYSTPWGYFDFNRFHCHFSPRDWQRLINNNWGFRPKRLSFKLFNIQVKEVTQNEGTKTIANNLTSTIQVFTDSEYQLPYVLGSAHQGCLPPFPADVFMIPQYGNLTLNNGSQAVGRSSFYCLEYFPSQMLRTGNNFSFSYTFEDVPFHSSYAHSQSLDRLMNPLIDQYLYYLSRTQSTGGTAGTQQLLFSQAGPSNMSAQARNWLPGPCYRQQRVSTTLSQNNNSNFAWTGATKYHLNGRDSLVNPGVAMATNKDDEDRFFPSSGILMFGKQGAGKDNMGYSNVMLTSEEEIKTTNPVATEQYGVVADNLQQQNTAPIVGAVNSQGALPGMVWQNRDVYLQGPIWAKIPHTDGNFHPSPLMGGFGLKHPPPQILIKNTPVPADPPTAFNQAKLNSFITQYGTGQVSVEIEWELQKENSKRWNPEIQYTSNYYKSTNVDFAVNTEGVYSEPRPIGTRYLTRNL

SEQ ID NO: 458 - DNA, 2217 bp, Adeno-associated virus
  source 1..2217: mol_type = genomic DNA
atggctgccgatggttatcttccagattggctcgaggacaacctctctgagggcattcgcgagtggtgggacctgaaacctggagccccgaaacccaaagccaaccagcaaaagcaggacgacggccggggtctggtgcttcctggctacaagtacctcggacccttcaacggactcgacaagggggagcccgtcaacgcggcggacgcagcggccctcgagcacgacaaggcctacgaccagcagctcaaagcgggtgacaatccgtacctgcggtataatcacgccgacgccgagtttcaggagcgtctgcaagaagatacgtcttttgggggcaacctcgggcgagcagtcttccaggccaagaagcgggttctcgaacctctcggtctggttgaggaaggcgctaagacggctcctggaaagaagagaccggtagagccgtcaccacagcgttcccccgactcctccacgggcatcggcaagaaaggccagcagcccgccggaaagagactcaatttcggtcagactggcgactcagagtcagtccccgaccctcaacctatcggagaacctccagcagcgccctctagtgtgggatctggtacaatggctgcaggcggtggcgcaccaatggcagacaataacgaaggtgccgacggagtgggtagttcctcgggaaattggcattgcgattccacatggctgggcgacagagtcatcaccaccagcacccgaacctgggccctgcccacctacaacaaccacctctacaagcaaatctccaacgggacctcgggaggcagcaccaacgacaacacctactttggctacagcaccccctgggggtattttgactttaacagattccactgccacttctcaccacgtgactggcagcgactcatcaacaacaactggggattccggcccaagagactcagcttcaagctcttcaacatccaggtcaaagaggtcacgcagaatgaaggcaccaagaccatcgccaataacctcaccagcaccatccaggtgtttacggactcggaataccagctgccgtacgtcctcggctctgcccaccagggctgcctgcctccgttcccggcggacgtcttcatgattcctcagtacggctacctgactctcaacaacggtagtcaggccgtgggacgttcctccttctactgcctggagtacttcccctctcagatgctgagaacgggcaacaacttttccttcagctacactttcgaggacgtgcctttccacagcagctacgcgcacagccagagtttggacaggctgatgaatcctctcgtcgaccagtacctgtactacctgtcaagaacccagtctacgggaggcacagcgggaacccagcagttgctgttttctcaggccgggcctagcaacatgtcggctcaggccagaaactggctgcctggaccctgctacagacagcagcgcgtctccacgacactgtcgcaaaacaacaacagcaactttgcctggactggtgccaccaagtatcatctgaacggcagagactctctggtgaatccgggcgtcgccatggcaaccaacaaggacgacgaggaccgcttcttcccatccagcggcatcctcatgtttggcaagcagggagctggaaaagacaacgtggactatagcaacgtgatgctaaccagcgaggaagaaatcaagaccaccaaccccgtggccacagaacagtatggcgtggtggctgataacctacagcagcaaaacaccgctcctattgtgggggccgtcaacagccagggagccttacctggcatggtctggcagaaccgggacgtgtacctgcagggtcctatttgggccaagattcctcacacagatggcaactttcacccgtctcctttaatgggcggctttggacttaaacatccgcctcctcagatcctcatcaaaaacactcctgttcctgcggatcctccaacagcgttcaaccaggccaagctgaattctttcatcacgcagtacagcaccggacaagtcagcgtggagatcgagtgggagctgcagaaggagaacagcaagcgctggagcccagagattcagtatacttccaactactacaaatctacaaatgtggactttgctgttaatactgagggtgtttactctgagcctcgccccattggcactcgttacctcacccgtaatctgtaa

SEQ ID NO: 459 - protein, 738 aa, Adeno-associated virus
MAADGYLPDWLEDNLSEGIREWWDLKPGAPKPKANQQKQDDGRGLVLPGYKYLGPFNGLDKGEPVNAADAAALEHDKAYDQQLKAGDNPYLRYNHADAEFQERLQEDTSFGGNLGRAVFQAKKRVLEPLGLVEEGAKTAPGKKRPVEPSPQRSPDSSTGIGKKGQQPAGKRLNFGQTGDSESVPDPQPIGEPPAAPSSVGSGTMAAGGGAPMADNNEGADGVGSSSGNWHCDSTWLGDRVITTSTRTWALPTYNNHLYKQISNGTSGGSTNDNTYFGYSTPWGYFDFNRFHCHFSPRDWQRLINNNWGFRPKRLSFKLFNIQVKEVTQNEGTKTIANNLTSTIQVFTDSEYQLPYVLGSAHQGCLPPFPADVFMIPQYGYLTLNNGSQAVGRSSFYCLEYFPSQMLRTGNNFSFSYTFEDVPFHSSYAHSQSLDRLMNPLVDQYLYYLSRTQSTGGTAGTQQLLFSQAGPSNMSAQARNWLPGPCYRQQRVSTTLSQNNNSNFAWTGATKYHLNGRDSLVNPGVAMATNKDDEDRFFPSSGILMFGKQGAGKDNVDYSNVMLTSEEEIKTTNPVATEQYGVVADNLQQQNTAPIVGAVNSQGALPGMVWQNRDVYLQGPIWAKIPHTDGNFHPSPLMGGFGLKHPPPQILIKNTPVPADPPTAFNQAKLNSFITQYSTGQVSVEIEWELQKENSKRWSPEIQYTSNYYKSTNVDFAVNTEGVYSEPRPIGTRYLTRNL

SEQ ID NO: 460 - DNA, 2217 bp, Adeno-associated virus
  source 1..2217: mol_type = genomic DNA
atggttgccgatggttatcttccagattggctcgaggacaacctctctgagggcattcgcgagtggtgggacctgaaacctggagccccgaaacccaaagccaaccagcaaaagcagggcgacggccggggtctggtgcttcctggctacaagtacctcggacccttcaacggactcgacaagggggagcccgtcaacgcggcggacgcagcggccctcgagcacgacaaggcctacgaccagcagcttaaagcgggtgacaatccgtacctgcggtataatcacgccgacgccgagcttcaggagcgtctgcaagaagatacgtcttttgggggcaacctcgggcgagcagtcttccaggccaagaagcgggttctcgaacctctcggtctggttgaggaaggcgctaagacggctcctggaaagaagagaccggtagagccgtcaccacagcgttcccccgactcctccacgggcatcggcaagaaaggccagcagcccgccagaaagagactcaatttcggtcagactggcgactcagagtcagtccccgaccctcaacctatcggagaacctccagcagcgccctctagtgtgggatctggtacaatggctgcaggcggtggcgcgccaatggcagacaataacgaaggtgccgacggagtgggtagttcctcgggaaattggcattgcgattccacatggctgggcgacagagtcatcaccaccagcacccgaacctgggccctgcccacctacaacaaccacctctacaagcaaatctccaacgggacctcgggaggcagcaccaacgacaacacctactttggctacagcaccccctgggggtattttgactttaacagattccactgccacttctcaccacgtgactggcagcgactcatcaacaacaactggggattccggcccaagagactcagcttcaagctcttcaacatccaggtcaaagaggtcacgcagaatgaaggcaccaagaccatcgccaataacctcaccagcaccatccaggtgtttacggactcggaataccagctgccgtacgtcctcggctctgcccaccagggctgccagcctccgttcccggcggacgtcttcatgattcctcagtacggctacctgactctcaacaacggtagtcaggccgtgggacgttcctccttctactgcctggagtacttcccctctcagatgctgagaacgggcaacaacttttccttcagctacactttcgaggacgtgcctttccacagcagctacgcgcacagccagagtttggacaggctgatgaatcctctcatcgaccagtacctgtactacctgtcaagaacccagtctacgggaggcacagcgggaacccagcagttgctgttttctcaggccgggcctagcaacatgtcggctcaggccagaaactggctgcctggaccctgctacagacagcagcgcgtctccacgacactgtcgcaaaacaacaacagcaactttgcctggactggtgccaccaagtatcatctgaacggcagagactctctggtgaatccgggcgtcgccatggcaaccaacaaggacgacgaggaccgcttcttcccatccagcggcatcctcatgtttggcaagcagggagctggaaaagacaacgtggactatagcaacgtgatgctaaccagcgaggaagaaatcaagaccaccaaccccgtggccacagaacagtatggcgtggtggctgataacctacagcagcaaaacaccgctcctattgtgggggccgtcaacagccagggagccttacctggcatggtctggcagaaccgggacgtgtacctgcagggtcctatttgggccaagattcctcacacagatggcaactttcacccgtctcctttaatgggcggctttggacttaaacatccgcctcctcagatcctcatcaaaaacactcctgttcctgcggatcctccaacagcgttcaaccaggccaagctgaattctttcatcacgcagtacagcaccggacaagtcagcgtggagatcgagtgggagccgcagaaggagaacagcaagcgctggaacccagagattcagtatacttccaactactacaaatctacaaatgtggactttgctgttaatactgagggtgtttactctgagcctcgccccattggcactcgttacctcacccgtaatctgtaa

SEQ ID NO: 461 - protein, 738 aa, Adeno-associated virus
MVADGYLPDWLEDNLSEGIREWWDLKPGAPKPKANQQKQGDGRGLVLPGYKYLGPFNGLDKGEPVNAADAAALEHDKAYDQQLKAGDNPYLRYNHADAELQERLQEDTSFGGNLGRAVFQAKKRVLEPLGLVEEGAKTAPGKKRPVEPSPQRSPDSSTGIGKKGQQPARKRLNFGQTGDSESVPDPQPIGEPPAAPSSVGSGTMAAGGGAPMADNNEGADGVGSSSGNWHCDSTWLGDRVITTSTRTWALPTYNNHLYKQISNGTSGGSTNDNTYFGYSTPWGYFDFNRFHCHFSPRDWQRLINNNWGFRPKRLSFKLFNIQVKEVTQNEGTKTIANNLTSTIQVFTDSEYQLPYVLGSAHQGCQPPFPADVFMIPQYGYLTLNNGSQAVGRSSFYCLEYFPSQMLRTGNNFSFSYTFEDVPFHSSYAHSQSLDRLMNPLIDQYLYYLSRTQSTGGTAGTQQLLFSQAGPSNMSAQARNWLPGPCYRQQRVSTTLSQNNNSNFAWTGATKYHLNGRDSLVNPGVAMATNKDDEDRFFPSSGILMFGKQGAGKDNVDYSNVMLTSEEEIKTTNPVATEQYGVVADNLQQQNTAPIVGAVNSQGALPGMVWQNRDVYLQGPIWAKIPHTDGNFHPSPLMGGFGLKHPPPQILIKNTPVPADPPTAFNQAKLNSFITQYSTGQVSVEIEWEPQKENSKRWNPEIQYTSNYYKSTNVDFAVNTEGVYSEPRPIGTRYLTRNL

SEQ ID NO: 462 - DNA, 2217 bp, Adeno-associated virus
  source 1..2217: mol_type = genomic DNA
atggctgccgatggttatcttccagattggctcgaggacaacctctctgagggcattcgcgagtggtgggacctgaaacctggagccccgaaacccaaagccaaccagcaaaagcaggacgacggccggggtctggtgcttcctggctacaagtacctcggacccttcaacggactcgacaagggggagcccgtcaacgcggcggacgcagcggccctcgagcacgacaaggcctacgaccagcagctcaaagcgggtgacaatccgtacctgcggtataatcacgccgacgccgagtttcaggagcgtctgcaagaagatacgtcttttgggggcaacctcgggcgagcagtcttccaggccaagaagcgggttctcgaacctctcggtctggttgaggaaggcgctaagacggctcctggaaagaagagaccggtagagccgtcaccacagcgttcccccgactcctccacgggcatcggcaagaaaggccagcagcccgccagaaagagactcaatttcggtcagactggcgactcagagtcagtccccgaccctcaacctatcggagaacctccagcagcgccctctagtgtgggatctggtacaatggctgcaggcggtggcgcaccaatggcagacaataacgaaggtgccgacggagtgggtagttcctcgggaaattggcattgcgattccacatggctgggcgacagagtcatcaccaccagcacccgaacctgggccctgcccacctacaacaaccacctctacaagcaaatctccaacgggacctcgggaggcagcaccaacgacaacacctactttggctacagcaccccctgggggtattttgactttaacagattccactgccacttctcaccacgtgactggcagcgactcatcaacaacaactggggattccggcccaagagactcagcttcaagctcttcaacatccaggtcaaagaggtcacgcagaatgaaggcaccaagaccatcgccaatagcctcaccagcaccatccaggtgtttacggactcggaataccagctgccgtacgtcctcggctctgcccaccagggctgcctgcctccgttcccggcggacgtcttcatgattcctcagtacggctacctgactcccaacaacggtagtcaggccgtgggacgttcctccttctactgcctggagtacttcccctctcagatgctgagaacgggcaacaacttttccttcagctacactttcgaggacgtgcctttccacagcagctacgcgcacagccagagtttggacaggctgatgaatcctctcatcgaccagtacctgtactacctgtcaagaacccagtctacgggaggcacagcgggaacccagcagttgctgtcttctcaggccgggcctagcaacatgtcggctcaggccagaaactggctgcctggaccctgctacagacagcagcgcgtctccacgacactgtcgcaaaacaacaacagcaactttgcctggactggtgccaccaagtatcatctgaacggcagagactctctggtgaatccgggcgtcgccatggcaaccaacaaggacgacgaggaccgcttcttcccatccagcggcatcctcatgtttggcaagcagggagctggaaaagacaacgtggactatagcaacgtgatgctaaccagcgaggaagaaatcaagaccaccaaccccgtggccacagaacagtatggcgtggtggctgataacctacagcagcaaaacaccgctcctattgtgggggccgtcaacagccagggagccttacctggcatggtctggcagaaccgggacgtgtacttgcagggtcctatttgggccaagattcctcacacagatggcaactttcacccgtctcctttaatgggcggctttggacttaaacatccgcctcctcagatcctcatcaaaaacactcctgttcctgcggatcctccaacagcgttcaaccaggccaagctgaattctttcatcacgcagtacagcaccggacaagtcagcgtggagatcgagtgggagctgcagaaggagaacagcaagcgctggaacccagagattcagtatacttccaactactacaaatctacaaatgtggactttgctgttaatactgagggtgtttactctgagcctcgccccattggcactcgttacctcacccgtaatctgtaa

SEQ ID NO: 463 - protein, 738 aa, Adeno-associated virus
MAADGYLPDWLEDNLSEGIREWWDLKPGAPKPKANQQKQDDGRGLVLPGYKYLGPFNGLDKGEPVNAADAAALEHDKAYDQQLKAGDNPYLRYNHADAEFQERLQEDTSFGGNLGRAVFQAKKRVLEPLGLVEEGAKTAPGKKRPVEPSPQRSPDSSTGIGKKGQQPARKRLNFGQTGDSESVPDPQPIGEPPAAPSSVGSGTMAAGGGAPMADNNEGADGVGSSSGNWHCDSTWLGDRVITTSTRTWALPTYNNHLYKQISNGTSGGSTNDNTYFGYSTPWGYFDFNRFHCHFSPRDWQRLINNNWGFRPKRLSFKLFNIQVKEVTQNEGTKTIANSLTSTIQVFTDSEYQLPYVLGSAHQGCLPPFPADVFMIPQYGYLTPNNGSQAVGRSSFYCLEYFPSQMLRTGNNFSFSYTFEDVPFHSSYAHSQSLDRLMNPLIDQYLYYLSRTQSTGGTAGTQQLLSSQAGPSNMSAQARNWLPGPCYRQQRVSTTLSQNNNSNFAWTGATKYHLNGRDSLVNPGVAMATNKDDEDRFFPSSGILMFGKQGAGKDNVDYSNVMLTSEEEIKTTNPVATEQYGVVADNLQQQNTAPIVGAVNSQGALPGMVWQNRDVYLQGPIWAKIPHTDGNFHPSPLMGGFGLKHPPPQILIKNTPVPADPPTAFNQAKLNSFITQYSTGQVSVEIEWELQKENSKRWNPEIQYTSNYYKSTNVDFAVNTEGVYSEPRPIGTRYLTRNL

SEQ ID NO: 464 - protein, 738 aa, Adeno-associated virus
MAADGYLPDWLEDNLSEGIREWWDLKPGAPKPKANQQKQDDGRGLVLPGYKYLGPFNGLDKGEPVNAADAAALEHDKAYDQQLKAGDNPYLRYNHADAEFQERLQEDTSFGGNLGRAVFQAKKRVLEPLGLVEEGAKTAPGKKRPVEPSPQRSPDSSTGIGKKGQQPARKRLNFGQTGDSESVPDPQPIGEPPAAPSSVGSGTMAAGGGAPMADNNEGADGVGSSSGNWHCDSTWLGDRVITTSTRTWALPTYNNHLYKQISNGTSGGSTNDNTYFGYSTPWGYFDFNRFHCHFSPRDWQRLINNNWGFRPKRLSFKLFNIQVKEVTQNEGTKTIANNLTSTIQVFTDSEYQLPYVLGSAHQGCLPPFPADVFMIPQYGYLTLNNGSQAVGRSSFYCLEYFPSQMLRTGNNFSFSYTFEDVPFHSSYVHSQSLDRLMNPLIDQYLYYLSRTQSTGGTAGTQQLLFSQAGPSNMSAQARNWLPGPCYRQQRVSTTLSQNNNSNFAWTGATKYHLNGRDSLVNSGVAMATNKDDEDRFFPSSGILMFGKQGAGKDNVDYSNVMLTSEEEIKTTNPVATEQYGVVADNLQQQNTAPIVGAVNSQGALPGMVWQNRDVYLQGPIWAKIPHTDGNFHPSPLMGGFGLKHPPPQILIKNTPVPADPPTAFNQAKLNSFITQYSTGQVSVEIEWELQKENSKRWNPEIQYTSNYYKSTNVDFAVNTEGVYSEPRPIGTRYPTRNL

SEQ ID NO: 465 - DNA, 2217 bp, Adeno-associated virus
  source 1..2217: mol_type = genomic DNA
atggctgccgatggttatcttccagattggctcgaggacaacctctctgagggcattcgcgagtggtgggacctgaaacctggagccccgaaacccaaagccaaccagcaaaagcaggacgacggccggggtctggtgcttcctggctacaagtacctcggacccttcaacggactcgacaagggggagcccgtcaacgcggcggacgcagcggccctcgagcacgacaaggcctacgaccagcagctcaaagcgggtgacaatccgtacctgcggtataatcacgccgacgccgagtttcaggagcgtctgcaagaagatacgtcttttgggggcaacctcgggcgagcagtcttccaggccaagaagcgggttctcgaacctctcggtctggttgaggaaggcgctaagacggctcctggaaagaagagaccggtagagccgtcaccacagcgttcccccgactcctccacgggcatcggcaagaaaggccagcagcccgccagaaagagactcaatttcggtcagactggcgactcagagtcagtccccgaccctcaacctatcggagaacctccagcagcgccctctagtgtgggatctggtacaatggctgcaggcggtggcgcaccaatggcagacaataacgaaggtgccgacggagtgggtagttcctcgggaaattggcattgcgattccacatggctgggcgacagagtcatcaccaccagcacccgaacctgggccctgcccacctacaacaaccacctctacaagcaaatctccaacgggacctcgggaggcagcaccaacgacaacacctactttggctacagcaccccctgggggtattttgactttaacagattccactgccacttctcaccacgtgactggcagcgactcatcaacaacaactggggattccggcccaagagactcagcttcaagctcttcaacatccaggtcaaagaggtcacgcagaatgaaggcaccaagaccatcgccaataacctcaccagcaccatccaggtgtttacggactcggaataccagctgccgtacgtcctcggctctgcccaccagggctgcctgcctccgttcccggcggacgtcttcatgattcctcagtacggctacctgactctcaacaacggtagtcaggccgtgggacgttcctccttctactgcctggagtacttcccctctcagatgctgagaacgggcaacaacttttccttcagctacactttcgaggacgtgcctttccacagcagctacgtgcacagccagagtttggacaggctgatgaatcctctcatcgaccagtacctgtactacctgtcaagaacccagtctacgggaggcacagcgggaacccagcagttgctgttttctcaggccgggcctagcaacatgtcggctcaggccagaaactggctgcctggaccctgctacagacagcagcgcgtctccacgacactgtcgcaaaacaacaacagcaactttgcctggactggtgccaccaagtatcatctgaacggcagagactctctggtgaattcgggcgtcgccatggcaaccaacaaggacgacgaggaccgcttcttcccatccagcggcatcctcatgtttggcaagcagggagctggaaaagacaacgtggactatagcaacgtgatgctaaccagcgaggaagaaatcaagaccaccaaccccgtggccacagaacagtatggcgtggtggctgataacctacagcagcaaaacaccgctcctattgtgggggccgtcaacagccagggagccttacctggcatggtctggcagaaccgggacgtgtacctgcagggtcctatttgggccaagattcctcacacagatggcaactttcacccgtctcctttaatgggcggctttggacttaaacatccgcctcctcagatcctcatcaaaaacactcctgttcctgcggatcctccaacagcgttcaaccaggccaagctgaattctttcatcacgcagtacagcaccggacaagtcagcgtggagatcgagtgggagctgcagaaggagaacagcaagcgctggaacccagagattcagtatacttccaactactacaaatctacaaatgtggactttgctgttaatactgagggtgtttactctgagcctcgccccattggcactcgttaccccacccgtaatctgtaa

SEQ ID NO: 466 - protein, 734 aa, Adeno-associated virus; identical to SEQ ID NO: 291

SEQ ID NO: 467 - DNA, 2214 bp, Adeno-associated virus
  source 1..2214: mol_type = genomic DNA
atggctgctgacggttatcttccagattggctcgaggacaacctctctgagggcattcgcgagtggtgggacctgaaacctggagccccgaaacccaaagccaaccagcagaagcaggacgacggccggggtctggtgcttcctggctacaagtacctcggacccttcaacggactcgacaagggggagcccgtcaacgcggcggacgcagcggccctcgagcacgacaaggcctacgaccagcagctcaaagcgggtgacaatccgtacctgcggtataaccacgccgacgccgagtttcaggagcgtctgcaagaagatacgtcttttgggggcaacctcgggcgagcagtcttccaggccaagaagcgggttctcgaacctctcggtctggttgaggaagctgctaagacggctcctggaaagaagagaccggtagaaccgtcacctcagcgttcccccgactcctccacgggcatcggcaagaaaggccagcagcccgctagaaagagactgaactttgggcagactggcgactcagagtcagtccccgaccctcaacctctcggagaaccaccagcaggcccctctggtctgggatctggtacaatggctgcaggcggtggcgctccaatggcagacaataacgaaggcgccgacggagtgggtaatgcctcaggaaattggcattgcgattccacatggctgggcgacagagtcatcaccaccagcacccgaacctgggctttgcccacctacaacaaccacctctacaagcaaatctccagtcagtcagcaggtagcaccaacgacaacgtctacttcggctacagcaccccctgggggtattttgacttcaacagattccactgtcacttctcaccacgtgactggcagcgactcatcaacaacaactggggattccggcccaagaagctcaacttcaagctcttcaacatccaagtcaaggaggtcacgacgaatgacggcgtcacgaccatcgctaataaccttaccagcacggttcaggtcttttcggactcggagtaccagctgccgtacgtcctcggctctgcccaccagggctgcctgcctccgttcccggcggacgtcttcatgattcctcagtacggctacctgactctgaacaatggcagccaatcggtgggacgttcatccttctactgcctggaatacttcccttctcaggtgctgagaacgggtaacaacttcaccttcagttacaccttcgaggacgtgcctttccacagcagctacgcgcacagccagagcctagaccggctgatgaatcccctcatcgaccagtacctgtattacctggctagaacacagagtaacccaggaggcacatctggcaatcgggaactgcagttttaccagggcgggccttccaccatggccgaacaagccaagaactggttacctggaccttgcttccggcaacaaagagtttccaaaacactggatcaaaacaacaacagcaactttgcttggactggtgccaccaaatatcacctgaacggcagaaactcattggtgaatcctggtgtcgccatggcaactcacaaggacgacgaggaccgctttttcccatccagcggagtcctgatttttggaaaaactggagcaaccaacaagactacattggaaaacgtgttaatgacaaatgaagaagaaattcgtcctactaatcctgtggccacagaagaatacgggatagtcagcagcaatttacaagcggccaatactgcagcccagacacaagttgtcaacaaccagggagccttacctggcatggtctggcagaaccgggacgtgtacctgcagggtcccatctgggccaaaattcctcacacagacggcaactttcacccgtctccgctgatgggcggctttggactgaagcatccgcctcctcagatcctgatcaaaaacactcctgttcctgctaatcccccggaggtgtttacgcctgccaagtttgcttctttcatcacacagtacagcaccggccaggtcagcgtggagatcgagtgggagctgcagaaggagaacagcaagcgctggaacccagagattcagtatacctccaattttgacaaacagactggtgtggactttgccgttgacagccagggtgtttattctgagcctcgccccattggtactcgttacctcacccgtaatctgtaa

SEQ ID NO: 468 - protein, 737 aa, Adeno-associated virus
MAADGYLPDWLEDNLSEGIREWWDLKPGAPKPKANQQKQDDGRGLVLPGYKYLGPFNGLDKGEPVNAADAAALEHDKAYDQQLKAGDNPYLRYNHADAEFQERLQEDTSFGGNLGRAVFQAKKRVLEPLGLVEEAAKTAPGKKRPVEPSPQRSPDSSTGIGKKGQQPARKRLNFGQTGDSESVPDPQPLGEPPAGPSGLGSGTMAAGGGAPMADNNEGADGVGNASGNWHCDSTWLGDRVITTSTRTWALPTYNNHLYKQISSQSAGSTNDNVYFGYSTPWGYFDFNRFHCHFSPRDWQRLINNNWGFRPKKLNFKLFNIQVKEVTTNDGVTTIANNLTSTVQVFSDSEYQLPYVLGSAHQGCLPPFPADVFMIPQYGYLTLNNGSQSVGRSSFYCLEYFPSQVLRTGNNFTFSYTFEDVPFHSSYAHSQSLDRLMNPLIDQYLYYLARTQSNPGGTSGNRELQFYQGGPSTMAEQAKNWLPGPCFRQQRVSKTLDQNNNSNFAWTGATKYHLNGRNSLVNPGVAMATHKDDEDRFFPSSGVLIFGKTGATNKTTLENVLMTNEEEIRPTNPVATEEYGIVSSNLQAANTAAQTQVVNNQGALPGMVWQNRDVYLQGPIWAKIPHTDGNFHPSPLMGGFGLKHPPPQILIKNTPVPANPPEVFTPAKFASFITQYSTGQVSVEIEWELQKENSKRWNPEIQYTSNFDKQTGVDFAVDSQGVYSEPRPIGTRYLTRNL

SEQ ID NO: 469 - DNA, 2214 bp, Adeno-associated virus
  source 1..2214: mol_type = genomic DNA
atggctgccgatggttatcttccagattggctcgaggacaacctctctgagggcattcgcgagtggtgggacctgaaacctggagccccgaaacccaaagccaaccagcaaaagcaggacgacggccggggtctggtgcttcctggctacaagtacctcggacccttcaacggactcgacaagggggagcccgtcaacgcggcggacgcagcggccctcgagcacgacaaggcctacgaccagcagctcaaagcgggtgacaatccgtacctgcggtataatcacgccgacgccgagtttcaggagcgtctgcaagaagatacgtcttttgggggcaacctcgggcgagcagtcttccaggccaagaagcgggttctcgaacctctcggtctggttgaggaaggcgctaagacggctcctggaaagaagagaccggtagagccgtcaccacagcgttcccccgactcctccacgggcatcggcaagaaaggccagcagcccgccagaaagagactcaatttcggtcagactggcgactcagagtcagtccccgaccctcaacctatcggagaacctccagcagcgccctctagtgtgggatctggtacaatggctgcaggcggtggcgcaccaatggcagacaataacgaaggtgccgacggagtgggtagttcctcgggaaattggcattgcgattccacacggctgggcgacagagtcatcaccaccagcacccggacctgggctttgcccacctacaacaaccacctctacaagcaaatctccagtcagtcagcaggtagcaccaacgacaacgtctacttcggctacagcaccccctgggggtattttgacttcaacagattccactgtcacttctcaccacgtgactggcagcggctcatcaacaacaactggggattccggcccaagaagctcaacttcaagctgttcaacatccaggtcaaggaggtcacaacgaatgacggcgtcacgaccatcgccaataaccttaccagcacggttcaggtcttttcggactcggaataccagctgccctacgtcctcggctccgcacaccagggctgcctgcctccgttcccggcggacgtcttcatgattccccagtacggctacctgactctgaacaatggcagccaatcggtgggtcgttcctctttctactgcctggaatatttcccttctcaaatgctgagaacgggcaacaacttcaccttcagctacaccttcgaggacgttcccttccacagcagctacgcacacagccagagcctggaccggctgatgaatcctcttatcgaccagtacctgtattacctggccagaacacagagcaacgcaggaggcacagctggcaatcgggaactgcagttttatcagggcgggcctaccaccatggccgaacaagccaaaaactggctgcctggaccttgcttccggcaacgaagagtctccaagacgctggatcaaaacaacaacagcaactttgcttggactggtgccaccaaataccatctaaatggaagaaattcattggttaatcccggtgtcgccatggcaacccacaaggacgacgaggaacgcttcttcccttcgagcggagtcctgatttttggaaaaactggagcagctaataagactacactggaaaatgtgttaatgacaaatgaagaggaaattcgtcctaccaacccggtagccaccgaggaatacgggactgttagcagcaacctgcaggcggctaacactgcagcccagacacaagttgtcaacaaccagggagccttacctggtatggtctggcagaaccgggacgtgtacctgcagggtcccatctgggccaagattcctcacacggacggcaactttcacccgtctccgctgatgggcggctttggactgaagcatccgcctcctcagatcctgatcaaaaacactcctgttcctgctaatcccccggaggtgtttacgcctgccaagtttgcttctttcatcacacagtacagcaccggccaggtcagcgtggagatcgagtgggagctgcagaaggagaacagcaagcgctggaacccagagattcagtatacctccaattttgacaaacagactggtgtggactttgccgttgacagccagggtgtttattctgagcctcgccccattggtactcgttacctcacccgtaatctgtaa

SEQ ID NO: 470 - protein, 737 aa, Adeno-associated virus
MAADGYLPDWLEDNLSEGIREWWDLKPGAPKPKANQQKQDDGRGLVLPGYKYLGPFNGLDKGEPVNAADAAALEHDKAYDQQLKAGDNPYLRYNHADAEFQERLQEDTSFGGNLGRAVFQAKKRVLEPLGLVEEGAKTAPGKKRPVEPSPQRSPDSSTGIGKKGQQPARKRLNFGQTGDSESVPDPQPIGEPPAAPSSVGSGTMAAGGGAPMADNNEGADGVGSSSGNWHCDSTRLGDRVITTSTRTWALPTYNNHLYKQISSQSAGSTNDNVYFGYSTPWGYFDFNRFHCHFSPRDWQRLINNNWGFRPKKLNFKLFNIQVKEVTTNDGVTTIANNLTSTVQVFSDSEYQLPYVLGSAHQGCLPPFPADVFMIPQYGYLTLNNGSQSVGRSSFYCLEYFPSQMLRTGNNFTFSYTFEDVPFHSSYAHSQSLDRLMNPLIDQYLYYLARTQSNAGGTAGNRELQFYQGGPTTMAEQAKNWLPGPCFRQRRVSKTLDQNNNSNFAWTGATKYHLNGRNSLVNPGVAMATHKDDEERFFPSSGVLIFGKTGAANKTTLENVLMTNEEEIRPTNPVATEEYGTVSSNLQAANTAAQTQVVNNQGALPGMVWQNRDVYLQGPIWAKIPHTDGNFHPSPLMGGFGLKHPPPQILIKNTPVPANPPEVFTPAKFASFITQYSTGQVSVEIEWELQKENSKRWNPEIQYTSNFDKQTGVDFAVDSQGVYSEPRPIGTRYLTRNL

SEQ ID NO: 471 - DNA, 2208 bp, Adeno-associated virus
  source 1..2208: mol_type = genomic DNA
atggctgccgatggttatcttccagattggctcgaggacactctctctgaaggaataagacagtggtggaagctcaaacctggcccaccaccaccaaagcccgcagagcggcataaggacgacagcaggggtcttgtgcttcctgggtacaagtacctcggacccttcaacggactcgacaagggggagccggtcaacgaggcagacgccgcggccctcgagcacgacaaggcctacgaccggcagctcgacagcggagacaacccgtacctcaagtacaaccacgccgacgcggagtttcaggagcgtcttaaagaagatacgtcttttgggggcaacctcggacgagcagtcttccaggcgaaaaagagggttcttgaacctctgggcctggttgaggaacctgttaagacggctccgggaaaaaagaggccggtagagcactctcctgcggagccagactcctcctcgggaaccggaaaagcgggccagcagcctgcaagaaaaagattgaattttggtcagactggagacgcagactccgtacctgacccccagcctctcggacagccaccagcagccccctctggtttgggatctactacaatggctacaggcagtggcgcaccaatggcagacaataacgagggtgccgatggagtgggtaattcttcaggaaattggcattgcgattcccaatggctgggcgacagagtcatcaccaccagcacccgaacctgggcccagcccacctacaacaaccacctctacaagcaaatctcaagccaatcaggagcctcaaacgacaaccactactttggctacagcaccccttgggggtattttgacttcaacagattccactgccacttttcaccacgtgactggcaaagactcatcaacaacaactggggattccgacccaagagactcaacttcaagctctttaacattcaagtcaaagaggtcacgcagaatgacggtacgacgacgattgccaataaccttaccagcacggttcaggtgtttactgactcggagtaccagctcccgtacgtcctcgggtcggcgcatcaaggatgcctcccgccgtttccagcggacgtcttcatggtcccacagtatggatacctcaccctgaacaacgggagtcaggcggtaggacgctcttccttttactgcctggagtactttccttctcagatgcttcgtactggaaacaactttcagttcagctacacctttgaagacgttcctttccacagcagctacgctcacagccagagtctggatcggctgatgaatcctctgatcgaccagtacctgtattatctgaacaaaacacaatcaaatagtggagctcttcagcagtctcggctactgtttagtcaagctggacccaccagcatgtctcttcaagctaaaaactggctacctggaccttgctacagacagcagcgtctgtcaaagcaggcaaacgacaacaacaacagcaactttccctggactgcggctacaaagtaccacctaaatggccgggactcgttggttaatccaggaccagctatggccagtcacaaagacgatgaagaaaagtttttccccatgcatggaaccctgatatttggtaaacaaggaacaaatgctaacgacgcggatttggacaatgtcatgattacagatgaagaagaaatccgcaccaccaatcccgtggctacggagcagtacggatatgtgtcaaataatttgcaaaactcaaatactggtccaactactggaactgtcaatcaccgaggagcgttacctggcatggtgtggcaggatcgagacgtgtacctgcagggacccatttgggccaagattcctcacaccgatggacactttcatccttctccactgatgggaggttttgggctcaaacacccgcctcctcagatcatgatcaaaaacactcccgttccagccaatcctcccacaaacttcagttctgccaagtttgcttctttcatcacacagtattccacggggcaggtcagcgtggagatcgagtgggagctgcagaaagagaacagcaaacgctggaatcccgaaattcagtacacttccaactacaacaaatctgttaatgtggactttactgtggacactaatggcgtgtattcagagcctcgccccattggcaccagatacctgactcgtaatctgtaa

SEQ ID NO: 472 - protein, 735 aa, Adeno-associated virus
MAADGYLPDWLEDTLSEGIRQWWKLKPGPPPPKPAERHKDDSRGLVLPGYKYLGPFNGLDKGEPVNEADAAALEHDKAYDRQLDSGDNPYLKYNHADAEFQERLKEDTSFGGNLGRAVFQAKKRVLEPLGLVEEPVKTAPGKKRPVEHSPAEPDSSSGTGKAGQQPARKRLNFGQTGDADSVPDPQPLGQPPAAPSGLGSTTMATGSGAPMADNNEGADGVGNSSGNWHCDSQWLGDRVITTSTRTWAQPTYNNHLYKQISSQSGASNDNHYFGYSTPWGYFDFNRFHCHFSPRDWQRLINNNWGFRPKRLNFKLFNIQVKEVTQNDGTTTIANNLTSTVQVFTDSEYQLPYVLGSAHQGCLPPFPADVFMVPQYGYLTLNNGSQAVGRSSFYCLEYFPSQMLRTGNNFQFSYTFEDVPFHSSYAHSQSLDRLMNPLIDQYLYYLNKTQSNSGALQQSRLLFSQAGPTSMSLQAKNWLPGPCYRQQRLSKQANDNNNSNFPWTAATKYHLNGRDSLVNPGPAMASHKDDEEKFFPMHGTLIFGKQGTNANDADLDNVMITDEEEIRTTNPVATEQYGYVSNNLQNSNTGPTTGTVNHRGALPGMVWQDRDVYLQGPIWAKIPHTDGHFHPSPLMGGFGLKHPPPQIMIKNTPVPANPPTNFSSAKFASFITQYSTGQVSVEIEWELQKENSKRWNPEIQYTSNYNKSVNVDFTVDTNGVYSEPRPIGTRYLTRNL

SEQ ID NO: 473 - DNA, 2217 bp, Adeno-associated virus
  source 1..2217: mol_type = genomic DNA
atggctgccgatggttatcttccagattggctcgaggacaacctctctgagggcattcgcgagtggtgggcgctgaaacctggagccccgaagcccaaagccaaccagcaaaagcaggacgacggccggggtctggtgcttcctggctacaagtacctcggacccttcaacggactcgacaagggggagcccgtcaacgcggcggacgcagcggccctcgagcacgacaaggcctacgaccagcagctgcaggcgggtgacaatccgtacctgcggtataatcacgccgacgccgagtttcaggagcgtctgcaagaagatacgtcttttgggggcaacctcgggcgagcagtcttccaggccaagaagcgggttctcgaacctctcggtctggttgaggaaggcgctaagacggctcctggaaagaagagaccggtagagccgtcaccacagcgttcccccgactcctccacgggcatcggcaagaaaggccagcagcccgccagaaagagactcaatttcggtcagactggcgactcagagtcagtccccgaccctcaacctatcggagaacctccagcagcgccctctagtgtgggatctggtacaatggctgcaggcggtggcgcgccaatggcagacaataacgaaggtgccgacggagtgggtagttcctcgggaaattggcattgcgattccacatggctgggcgacagagtcatcaccaccagcacccgaacctgggccctgcccacctacaacaaccacctctacaagcaaacctccaacgggacctcgggaggcagcaccaacgacaacacctactttggctacagcaccccctgggggtattttgactttaacagattccactgccacttctcaccacgtgactggcagcgactcatcaacaacaactggggattccggcccaagagactcagcttcaagctcttcaacatccaggtcaaagaggtcacgcagaatgaaggcaccaagaccatcgccaataacctcaccagcaccatccaggtgtttacggactcggaataccagctgccgtacgtcctcggctctgcccaccagggctgcctgcctccgttcccggcggacgtcttcatgattcctcagtacggctacctgactctcaacaacggtagtcaggccgtgggacgttcctccttctactgcctggagtacttcccctctcagatgctgagaacgggcaacaacttttccttcagctacactttcgaggacgtgcctttccacagcagctacgcgcacagccagagtttggacaggctgatgaatcctctcatcgaccagtacctgtactacctgtcaagaacccagtctacgggaggcacagcgggaacccagcagttgctgttttctcaggccgggcctagcaacatgtcggctcaggccagaaactggctgcctggaccctgctacagacagcagcgcgtctccacgacactgtcgcaaaacaacaacagcaactttgcctggactggtgccaccaagtatcatctgaacggcagagactctctggtgaatccgggcgtcgccatggcaaccaacaaggacgacgaggaccgcttcttcccatccagcggcatcctcatgtttggcaagcagggagctggaaaagacaacgtggactatagcaacgtgatgctaaccagcgaggaagaaatcaagaccaccaaccccgtggccacagaacagtatggcgtggtggctgataacctacagcagcaaaacaccgctcctattgtgggggccgtcaacagccagggagccttacctggcatggtctggcagaaccgggacgtgtacctgcagggtcctatttgggccaagattcctcacacagatggcaactttcacccgtctcctttaatgggcggctttggacttaaacatccgcctcctcagatcctcatcaaaaacactcctgttcctgcggatcctccaacagcgttcaaccaggccaagctgaattctttcatcacgcagtacagcaccggacaagtcagcgcggagatcgagtgggagctgcagaaggagaacagcaagcgctggaacccagagattcagtatacttccaactactacaaatctacaaatgtggactttgctgttaatactgagggtgtttactctgagcctcgccccattggcactcgttacctcacccgtaatctgtaa

SEQ ID NO: 474 - protein, 738 aa, Adeno-associated virus
MAADGYLPDWLEDNLSEGIREWWALKPGAPKPKANQQKQDDGRGLVLPGYKYLGPFNGLDKGEPVNAADAAALEHDKAYDQQLQAGDNPYLRYNHADAEFQERLQEDTSFGGNLGRAVFQAKKRVLEPLGLVEEGAKTAPGKKRPVEPSPQRSPDSSTGIGKKGQQPARKRLNFGQTGDSESVPDPQPIGEPPAAPSSVGSGTMAAGGGAPMADNNEGADGVGSSSGNWHCDSTWLGDRVITTSTRTWALPTYNNHLYKQTSNGTSGGSTNDNTYFGYSTPWGYFDFNRFHCHFSPRDWQRLINNNWGFRPKRLSFKLFNIQVKEVTQNEGTKTIANNLTSTIQVFTDSEYQLPYVLGSAHQGCLPPFPADVFMIPQYGYLTLNNGSQAVGRSSFYCLEYFPSQMLRTGNNFSFSYTFEDVPFHSSYAHSQSLDRLMNPLIDQYLYYLSRTQSTGGTAGTQQLLFSQAGPSNMSAQARNWLPGPCYRQQRVSTTLSQNNNSNFAWTGATKYHLNGRDSLVNPGVAMATNKDDEDRFFPSSGILMFGKQGAGKDNVDYSNVMLTSEEEIKTTNPVATEQYGVVADNLQQQNTAPIVGAVNSQGALPGMVWQNRDVYLQGPIWAKIPHTDGNFHPSPLMGGFGLKHPPPQILIKNTPVPADPPTAFNQAKLNSFITQYSTGQVSAEIEWELQKENSKRWNPEIQYTSNYYKSTNVDFAVNTEGVYSEPRPIGTRYLTRNL

SEQ ID NO: 475 - DNA, 2217 bp, Adeno-associated virus
  source 1..2217: mol_type = genomic DNA
atggctgctgacggttatcttccagattggctcgaggacaacctctctgagggcattcgcgagtggtgggacctgaaacctggagcccccaagcccaaggccaaccagcagaagcaggacgacggccggggtctggtgcttcctggctacaagtacctcggacccttcaacggactcgacaagggggagcccgtcaacgcggcggacgcagcggccctcgagcacgacaaggcctacgaccagcagctcaaagcgggtgacaatccgtacctgcggtataatcacgccgacgccgagtttcaggagcgtctgcaagaagatacgtcttttgggggcaacctcgggcgagcagtcttccaggccaagaagcgggttctcgaacctctcggtctggttgaggaagctgctaagacggctcctggaaagaagagaccggtagaaccgtcacctcagcgttcccccgactcctccacgggcatcggcaagaaaggccagcagcccgctagaaagagactgaactttgggcagactggcgactcagagtcagtccccgaccctcaaccaatcggagaacctccagcagcgccctctagtgtgggatctggtacaatggccgcaggcggtggcgcaccaatggcagacaataacgaaggtgccgacggagtgggtagttcctcgggaaattggcattgcgattccacatggctgggcgacagagtcatcaccaccagcacccgaacctgggccctgcccacctacaacaaccacctctacaagcaaatctccaacgggacctcgggaggcagcaccaacgacaacacctactttggctacagcaccccctgggggtattttgactttaacagattccactgccacttctcaccacgtgactggcagcgactcatcaacaacaactggggattccggcccaagagactcagcttcaagctcttcaacatccaggtcaaagaggtcacgcagaatgaaggcaccaagaccatcgccaataacctcaccagcaccatccaggtgtttacggactcggaataccagctgccgtacgtcctcggctctgcccaccagggctgcctgcctccgttcccggcggacgtcttcatgattcctcagtacggctacctgactctcaacaacggtagtcaggccgtgggacgttcctccttctactgcctggagtacttcccctctcagatgctgagaacgggcaacaacttttccttcagctacactttcgaggacgtgcctttccacagcagctacgcgcacagccagagtttggacaggctgatgaatcctctcatcgaccagtacctgtactacctgtcaagaacccagtctacgggaggcacagcgggaacccagcagctgctgttttctcaggccgggcctagcaacatgtcggctcaggccagaaactggctgcctggaccctgctacagacagcagcgcgtctccacgacactgtcgcaaaacaacaacagcaactttgcctggactggtgccaccaagtatcatctgaacggcagagactctctggtgaatccgggcgtcgccatggcaaccaacaaggacgacgaggaccgcttcttcccatccagcggcatcctcatgtttggcaagcagggagctggaaaagacaacgtggactatagcaacgtgatgctaaccagcgaggaagaaatcaagaccaccaaccccgtggccacagaacagtatggcgtggtggctgataacctacagcagcaaaacaccgctcctattgtgggggccgtcaacagccagggagccttacctggcatggtctggcagaaccgggacgtgtacctgcagggtcctatttgggccaagattcctcacacagatggcaactttcacccgtctcctttaatgggcggctttggacttaaacatccgcctcctcagatcctcatcaaaagcactcctgttcctgcggatcctccaacagcgttcaaccaggccaagctgaattctttcatcacgcagtacagcaccggacaagtcagcgtggagatcgagtgggagctgcagaaggagaacagcaagtgctggaacccagagattcagtatacttccaactactacaaatctacaaatgtggactttgctgttaatactgagggtgtttactctgagcctcgccccattggcactcgttacctcacccgtaatctgtaa

SEQ ID NO: 476 - protein, 738 aa, Adeno-associated virus
MAADGYLPDWLEDNLSEGIREWWDLKPGAPKPKANQQKQDDGRGLVLPGYKYLGPFNGLDKGEPVNAADAAALEHDKAYDQQLKAGDNPYLRYNHADAEFQERLQEDTSFGGNLGRAVFQAKKRVLEPLGLVEEAAKTAPGKKRPVEPSPQRSPDSSTGIGKKGQQPARKRLNFGQTGDSESVPDPQPIGEPPAAPSSVGSGTMAAGGGAPMADNNEGADGVGSSSGNWHCDSTWLGDRVITTSTRTWALPTYNNHLYKQISNGTSGGSTNDNTYFGYSTPWGYFDFNRFHCHFSPRDWQRLINNNWGFRPKRLSFKLFNIQVKEVTQNEGTKTIANNLTSTIQVFTDSEYQLPYVLGSAHQGCLPPFPADVFMIPQYGYLTLNNGSQAVGRSSFYCLEYFPSQMLRTGNNFSFSYTFEDVPFHSSYAHSQSLDRLMNPLIDQYLYYLSRTQSTGGTAGTQQLLFSQAGPSNMSAQARNWLPGPCYRQQRVSTTLSQNNNSNFAWTGATKYHLNGRDSLVNPGVAMATNKDDEDRFFPSSGILMFGKQGAGKDNVDYSNVMLTSEEEIKTTNPVATEQYGVVADNLQQQNTAPIVGAVNSQGALPGMVWQNRDVYLQGPIWAKIPHTDGNFHPSPLMGGFGLKHPPPQILIKSTPVPADPPTAFNQAKLNSFITQYSTGQVSVEIEWELQKENSKCWNPEIQYTSNYYKSTNVDFAVNTEGVYSEPRPIGTRYLTRNL

SEQ ID NO: 477 - protein, 738 aa, Adeno-associated virus
MAADGYLPDWLEDNLSEGIREWWDLKPGAPKPKANQQKQDDGRGLVLPGYKYLGPFNGLDKGEPVNAADAAALEHDKAYDQQLKAGDNPYLRYNHADAEFQERLQEDTSFGGNLGRAVFQAKKRVLEPLGLVEEAAKTAPGKKRPVEPSPQRSPDSSTGIGKKGQQPARKRLNFGQTGDSESVPDPQPIGEPPAAPSSVGSGTMAAGGGAPMADNNEGADGVGSSSGNWHCDSTWLGDRVITTSTRTWALPTYNNHLYKQISNGTSGGSTNDNTYFGYSTPWGYFDFNRFHCHFSPRDWQRLINNNWGFRPKRLSFKLFNIQVKEVTQNEGTKTIANNLTSTIQVFTDSEYQLPYVLGSAHQGCLPPFPADVFMIPQYGYLTLNNGSQAVGRSSFYCLEYFPSQMLRTGNNFSFSYTFEDVPFHSSYAHSQSLDRLMNPLIDQYLYYLSRTQSTGGTAGTQQLLFSQAGPSNMSAQARNWLPGPCYRQQRVSTTLSQNNNSNFAWTGATKYHLNGRDSLVNPGVAMATNKDDEDRFFPSSGILMFGKQGAGKDNVDYSNVMLTSEEEIKTTNPVATEQYGVVADNLQQQNTAPIVGAVNSQGALPGMVWQNRDVYLQGPIWAKIPHTDGNFHPSPLMGGFGLKHPPPQILIKSTPVPADPPTAFNQAKLNSFITQYSTGQVSVEIEWELQKENSKRWNPEIQYTSNYYKSTNVDFAVNTEGVYSEPRPIGTRYLTRNL

SEQ ID NO: 478 - DNA, 2217 bp, Adeno-associated virus
  source 1..2217: mol_type = genomic DNA
atggctgctgacggttatcttccagattggctcgaggacaacctctctgagggcattcgcgagtggtgggacctgaaacctggagcccccaagcccaaggccaaccagcagaagcaggacgacggccggggtctggtgcttcctggctacaagtacctcggacccttcaacggactcgacaagggggagcccgtcaacgcggcggacgcagcggccctcgagcacgacaaggcctacgaccagcagctcaaagcgggtgacaatccgtacctgcggtataaccacgccgacgccgagtttcaggagcgtctgcaagaagatacgtcttttgggggcaacctcgggcgagcagtcttccaggccaagaagcgggttctcgaacctctcggtctggttgaggaagctgctaagacggctcctggaaagaagagaccggtagaaccgtcacctcagcgttcccccgactcctccacgggcatcggcaagaaaggccagcagcccgctagaaagagactgaactttgggcagactggcgactcagagtcagtccccgaccctcaaccaatcggagaaccaccagcaggcccctctggtctgggatctggtacaatggctgcaggcggtggcgcaccaatggctgacaataacgagggcgccgacggagtgggtaatgcctcaggaaattggcattgcgattccacatggctgggcgacagagtcatcaccaccagcacccgaacctgggctttgcccacctacaacaaccacctctacaagcaaatctccagtcagtcagcaggtagcaccaacgacaacgtctacttcggctacagcaccccctgggggtattttgacttcaacagattccactgtcacttctcaccacgtgactggcagcggctcatcaacaacaactggggattccggcccaagaagctcaacttcaagctgttcaacatccaggtcaaggaggtcacaacgaatgacggcgtcacgaccatcgccaataaccctaccagcacggttcaggtcttttcggactcggaataccagctgccctacgtcctcggctccgcacaccagggctgcctgcctccgttcccggcggacgtcttcatgattccccagtacggctacctgactctgaacaatggcagccaatcggtgggtcgttcctctttctactgcctggaatatttcccttctcaaatgctgagaacgggcaacaacttcaccttcagctacaccttcgaggacgttcccttccacagcagctacgcacacagccagagcctggaccggctgatgaatcctcttatcgaccagtacctgtattacctggccagaacacagagcaacgcaggaggcacagctggcaatcgggaactgcagttttatcagggcgggcctaccaccatggccgaacaagccaaaaactggctgcctggaccctgctacagacagcagcgcgtctccacgacactgtcgcaaaacaacaacagcaactttgcctggactggtgccaccaagtatcatctgaacggcagagactctctggtgaatccgggcgtcgccatggcaaccaacaaggacgacgaggaccgcttcttcccatccagcggcatcctcatgtttggcaagcagggagctggaaaagacaacgtggactatagcaacgtgatgctaaccagcgaggaagaaatcaagaccaccaaccccgtggccacagaacagtatggcgtggtggctgataacctacagcagcaaaacaccgctcctattgtgggggccgtcaacagccagggagccttacctggcatggtctggcagaaccgggacgtgtacctgcagggtcctatttgggccaagattcctcacacagatggcaactttcacccgtctcctttaatgggcggctttggacttaaacatccgcctcctcagatcctcatcaaaaacactcctgttcctgcggatcctccaacagcgttcaaccaggccaagctgaattctttcatcacgcagtacagcaccggacaagtcagcgtggagatcgagtgggagctgcagaaggagaacagcaagcgctggaacccagagattcagtatacttccaactactacaaatctacaaatgtggactttgctgttaatactgagggtgtttactctgagcctcgccccattggcactcgttacctcacccgtaatctgtaa

SEQ ID NO: 479 - protein, 738 aa, Adeno-associated virus
MAADGYLPDWLEDNLSEGIREWWDLKPGAPKPKANQQKQDDGRGLVLPGYKYLGPFNGLDKGEPVNAADAAALEHDKAYDQQLKAGDNPYLRYNHADAEFQERLQEDTSFGGNLGRAVFQAKKRVLEPLGLVEEAAKTAPGKKRPVEPSPQRSPDSSTGIGKKGQQPARKRLNFGQTGDSESVPDPQPIGEPPAGPSGLGSGTMAAGGGAPMADNNEGADGVGNASGNWHCDSTWLGDRVITTSTRTWALPTYNNHLYKQISSQSAGSTNDNVYFGYSTPWGYFDFNRFHCHFSPRDWQRLINNNWGFRPKKLNFKLFNIQVKEVTTNDGVTTIANNPTSTVQVFSDSEYQLPYVLGSAHQGCLPPFPADVFMIPQYGYLTLNNGSQSVGRSSFYCLEYFPSQMLRTGNNFTFSYTFEDVPFHSSYAHSQSLDRLMNPLIDQYLYYLARTQSNAGGTAGNRELQFYQGGPTTMAEQAKNWLPGPCYRQQRVSTTLSQNNNSNFAWTGATKYHLNGRDSLVNPGVAMATNKDDEDRFFPSSGILMFGKQGAGKDNVDYSNVMLTSEEEIKTTNPVATEQYGVVADNLQQQNTAPIVGAVNSQGALPGMVWQNRDVYLQGPIWAKIPHTDGNFHPSPLMGGFGLKHPPPQILIKNTPVPADPPTAFNQAKLNSFITQYSTGQVSVEIEWELQKENSKRWNPEIQYTSNYYKSTNVDFAVNTEGVYSEPRPIGTRYLTRNL

SEQ ID NO: 480 - DNA, 2208 bp, Adeno-associated virus
  source 1..2208: mol_type = genomic DNA
atggctgccgatggttatcttccagattggctcgaggacaacctctctgagggcattcacgagtggtgggacccgaaacctggagccccgaaacccaaagccaaccagcaaaagcaggacgacggccggggtctggtgcttcctggctacaagtacctcggacccttcaacggactcgacaagggggagcccgtcaacgcggcggacgcagcggccctcgagcacgacaaggcctacgaccagcagctcaaagcgggtgacaatccgtacctgcggtataatcacgccgacgccgagtttcaggagcgtctgcaagaagatacgtcttttgggggcaacctcgggcgagcagtcttccaggccaagaagcgggttctcgaacctctcggtctggttgaggaaggcgctaagacggctcctggaaagaagagaccggtagagccgtcaccacagcgttcccccgactcctccacgggcatcggcaagaaaggccagcagcccgccagaaagagactcaatttcggtcagactggcgactcagagtcagtccccgaccctcaacctatcggagaacctccagcagcgccctctagtgtgggatctggtacaatggctgcaggcggtggcgcaccaatggcagacaataacgaaggtgccgacggagtgggtagttcctcgggaaattggcattgcgattccacatggctgggcgacagagtcatcaccaccagcacccgaacctgggccctgcccacccacaacaaccacctctacaagcaaatctccaacgggacctcgggaggcagcaccaacgacaacgtctacttcggctacagcaccccctgggggtattttgacttcaacagattccactgtcacttctcaccacgtgaccggcagcgactcatcaacaacaactggggattccggcccaagagactcagcttcaagctcttcaacatccaggtcaaagaggtcacgcagaatgaaggcaccaagaccatcgccaataacctcaccagcaccatccaggtgtttacggactcggaataccagctgccgtacgtcctcggctctgcccaccagggctgcctgcctccgttcccggcggacgtcttcatgattcctcagtacggctacctgactctcaacaacggtagtcaggccgtgggacgttcctccttctactgcctggagtacttcccctctcagatgctgagaacgggcaacaacttttccttcagctacactttcgaggacgtgcctttccacagcagctacgcgcacagccagagtttggacaggctgatgaatcctctcatcgaccagtacctgtactacctgtcaagaacccagtctacggaaggcacagcgggaacccagcagttgctgttttctcaggccgggcctagcaacatgtcggctcaggccagaaactggctgcctggaccctgctacagacagcagcgcgtctccacgacactgtcgcaaaacaacaacagcaactttgcctggactggtgccaccaagtatcatctgaacggcagagactctctggtgaatccgggcgtcgccatggcaacccacaaggacgacgaggaacgcttcttcccttcgagcggagtcctgatttttggaaaaactggagcagctaataagactacactggaaaatgtgttaatgacaaatgaagaggaaattcgtcctaccaacccggtagccaccgaggaatacgggactgttagcagcaacctgcaggcggctaacactgcagcccagacacaagttgtcaacaaccagggagccttacctggtatggtctggcagaaccgggacgtgtacctgcagggtcccatctgggccaagattcctcacacggacggcaactttcacccgtctccgctgatgggcggctttggactgaagcatcctcagatcctgatcaaaaacactcctgttcctgctaatcccccggaggtgtttacgcctgccaagtttgcttctttcatcacacagtacagcaccggccaggtcagcgtggagatcgagtgggagctgcagaaggagaacagcaagcgctggaacccagagattcagtatacctccaattttgacaaacagactggtgtggactttgccgttgacagccagggtgtttattctgagcctcgccccattggtactcgttacctcacccgtaatctgtaa

SEQ ID NO: 481 - protein, 735 aa, Adeno-associated virus
MAADGYLPDWLEDNLSEGIHEWWDPKPGAPKPKANQQKQDDGRGLVLPGYKYLGPFNGLDKGEPVNAADAAALEHDKAYDQQLKAGDNPYLRYNHADAEFQERLQEDTSFGGNLGRAVFQAKKRVLEPLGLVEEGAKTAPGKKRPVEPSPQRSPDSSTGIGKKGQQPARKRLNFGQTGDSESVPDPQPIGEPPAAPSSVGSGTMAAGGGAPMADNNEGADGVGSSSGNWHCDSTWLGDRVITTSTRTWALPTHNNHLYKQISNGTSGGSTNDNVYFGYSTPWGYFDFNRFHCHFSPRDRQRLINNNWGFRPKRLSFKLFNIQVKEVTQNEGTKTIANNLTSTIQVFTDSEYQLPYVLGSAHQGCLPPFPADVFMIPQYGYLTLNNGSQAVGRSSFYCLEYFPSQMLRTGNNFSFSYTFEDVPFHSSYAHSQSLDRLMNPLIDQYLYYLSRTQSTEGTAGTQQLLFSQAGPSNMSAQARNWLPGPCYRQQRVSTTLSQNNNSNFAWTGATKYHLNGRDSLVNPGVAMATHKDDEERFFPSSGVLIFGKTGAANKTTLENVLMTNEEEIRPTNPVATEEYGTVSSNLQAANTAAQTQVVNNQGALPGMVWQNRDVYLQGPIWAKIPHTDGNFHPSPLMGGFGLKHPQILIKNTPVPANPPEVFTPAKFASFITQYSTGQVSVEIEWELQKENSKRWNPEIQYTSNFDKQTGVDFAVDSQGVYSEPRPIGTRYLTRNL

SEQ ID NO: 482 - protein, 738 aa, Adeno-associated virus
MAADGYLPDWLEDNLSEGIREWWDLKPGAPKPKANQQKQDDGRGLVLPGYKYLGPFNGLDKGEPVNAADAAALEHDKAYDQQLKAGDNPYLRYNHADAEFQERLQEDTSFGGNLGRAVFQAKKRVLEPLGLVEEGAKTAPGKKRPVEPSPQRSPDSSTGIGKKGQQPARKRLNFGQTGDSESVPDPQPIGEPPAAPSSVGSGTMAAGGGAPMADNNEGADGVGSSSGNWHCDSTWLGDRVITTSTRTWALPTYNNHLYKQISNGTSGGSTNDNTYFGYSTPWGYFDFNRFHCHFSPRDWQRPINNNWGFRPKRLSFKLFNIQVKEVTQNEGTKTIANNLTSTIQVFTDSEYQLPYVLGSAHQGCLPPFPADVFMIPQYGYLTLNNGSQAVGRSSFYCLEYFPSQMLRTGNNFSFSYPFEDVPFHSSYAHSQSLDRLMNPLIDQYLYYLSRTQSTGGTAGTQQLLFSQAGPSNMSAQARNWLPGPCYRQQRVSTTLSQNNNSNFAWTGATKYHLNGRDSLVNPGVAMATNKDDEDRFFPSSGILMFGKQGAGKDNVDYSNVMLTSEEEIKTTNPVATEQYGVVADNLQQQDTAPIVGAVNSQGALPGMVWQNRDVYLQGPIWAKIPHTDGNFHPSPLMGGFGLKHPPPQVLIKNTPVPADPPTAFNQAKLNSFITQYSTGQVSVEIEWELQKENSKRWNPEIQYTSNYYKSTNVDFAVNTEGVYSEPRPIGTRYLTRNL

SEQ ID NO: 483 - DNA, 2217 bp, Adeno-associated virus
  source 1..2217: mol_type = genomic DNA
atggctgccgatggttatcttccagattggctcgaggacaacctctctgagggcattcgcgagtggtgggacctgaaacctggagccccgaaacccaaggccaaccagcaaaagcaggacgacggccggggtctggtgcttcctggctacaagtacctcggacccttcaacggactcgacaagggggagcccgtcaacgcggcggacgcagcggccctcgagcacgacaaggcctacgaccagcagctcaaagcgggtgacaatccgtacctgcggtataatcacgccgacgccgagtttcaggagcgtctgcaagaagatacgtcttttgggggcaacctcgggcgagcagtcttccaggccaagaagcgggttctcgaacctctcggtctggttgaggaaggcgctaagacggctcctggaaagaagagaccggtagagccgtcaccacagcgttcccccgactcctccacgggcatcggcaagaaaggccagcagcccgccagaaagagactcaatttcggtcagactggcgactcagagtcagtccccgaccctcaacctatcggagaacctccagcagcgccctctagtgtgggatctggtacaatggctgcaggcggtggcgcaccaatggcagacaataacgaaggtgccgacggagtgggtagttcctcgggaaattggcattgcgattccacatggctgggcgacagagtcatcaccaccagcacccgaacctgggccctgcccacctacaacaaccacctctacaagcaaatctccaacgggacctcgggaggcagcaccaacgacaacacctactttggctacagcaccccctgggggtattttgactttaacagattccactgccacttctcaccacgtgactggcagcgacccatcaacaacaactggggattccggcccaagagactcagcttcaagctcttcaacatccaggtcaaagaggtcacgcagaatgaaggcaccaagaccatcgccaataacctcaccagcaccatccaggtgtttacggactcggaataccagctgccgtacgtcctcggctctgcccaccagggctgcctgcctccgttcccggcggacgtcttcatgattcctcagtacggctacctgactctcaacaacggtagtcaggccgtgggacgttcctccttctactgcctggagtacttcccctctcagatgctgagaacgggcaacaacttttccttcagctaccctttcgaggacgtgcctttccacagcagctacgcgcacagccagagtttggacaggctgatgaatcctctcatcgaccagtacctgtactacctgtcaagaacccagtctacgggaggcacagcgggaacccagcagttgctgttttctcaggccgggcctagcaacatgtcggctcaggccagaaactggctgcctggaccctgctacagacagcagcgcgtctccacgacactgtcgcaaaacaacaacagcaactttgcctggactggtgccaccaagtatcatctgaacggcagagactctctggtgaatccgggcgtcgccatggcaaccaacaaggacgacgaggaccgcttcttcccatccagcggcatcctcatgtttggcaagcagggagctggaaaagacaacgtggactatagcaacgtgatgctaaccagcgaggaagaaatcaagaccaccaaccccgtggccacagaacagtatggcgtggtggctgataacctacagcagcaagacaccgctcctattgtgggggccgtcaacagccagggagccttacctggcatggtctggcagaaccgggacgtgtacctgcagggtcctatttgggccaagattcctcacacagatggcaactttcacccgtctcctttaatgggcggctttggacttaaacatccgcctcctcaggtcctcatcaaaaacactcctgttcctgcggatcctccaacagcgttcaaccaggccaagctgaattctttcatcacgcagtacagcaccggacaagtcagcgtggagatcgagtgggagctgcagaaggagaacagcaagcgctggaacccagagattcagtatacttccaactactacaaatctacaaatgtggactttgctgttaatactgagggtgtttactctgagcctcgccccattggcactcgttacctcacccgtaatctgtaa

SEQ ID NO: 484 - DNA, 2214 bp, Adeno-associated virus
  source 1..2214: mol_type = genomic DNA
atggctgctgacggttatcttccagattggctcgaggacaacctctctgagggcattcgcgagtggtgggacctgaaacctggagcccccaagcccaaggccaaccagcagaagcaggacgacggccggggtctggtgcttcctggctacaagtacctcggacccttcaacggactcgacaagggggagcccgtcaacgcggcggacgcagcggccctcgagcacgacaaggcctacgaccagcagctcaaagcgggtgacaatccgtacctgcggtataaccacgccgacgccgagttccaggagcgtctgcaagaagatacgtcttttgggggcaacctcgggcgagcagtcttccaggccaagaagcgggttctcgaacctctcggtctggctgaggaagctgctaagacggctcctggaaagaagagaccggtagaaccgtcacctcagcgttcccccgactcctccacgggcatcggcaagaaaggccagcagcccgctagaaagagactgaactttgggcagactggcgactcagagtcagtccccgaccctcaaccaatcggagagccaccagcaggcccctctggtctgggatctggtacaatggctgcaggcggtggcgcaccaatggctgacaataacaagggcgccgacggagtgggtaatgcctcaggaaattggcattgcgattccacatggctgggcgacagagtcatcaccaccagcacccgaacctgggctttgcccacctacaacaaccacctctacaagcaaatctccagtcagtcagcaggtagcaccaacgacaacgtctacttcggctacagcaccccctgggggtattttgacttcaacagattccactgtcacttctcaccacgtgactggcagcggctcatcaacaacaactggggattccggcccaagaagctcaacttcaagctgttcaacatccaggtcaaggaggtcacaacgggtgacggcgtcacgaccatcgccaataaccttaccagcacggttcaggtcttttcggactcggaataccagctgccctacgtcctcggctccgcacaccagggctgcctgcctccgttcccggcggacgtcttcatgattccccagtacggctacctgactctgaacaatgacagccaatcggtgggtcgttcctctttctactgcctggaatatttcccttctcaaatgctgagaacgggcaacaacttcaccttcagctacaccttcgaggacgttcccttccacagcagctacgcacacagccagagcctggaccggctgatgaatcctcttatcgaccagtacctgtattacctggccagaacacagagcaacgcaggaggcacagctggcaatcgggaactgcagttttatcagggcgggcctaccaccatggccgaacaagccaaaaactggctgcctggaccttgcttccggcaacaaagagtctccaagacgctggatcaaaacaacaacagcaactttgcttggactggtgccaccaaataccatctaaatggaagaaattcattggttaatcccggtgtcgccatggcaacccacaaggacgacgaggaacgcttcttcccttcgagcggagtcctgatttttggaaaaactggagcagctaataagactacactggaaaatgtgttaatgacaaatgaagaggaaattcgtcctaccaacccggtagccaccgaggaatacgggactgttagcagcaacctgcaggcggctaacactgcagcccagacacaagttgtcaacaaccagggagccttacctggtatggtctggcagaaccgggacgtgtacctgcagggtcccatctgggccaagattcctcacacggacggcaactttcacccgtctccgctgatgggcggctttggactgaagcatccgcctcctcagatcctgatcaaaaacactcctgttcctgctaatcccccggaggtgtttacgcctgccaagtttgcttctttcatcacacagtacagcaccggccaggtcagcgtggagatcgagtgggagctgcagaaggagaacagcaagcgctggaacccagagattcagtatacctccaattttgacaaacagactggtgtggactttgccgttgacagccagggtgtttattctgagcctcgccccattggtactcgttacctcacccgtaatctgtaa

SEQ ID NO: 485 - protein, 737 aa, Adeno-associated virus
MAADGYLPDWLEDNLSEGIREWWDLKPGAPKPKANQQKQDDGRGLVLPGYKYLGPFNGLDKGEPVNAADAAALEHDKAYDQQLKAGDNPYLRYNHADAEFQERLQEDTSFGGNLGRAVFQAKKRVLEPLGLAEEAAKTAPGKKRPVEPSPQRSPDSSTGIGKKGQQPARKRLNFGQTGDSESVPDPQPIGEPPAGPSGLGSGTMAAGGGAPMADNNKGADGVGNASGNWHCDSTWLGDRVITTSTRTWALPTYNNHLYKQISSQSAGSTNDNVYFGYSTPWGYFDFNRFHCHFSPRDWQRLINNNWGFRPKKLNFKLFNIQVKEVTTGDGVTTIANNLTSTVQVFSDSEYQLPYVLGSAHQGCLPPFPADVFMIPQYGYLTLNNDSQSVGRSSFYCLEYFPSQMLRTGNNFTFSYTFEDVPFHSSYAHSQSLDRLMNPLIDQYLYYLARTQSNAGGTAGNRELQFYQGGPTTMAEQAKNWLPGPCFRQQRVSKTLDQNNNSNFAWTGATKYHLNGRNSLVNPGVAMATHKDDEERFFPSSGVLIFGKTGAANKTTLENVLMTNEEEIRPTNPVATEEYGTVSSNLQAANTAAQTQVVNNQGALPGMVWQNRDVYLQGPIWAKIPHTDGNFHPSPLMGGFGLKHPPPQILIKNTPVPANPPEVFTPAKFASFITQYSTGQVSVEIEWELQKENSKRWNPEIQYTSNFDKQTGVDFAVDSQGVYSEPRPIGTRYLTRNL

SEQ ID NO: 486 - DNA, 2217 bp, Adeno-associated virus
  source 1..2217: mol_type = genomic DNA
atggctgccgatggttatcttccagattggctcgaggacaacctctctgagggcattcgcgagtggtgggacctgaaacctggagccccgaaacccaaagccaaccagcaaaagcaggacgacggccggggtctggtgcttcctggctacaagtacctcggacccttcaacggactcgacaagggggagcccgtcaacgcggcggacgcagcggccctcgagcacgacaaggcctacgaccagcagctcaaagcgggtgacaatccgtacctgcggtataatcacgccgacgccgagtttcaggagcgtctgcaagaagatacgtcttttgggggcaacctcgggcgagcagtcttccaggccaagaagcgggttctcgaacctctcggtctggttgaggaaggcgctaagacggctcctggaaagaagagaccggtagagccgtcaccacagcgttcccccgactcctccacgggcatcggcaagaaaggccagcagcccgccagaaagagactcaatttcggtcagactggcgactcagagtcagtccccgaccctcaacctatcggagaacctccagcagcgccctctagtgtgggatctggtacaatggctgcaggcggtggcgcaccaatggcagacaataacgaaggtgccgacggagtgggtagttcctcgggaaattggcattgcgattccacatggctgggcgacagagtcatcaccaccagcacccgaacctgggccctgcccacctacaacaaccacctctacaagcaaatctccaacgggacctcgggaggcagcaccaacgacaacacctactttggctacagcaccccctgggggtattttgactttaacagattccactgccacttctcaccacgtgactggcagcgactcatcaacaacaactggggattccggcccaagagactcagcttcaagctcttcaacatccaggtcaaagaggtcacgcagaatgaaggcaccaagaccatcgccaataacctcaccagcaccatccaggtgtttacggactcggaataccagctgccgtacgtcctcggctctgcccaccagggctgcctgcctccgttcccggcggacgtcttcatgattcctcagtacggctacctgactctcaacaacggtagtcaggccgtgggacgttcctccttctactgcctggagtacttcccctctcagatgctgagaacgggcaacaacttttccttcagctacactttcgaggacgtgcctttccacagcagctacgcgcacagccagagtttggacaggctgatgaatcctctcatcgaccagtacctgtactacctgtcaagaacccagtctacgggaggcacagcgggaacccagcagttgctgttttctcaggccgggcctagcaacatgtcggctcaggccagaaactggctgcctggaccctgctacagacagcagcgcgtctccacgacactgtcgcaaaacaacaacagcaactttgcctggactggtgccaccaagtatcatctgaacggcagagactctctggtgaatccgggcgtcgccatggcaaccaacaaggacgacgaggaccgcttcttcccatccagcggcatcctcatgtttggcaagcagggagctggaaaagacaacgtggactatagcaacgtgatgctaaccagcgaggaagaaatcaagaccaccaaccccgtggccacagaacagtatggcgtggtggctgataacctacagcagcaaaacaccgctcctattgtgggggccgtcaacagccagggagccttacctggcatggtctggcagaaccgggacgtgtacctgcagggtcctatttgggccaagattcctcacacagatggcaactttcacccgtctcctttaatgggcggctttggacttaaacatccgcctcctcagatcctcatcaaaaacactcctgttcctgcggatcctccaacagcgttcaaccaggccaagctgaattctttcatcacgcagtacagcaccggacaagtcagcgtggagatcgtgtgggagctgcagaaggagaacagcaagcgcaggaacccagagattcagtatacttccaactactacaaatctacaaatgtggactttgctgttaatactgagggtgtttactctgagcctcgccccattggcactcgttacctcacccgtaatctgtaa

SEQ ID NO: 487 - protein, 738 aa, Adeno-associated virus
MAADGYLPDWLEDNLSEGIREWWDLKPGAPKPKANQQKQDDGRGLVLPGYKYLGPFNGLDKGEPVNAADAAALEHDKAYDQQLKAGDNPYLRYNHADAEFQERLQEDTSFGGNLGRAVFQAKKRVLEPLGLVEEGAKTAPGKKRPVEPSPQRSPDSSTGIGKKGQQPARKRLNFGQTGDSESVPDPQPIGEPPAAPSSVGSGTMAAGGGAPMADNNEGADGVGSSSGNWHCDSTWLGDRVITTSTRTWALPTYNNHLYKQISNGTSGGSTNDNTYFGYSTPWGYFDFNRFHCHFSPRDWQRLINNNWGFRPKRLSFKLFNIQVKEVTQNEGTKTIANNLTSTIQVFTDSEYQLPYVLGSAHQGCLPPFPADVFMIPQYGYLTLNNGSQAVGRSSFYCLEYFPSQMLRTGNNFSFSYTFEDVPFHSSYAHSQSLDRLMNPLIDQYLYYLSRTQSTGGTAGTQQLLFSQAGPSNMSAQARNWLPGPCYRQQRVSTTLSQNNNSNFAWTGATKYHLNGRDSLVNPGVAMATNKDDEDRFFPSSGILMFGKQGAGKDNVDYSNVMLTSEEEIKTTNPVATEQYGVVADNLQQQNTAPIVGAVNSQGALPGMVWQNRDVYLQGPIWAKIPHTDGNFHPSPLMGGFGLKHPPPQILIKNTPVPADPPTAFNQAKLNSFITQYSTGQVSVEIVWELQKENSKRRNPEIQYTSNYYKSTNVDFAVNTEGVYSEPRPIGTRYLTRNL

SEQ ID NO: 488 - protein, 738 aa, Adeno-associated virus
MAADGYLPDWLEDNLSEGIREWWDLKPGAPKPKANQQKQDDGRGLVLPGYKYLGPFNGLDKGEPVNAADAAALEHDKAYDQQLKAGDNPYLRYNHADAEFQERLQEDTSFGGNLGRAVFQAKKRVLEPLGLVEEGAKTAPGKKRPVEPSPQRSPDSSTGIGKKGQQPARKRLNFGQTGDSESVPDPQPIGEPPAAPSSVGSGTMAAGGGAPMADNNEGADGVGSSSGNWHCDSTWLGDRVITTSTRTWALPTYNNHLYKQISNGTSGGSTNDNTYFGYSTPWGYFDFNRFHCHFSPRDWQRLINNNWGFRPKRLSFKLFNIQVKEVTQNEGTKTIANNLTSTIQVFTDSEYQLPYVLGSAHQGCLPPFPADVFMIPQYGYLTLNNGSQAVGRSSFYCLEYFPSQMLRTGNNFSFSYTFEDVPFHSSYAHSQSLDRLMNPLIDQYLYYLSRTQSTGGTAGTQQLLFSQAGPSNMSAQARNWLPGPCYRQQRVSTTLSQNNNSNFAWTGATKYHLNGRDSLVNPGVAMATNKDDEDRFFPSSGILMFGKQGAGKDNVDYSNVMLTSEEEIKTTNPVATEQYGVVADNLQQQNTAPIVGAVNSQGALPGMVWQNRDVYLQGPIWAKIPHTDGNFHPSPLMGGFGLKHPPPQILIKNTPVPADPPTAFNQAKLNSFITQYSTGQVSVEIEWELQKENSKRWNPEIQYTSNYYKSTNVDFAVNTEGVYSEPRPIGTRYLTRNL

SEQ ID NO: 489 - protein, 738 aa, Adeno-associated virus
MAADGYLPDWLEDNLSEGIREWWDLKPGAPKPKANQQKQDDGRGLVLPGYKYLGPFNGLDKGEPVNAADAAALEHDKAYDQQLKAGDNPYLRYNHADAEFQERLQEDTSFGGNLGRAVFQAKKRVLEPLGLVEEGAKTAPGKKRPVEPSPQRSPDSSTGIGKKGQQPARKRLNFGQTGDSESVPDPQPIGEPPAAPSSVGSGTMAAGGGAPMADNNEGADGVGSSSGNWHCDSTWLGDRVITTSTRTWALPTYNNHLYKQISNGTSGGSTNDNTYFGYSTPWGYFDFNRFHCHFSPRDWQRLINNNWGFRPKRLSFKLFNIQVKEVTQNEGTKTIANNLTSTIQVFTDSEYQLPYVLGSAHQGCLPPFPADVFMIPQYGYLTLNNGSQAVGRSSFYCLEYFPSQMLRTGNNFSFSYTFEDVPFHSSYAHSQSLDRLMNPLIDQYLYYLSRTQSTGGTAGTQQLLFSQAGPSNMSAQARNWLPGPCYRQQRVSTTLSQNNNSNFAWTGATKYHLNGRDSLVNPGVAMATNKDDEDRFFPSSGILMFGKQGAGKDNVDYSNVMLTSEEEIKTTNPVATEQYGVVADNLQQQNTAPIVGAVNSQGALPGMVWQNRDVYLQGPIWAKIPHTDGNFHPSPLMGGFGLKHPPPQILIKNTPVPADPPTAFNQAKLNSFITQYSTGQVSVEIVWELQKENSKRWNPEIQYTSNYYKSTNVDFAVNTEGVYSEPRPIGTRYLTRNL

SEQ ID NO: 490 - protein, 738 aa, Adeno-associated virus; identical to SEQ ID NO: 488

SEQ ID NO: 491 - DNA, 2214 bp, Adeno-associated virus
  source 1..2214: mol_type = genomic DNA
atggctgctgacggttatcttccagattggctcgaggacaacctctctgagggcattcgcgagtggtgggacctgaaacctggagcccccaagcccaaggccaaccagcagaagcaggacgacggccggggtctggtgcttcctggctacaagtacctcggacccttcaacggactcgacaagggggagcccgtcaacgcggcggacgcagcggccctcgagcacgacaaggcctacgaccagcagctcaaagcgggtgacaatccgtacctgcggtataaccacgccgacgccgagtttcaggagcgtctgcaagaagatacgtcttttgggggcaacctcgggcgagcagtcttccaggccaagaagcgggttctcgaacctctcggtctggttgaggaagctgctaagacggctcctggaaagaagagaccggtagaaccgtcacctcagcgttcccccgactcctccacgggcatcggcaagaaaggccagcagcccgctagaaagagactgaactttgggcagactggcgactcagagtcagtccccgaccctcaaccaatcggagaaccaccagcaggcccctctggtctgggatctggtacaatggctgcaggcggtggcgctccaatggcagacaataacgaaggcgccgacggagtgggtaatgcctcaggaaattggcattgcgattccacatggctgggcgacagagtcatcaccaccagcacccgaacctgggctttgcccacctacaacaaccacctctacaagcaaatctccagtcagtcagcaggtagcaccaacgacaacgtctacttcggctacagcaccccctgggggtattttgacttcaacagattccactgtcacttctcaccacgtgactggcagcggctcatcaacaacaactggggattccggcccaagaagctcaacttcaagctgttcaacatccaggtcaaggaggtcacaacgaatgacggcgtcacgaccatcgccaataaccttaccagcacggttcaggtcttttcggactcggaataccagctgccctacgtcctcggctccgcacaccagggctgcctgcctccgttcccggcggacgtcttcatgattccccagtacggctacctgactctgaacaatggcagccaatcggtgggtcgttcctctttctactgcctggaatatttcccttctcaaatgctgagaacgggcaacaacttcaccttcagctacaccttcgaggacgttcccttccacagcagctacgcacacagccagagcctggaccggctgatgaatcctcttatcgaccagtacctgtattacctggccagaacacagagcaacgcaggaggcacagctggcaatcgggaactgcagttttatcagggcgggcctaccaccatggccgaacaagccaaaaactggctgcctagaccttgcttccggcaacaaagagtctccaagacgctggatcaaaacaacaacagcaactttgcttggactggtgccaccaaataccatctaaatggaagaaattcattggttaatcccggtgtcgccatggcaacccacaaggacgacgaggaacgcttcttcccttcgagcggagtcctgatttttggaaaaactggagcagctaataagactacactggaaaatgtgttaatgacaaatgaagaggaaattcgtcctaccaacccggtagccaccgaggaatacgggactgttagcagcaacctgcaggcggctaacactgcagcccagacacaagttgtcaacaaccagggagccttacctggtatggtctggcagaaccgggacgtgtacctgcagggtcccatctgggccaagattcctcacacggacggcaactttcacccgtctccgctgatgggcggctttggactgaagcatccgcctcctcagatcctgatcaaaaacactcctgttcctgctaatcccccggaggtgtttacgcctgccaagtttgcttctttcatcacacagtacagcaccggccaggtcagcgtggagatcgagtgggagctgcagaaggagaacagcaagcgctggaacccagagattcagtatacctccaattttgacaaacagactggtgtggactttgccgttgacagccagggtgtttattctgagcctcgccccattggtactcgttacctcacccgtaatctgtaa

SEQ ID NO: 492 - protein, 737 aa, Adeno-associated virus
MAADGYLPDWLEDNLSEGIREWWDLKPGAPKPKANQQKQDDGRGLVLPGYKYLGPFNGLDKGEPVNAADAAALEHDKAYDQQLKAGDNPYLRYNHADAEFQERLQEDTSFGGNLGRAVFQAKKRVLEPLGLVEEAAKTAPGKKRPVEPSPQRSPDSSTGIGKKGQQPARKRLNFGQTGDSESVPDPQPIGEPPAGPSGLGSGTMAAGGGAPMADNNEGADGVGNASGNWHCDSTWLGDRVITTSTRTWALPTYNNHLYKQISSQSAGSTNDNVYFGYSTPWGYFDFNRFHCHFSPRDWQRLINNNWGFRPKKLNFKLFNIQVKEVTTNDGVTTIANNLTSTVQVFSDSEYQLPYVLGSAHQGCLPPFPADVFMIPQYGYLTLNNGSQSVGRSSFYCLEYFPSQMLRTGNNFTFSYTFEDVPFHSSYAHSQSLDRLMNPLIDQYLYYLARTQSNAGGTAGNRELQFYQGGPTTMAEQAKNWLPRPCFRQQRVSKTLDQNNNSNFAWTGATKYHLNGRNSLVNPGVAMATHKDDEERFFPSSGVLIFGKTGAANKTTLENVLMTNEEEIRPTNPVATEEYGTVSSNLQAANTAAQTQVVNNQGALPGMVWQNRDVYLQGPIWAKIPHTDGNFHPSPLMGGFGLKHPPPQILIKNTPVPANPPEVFTPAKFASFITQYSTGQVSVEIEWELQKENSKRWNPEIQYTSNFDKQTGVDFAVDSQGVYSEPRPIGTRYLTRNL

SEQ ID NO: 493 - DNA, 2214 bp, Adeno-associated virus
  source 1..2214: mol_type = genomic DNA
atggctgctgacggttatcttccagattggctcgaggacaacctctctgagggcattcgcgagtggtgggacctgaaacctggagcccccaagcccaaggccaaccagcagaagcaggacgacggccggggtctggtgcttcctggctacaagtacctcggacccttcaacggactcgacaagggggagcccgtcaacgcggcggacgcagcggccctcgagcacgacaaggcctacgaccagcagctcaaagcgggtgacaatccgtacctgcggtataaccatgccgacgccgagtttcaggagcgtctgcaagaagatacgtcttttgggggcaacctcgggcgagcagtcctccaggccaagaagcgggttctcgaacctctcggtctggttgaggaagctgctaagacggctcctggaaagaagagaccggtagaaccgtcacctcagcgttcccccgactcctccacgggcatcggcaagaaaggccagcagcccgctagaaagagactgaactttgggcagactggcgactcagagtcagtccccgaccctcaaccaatcggagaaccaccagcaggcccctctggtctgggatctggtacaatggctgcaggcggtggcgctccaatggcagacaataacgaaggcgccgacggagtgggtaatgcctcaggaaattggcattgcgattccacatggctgggcgacagagtcatcaccaccagcacccgaacctgggctttgcccacctacaacaaccacctctacaagcaaatctccagtcagtcagcaggtagcaccaacgacaacgtctacttcggctacagcaccccctgggggtattttgacttcaacagattccactgtcacttctcaccacgtgactggcagcggctcatcaacaacaactggggattccggcccaagaagctcaacttcaagctgttcaacatccaggtcaaggaggtcacaacgaatgacggcgtcacgaccatcgccaataaccttaccagcacggttcaggtcttttcggactcggaataccagctgccctacgtcctcggctccgcacaccagggctgcctgcctccgttcccggcggacgtcttcatgattccccagtacggctacctgactctgaacaatggcagccaatcggtgggtcgttcctctttctactgcctggaatatttcccttctcaaatgctgagaacgggcaacaacttcaccttcagctacaccttcgaggacgttcccttccacagcagctacgcacacagccagagcctggaccggctgatgaatcctcttatcgaccagtacctgtattacctggccagaacacagagcaacgcaggaggcacagctggcaatcgggaactgcagttttatcagggcgggcctaccaccatggccgaacaagccaaaaactggctgcctggaccttgcttccggcaacaaagagtctccaagacgctggatcaaaacaacaacagcaactttgcttggactggtgccaccaaataccatctaaatggaagaaattcattggttaatcccggtgtcgccatggcaacccacaaggacgacgaggaacgcttcttcccttcgagcggagtcctgatttttggaaaaactggagcagctaataagactacactggaaaatgtgttaatgacaaatgaagaggaaattcgtcctaccaacccggtagccaccgaggaatacgggactgttagcagcaacctgcaggcggctaacactgcagcccagacacaagttgtcaacaaccagggagccttacctggtatggtctggcagaaccgggacgtgtacctgcagggtcccatctgggccaagattcctcacacggacggcaactttcacccgtctccgctgatgggcggctttggactgaagcatccgcctcctcagatcctgatcaaaaacactcctgttcctgctaatcccccggaggtgtttacgcctgccaagtttgcttctttcatcacacagtacagcaccggccaggtcagcgtggagatcgagtgggagctgcagaaggagaacagcaagcgctggaacccagagattcagtatacctccaattttgacaaacagactggtgtggactttgccgttgacagccagggtgtttattctgagcctcgccccattggtactcgttacctcacccgtaatctgtaa

SEQ ID NO: 494 - protein, 737 aa, Adeno-associated virus; identical to SEQ ID NO: 453

SEQ ID NO: 495 - protein, 737 aa, Adeno-associated virus
MAADGYLPDWLEDNLSEGIREWWDLKPGAPKPKANQQKQDDGRGLVLPGYKYLGPFNGLDKGEPVNAADAAALEHDKAYDQQLKAGDNPYLRYNHADAEFQERLQEDTSFGGNLGRAVLQAKKRVLEPLGLVEEAAKTAPGKKRPVEPSPQRSPDSSTGIGKKGQQPARKRLNFGQTGDSESVPDPQPIGEPPAGPSGLGSGTMAAGGGAPMADNNEGADGVGNASGNWHCDSTWLGDRVITTSTRTWALPTYNNHLYKQISSQSAGSTNDNVYFGYSTPWGYFDFNRFHCHFSPRDWQRLINNNWGFRPKKLNFKLFNIQVKEVTTNDGVTTIANNLTSTVQVFSDSEYQLPYVLGSAHQGCLPPFPADVFMIPQYGYLTLNNGSQSVGRSSFYCLEYFPSQMLRTGNNFTFSYTFEDVPFHSSYAHSQSLDRLMNPLIDQYLYYLARTQSNAGGTAGNRELQFYQGGPTTMAEQAKNWLPGPCFRQQRVSKTLDQNNNSNFAWTGATKYHLNGRNSLVNPGVAMATHKDDEERFFPSSGVLIFGKTGAANKTTLENVLMTNEEEIRPTNPVATEEYGTVSSNLQAANTAAQTQVVNNQGALPGMVWQNRDVYLQGPIWAKIPHTDGNFHPSPLMGGFGLKHPPPQILIKNTPVPANPPEVFTPAKFASFITQYSTGQVSVEIEWELQKENSKRWNPEIQYTSNFDKQTGVDFAVDSQGVYSEPRPIGTRYLTRNL

SEQ ID NO: 496 - DNA, 2217 bp, Adeno-associated virus
  source 1..2217: mol_type = genomic DNA
atggctgccgatggttatcttccagattggctcgaggacaacctctctgagggcattcgcgagtggtgggacctgaaacctggagccccgaaacccaaagccaaccagcaaaagcaggacgacggccggggtctggtgcttcctggctacaagtacctcggacccttcaacggactcgacaagggggagcccgtcaacgcggcggacgcagcggccctcgagcacgacaaggcctacgaccagcagctcaaagcgggtgacaatccgtacctgcggtataatcacgccgacgccgagtttcaggagcgtctgcaagaagatacgtcttttgggggcaacctcgggcgagcagtcttccaggccaagaagcgggttctcgaacctctcggtctggttgaggaaggcgctaagacggctcctggaaagaagagaccggtagagccgtcaccacagcgttcccccgactcctccacgggcatcggcaagaaaggccagcagcccgccagaaagagactcaatttcggtcagactggcgactcagagtcagtccccgaccctcaacctatcggagaacctccagcagcgccctctagtgtgggatctggtacaatggctgcaggcggtggcgcaccaatggcagacaataacgaaggtgccgacggagtgggtagttcctcgggaaattggcattgcgattccacatggctgggcgacagagtcatcaccaccagcacccgaacctgggccctgcccacctacaacaaccacctctacaagcaaatctccaacgggacctcgggaggcagcaccaacgacaacacctactttggctacagcaccccctgggggtattttgactttaacagattccactgccacttctcaccacgtgactggcagcgactcatcaacaacaactggggattccggcccaagagactcagcttcaagctcttcaacatccaggtcaaagaggtcacgcagaatgaaggcaccaagaccatcgccaataacctcaccagcaccatccaggtgtttacggactcggaataccagctgccgtacgtcctcggctctgcccaccagggctgcctgcctccgttcccggcggacgtcttcatgattcctcagtacggctacctgactctcaacaacggtagtcaggccgtgggacgttcctccttctactgcctggagtacttcccctctcagatgctgagaacgggcaacaacttttccttcagctacactttcgaggacgtgcctttccacagcagctacgcgcacagccagagtttggacaggctgatgaatcctctcatcgaccagtacctgtactacctgtcaagaacccagtctacgggaggcacagcgggaacccagcagttgctgttttctcaggccgggcctagcaacatgtcggctcaggccagaaactggctgcctggaccctgctacagacagcagcgcgtctccacgacactgtcgcaaaacaacaacagcaactttgcctggactggtgccaccaagtatcatctgaacggcagagactctctggtgaatccgggcgtcgccatggcaaccaacaaggacgacgaggaccgcttcttcccacccagcggcatcctcatgtttggcaagcagggagctggaaaagacaacgtggactatagcaacgtgatgctaaccagcgaggaagaaatcaagaccaccaaccccgtggccacagaacagtatggcgtggtggctgataacctacagcagcaaaacaccgctcctattgtgggggccgtcaacagccagggagccttacctggcatggtctggcagaaccgggacgtgtacctgcagggtcctatttgggccaagattcctcacacagatggcaactttcacccgtctcctttaatgggcggctttggacttaaacatccgcctcctcagatcctcatcaaaaacactcctgttcctgcggatcctccaacagcgttcaaccaggccaagctgaattctttcatcacgcagtacagcaccggacaagtcagcgtggtgatcgagtgggagctgcagaaggagaacagcaagcgctggaacccagagattcagtatacttccaactactacaaatctacaaatgtggactttgctgttaatactgagggtgtttactctgagcttcgccccattggcactcgttacctcacccgtaatctgtaa

SEQ ID NO: 497 - protein, 738 aa, Adeno-associated virus
MAADGYLPDWLEDNLSEGIREWWDLKPGAPKPKANQQKQDDGRGLVLPGYKYLGPFNGLDKGEPVNAADAAALEHDKAYDQQLKAGDNPYLRYNHADAEFQERLQEDTSFGGNLGRAVFQAKKRVLEPLGLVEEGAKTAPGKKRPVEPSPQRSPDSSTGIGKKGQQPARKRLNFGQTGDSESVPDPQPIGEPPAAPSSVGSGTMAAGGGAPMADNNEGADGVGSSSGNWHCDSTWLGDRVITTSTRTWALPTYNNHLYKQISNGTSGGSTNDNTYFGYSTPWGYFDFNRFHCHFSPRDWQRLINNNWGFRPKRLSFKLFNIQVKEVTQNEGTKTIANNLTSTIQVFTDSEYQLPYVLGSAHQGCLPPFPADVFMIPQYGYLTLNNGSQAVGRSSFYCLEYFPSQMLRTGNNFSFSYTFEDVPFHSSYAHSQSLDRLMNPLIDQYLYYLSRTQSTGGTAGTQQLLFSQAGPSNMSAQARNWLPGPCYRQQRVSTTLSQNNNSNFAWTGATKYHLNGRDSLVNPGVAMATNKDDEDRFFPPSGILMFGKQGAGKDNVDYSNVMLTSEEEIKTTNPVATEQYGVVADNLQQQNTAPIVGAVNSQGALPGMVWQNRDVYLQGPIWAKIPHTDGNFHPSPLMGGFGLKHPPPQILIKNTPVPADPPTAFNQAKLNSFITQYSTGQVSVVIEWELQKENSKRWNPEIQYTSNYYKSTNVDFAVNTEGVYSELRPIGTRYLTRNL

SEQ ID NO: 498 - DNA, 2214 bp, Adeno-associated virus
  source 1..2214: mol_type = genomic DNA
atggctgctgacggttatcttccagattggctcgaggacaacctctctgagggcattcgcgagtggtgggacctgaaacctggagcccccaagcccaaggccaaccagcagaagcaggacgacggccggggtctggtgcttcctggctacaagtacctcggacccttcaacggactcgacaagggggagcccgtcaacgcggcggacgcagcggccctcgagcacgacaaggcctacgaccagcagctcaaagcgggtgacaatccgtacctgcggtataaccacgccgacgccgagtttcaggagcgtctgcaagaagatacgtcttttgggggcaacctcgggcgagcagtcttccaggccaagaagcgggttctcgaacctctcggtctggttgaggaagctgctaagacggctcctggaaagaagagaccggtagaaccgtcacctcagcgttcccccgactcctccacgggcatcggcaagaaaggccagcagcccgctagaaagagactgaactttgggcagactggcgactcagagtcagtccccgaccctcaaccaatcggagaaccaccagcaggcccctctggtctgggatctggtacaatggctgcaggcggtggcgccccaatggcagacaataacgaaggcgccgacggagtgggtaatgcctcaggaaattggcattgcgattccacatggctgggcgacagagtcatcaccaccagcacccgaacctgggctttgcccacctacaacaaccacctctacaagcaaatctccagtcagtcagcaggtagcaccaacgacaacgtctacttcggctacagcaccccctgggggtattttgacttcaacagattccactgtcacttctcaccacgtgactggcagcggctcatcaacaacaactggggattccggcccaagaagctcaacttcaagctgttcaacatccaggtcaaggaggtcacaacgaatgacggcgtcacgaccatcgccaataaccttaccagcacggttcaggtcttttcggactcggaataccagctgccctacgtcctcggctccgcacaccagggctgcctgcctccgttcccggcggacgtcttcatgattccccagtacggctacctgactctgaacaatggcagccaatcggtgggtcgttcctctttctactgcctggaatatttcccttctcaaatgctgagaacgggcaacaacttcaccatcagctacaccttcgaggacgttcccttccacagcagctacgcacacagccagagcctggaccggctgatgaatcctcttatcgaccagtacctgtattacctggccagaacacagagcaacgcaggaggcacagctggcaatcaggaactgcagttttatcagggcgggcctaccaccatggccgaacaagccaaaaactggctgcctggaccttgcttccggcaacaaagagtctccaagacgctggatcaaaacaacaacagcaactttgcttggactggtgccaccaaataccatctaaatggaagaaattcattggttaatcccggtgtcgccatggcaacccacaaggacgacgaggaacgcttcttcccttcgagcggagtcctgatttttggaaaaactggagcagctaataagactacactggaaaatgtgttaatgacaaatgaagaggaaattcgtcctaccaacccggtagccaccgaggaatacgggactgttagcagcaacctgcaggcggctaacactgcagcccagacacaagttgtcaacaaccagggagccttacctggtatggtctggcagaaccgggacgtgtacctgcagggtcccatctgggccaagattcctcacacagatggcaactttcacccgtctcctttaatgggcggctttggacttaaacatccgcctcctcagatcctcatcaaaaacactcctgttcctgcggatcctccaacagcgttcaaccaggccaagctgaattctttcatcacgcagtacagcaccggacaagtcagcgtggagatcgagtgggagctgcagaaggagaacagcaagcgctggaacccagagattcagtatacttccaactactacaaatctacaaatgtggactttgctgttaatactgagggtgtttactctgagcctcgccccattggcactcgttacctcacccgtaatctgtaa

SEQ ID NO: 499 - protein, 737 aa, Adeno-associated virus
MAADGYLPDWLEDNLSEGIREWWDLKPGAPKPKANQQKQDDGRGLVLPGYKYLGPFNGLDKGEPVNAADAAALEHDKAYDQQLKAGDNPYLRYNHADAEFQERLQEDTSFGGNLGRAVFQAKKRVLEPLGLVEEAAKTAPGKKRPVEPSPQRSPDSSTGIGKKGQQPARKRLNFGQTGDSESVPDPQPIGEPPAGPSGLGSGTMAAGGGAPMADNNEGADGVGNASGNWHCDSTWLGDRVITTSTRTWALPTYNNHLYKQISSQSAGSTNDNVYFGYSTPWGYFDFNRFHCHFSPRDWQRLINNNWGFRPKKLNFKLFNIQVKEVTTNDGVTTIANNLTSTVQVFSDSEYQLPYVLGSAHQGCLPPFPADVFMIPQYGYLTLNNGSQSVGRSSFYCLEYFPSQMLRTGNNFTISYTFEDVPFHSSYAHSQSLDRLMNPLIDQYLYYLARTQSNAGGTAGNQELQFYQGGPTTMAEQAKNWLPGPCFRQQRVSKTLDQNNNSNFAWTGATKYHLNGRNSLVNPGVAMATHKDDEERFFPSSGVLIFGKTGAANKTTLENVLMTNEEEIRPTNPVATEEYGTVSSNLQAANTAAQTQVVNNQGALPGMVWQNRDVYLQGPIWAKIPHTDGNFHPSPLMGGFGLKHPPPQILIKNTPVPADPPTAFNQAKLNSFITQYSTGQVSVEIEWELQKENSKRWNPEIQYTSNYYKSTNVDFAVNTEGVYSEPRPIGTRYLTRNL

SEQ ID NO: 500 - DNA, 2217 bp, Adeno-associated virus
  source 1..2217: mol_type = genomic DNA
atggctgccgatggttatcttccagattggctcgaggacaacctctctgagggcattcgcgagtggtgggacctgaaacctggagccccgaaacccaaagccaaccagcaaaagcaggacgacggccggggtctggtgcttcctggctacaagtacctcggacccttcaacggactcgacaagggggagcccgtcaacgcggcggacgcagcggccctcgagcacgacaaggcctacgaccagcagctcaaagcgggtgacaatccgtacctgcggtataatcacgccgacgccgagtttcaggagcgtctgcaagaagatacgtcttttgggggcaacctcgggcgagcagtcttccaggccaagaagcgggttctcgaacctctcggtctggttgaggaaggcgctaagacggctcctggaaagaagagaccggtagagccgtcaccacagcgttcccccgactcctccacgggcatcggcaagaaaggccagcagcccgccagaaagagactcaatttcggtcagactggcgactcagagtcagtccccgaccctcaacctatcggagaacctccagcagcgccctctagtgtgggatctggtacaatggctgcaggcggtggcgcaccaatggcagacaataacgaaggtgccgacggagtgggtagttcctcgggaaattggcattgcgattccacatggctgggcgacagagtcatcaccaccagcacccgaacctgggccctgcccgcctacaacaaccacctctacaagcaaatctccaacgggacctcgggaggcagcaccaacgacaacacctactttggctacagcaccccctgggggtattttgactttaacagattccactgccacttctcaccacgtgactggcagcgactcatcaacaacaactggggattccggcccaagagactcagcttcaagctcttcaacatccaggtcaaagaggtcacgcagaatgaaggcaccaagaccatcgccaataacctcaccagcaccatccaggtgtttacggactcggaataccagctgccgtacgtcctcggctctgcccaccagggctgcctgcctccgttcccggcggatgtcttcatgattcctcagtacggctacctgactctcaacaacggtagtcaggccgtgggacgttcctccttctactgcctggagtacttcccctctcagatgctgagaacgggcaacaacttttccttcagctacactttcgaggacgtgcctttccacagcagctacgcgcacagccagagtttggacaggctgatgaatcctctcatcgaccagtacctgtactacctgtcaagaacccagtctacgggaggcacagcgggaacccagcagttgctgttttctcaggccgggcctagcaacatgtcggctcaggccagaaactggctgcctggaccctgctacagacagcagcgcgtctccacgacactgtcgcaaaacaacaacagcaactttgcctggactggtgccaccaagtatcatctgagcggcagagactctctggtgaatccgggcgtcgccatggcaaccaacaaggacgacgaggaccgcttcttcccatccagcggcatcctcatgtttggcaagcagggagctggaaaagacaacgtggactatagcaacgtgatgctaaccagcgaggaagaaatcaagaccaccaaccccgtggccacagaacagtatggcgtggtggctgataacctacagcagcaaaacaccgctcctattgtgggggccgtcaacagccagggagccttacctggcatggtctggcagaaccgggacgtgtacctgcagggtcctatttgggccaagattcctcacacagatggcaactttcacccgtctcctttaatgggcggctttggacttaaacatccgcctcctcagatcctcatcaaaaacactcctgttcctgcggatcctccaacagcgttcaaccaggccaagctgaattcttccatcacgcagtacagcaccggacaagtcagcgtggagatcgagtgggagctgcagaaggagaacagcaagcgctggaacccagagattcagtatacttccaactactacaaatctacaaatgtggactttgctgttaatactgagggtgtttactctgagcctcgccccattggcactcgttacctcacccgtaatttgtaa

SEQ ID NO: 501 - protein, 738 aa, Adeno-associated virus
MAADGYLPDWLEDNLSEGIREWWDLKPGAPKPKANQQKQDDGRGLVLPGYKYLGPFNGLDKGEPVNAADAAALEHDKAYDQQLKAGDNPYLRYNHADAEFQERLQEDTSFGGNLGRAVFQAKKRVLEPLGLVEEGAKTAPGKKRPVEPSPQRSPDSSTGIGKKGQQPARKRLNFGQTGDSESVPDPQPIGEPPAAPSSVGSGTMAAGGGAPMADNNEGADGVGSSSGNWHCDSTWLGDRVITTSTRTWALPAYNNHLYKQISNGTSGGSTNDNTYFGYSTPWGYFDFNRFHCHFSPRDWQRLINNNWGFRPKRLSFKLFNIQVKEVTQNEGTKTIANNLTSTIQVFTDSEYQLPYVLGSAHQGCLPPFPADVFMIPQYGYLTLNNGSQAVGRSSFYCLEYFPSQMLRTGNNFSFSYTFEDVPFHSSYAHSQSLDRLMNPLIDQYLYYLSRTQSTGGTAGTQQLLFSQAGPSNMSAQARNWLPGPCYRQQRVSTTLSQNNNSNFAWTGATKYHLSGRDSLVNPGVAMATNKDDEDRFFPSSGILMFGKQGAGKDNVDYSNVMLTSEEEIKTTNPVATEQYGVVADNLQQQNTAPIVGAVNSQGALPGMVWQNRDVYLQGPIWAKIPHTDGNFHPSPLMGGFGLKHPPPQILIKNTPVPADPPTAFNQAKLNSSITQYSTGQVSVEIEWELQKENSKRWNPEIQYTSNYYKSTNVDFAVNTEGVYSEPRPIGTRYLTRNL

SEQ ID NO: 502 - protein, 736 aa, Adeno-associated virus; identical to SEQ ID NO: 2

SEQ ID NO: 503 - DNA, 2217 bp, Adeno-associated virus
  source 1..2217: mol_type = genomic DNA
atggctgctgacggttatcttccagattggctcgaggacaacctctctgagggcattcgcgagtggtgggacctgaaacctggagcccccaagcccaaggccaaccagcagaagcaggacgacggccggggtctggtgcttcctggctacaagtacctcggacccttcaacggactcgacaagggggagcccgtcaacgcggcggacgcagcggccctcgagcacgacaaggcctacgaccagcagctcaaagcgggtgacaatccgtacctgcggtataaccacgccgacgccgagtttcaggagcgtctgcaagaagatacgtcttttgggggcaacctcgggcgagcagtcttccaggccaagaagcgggttctcgaacctctcggtctggttgaggaagctgctaagacggctcctggaaagaagagaccggtagaaccgtcacctcagcgttcccccgactcctccacgggcatcggcaagaaaggccagcagcccgctaaaaagagactgaactttggtcagactggcgactcagagtcagtccccgaccctcaaccaatcggagaaccaccagcaggcccctctggtctgggatctggtacaatggctgcaggcggtggcgctccaatggcagacaataacgaaggcgccgacggagtgggtagttcctcaggaaattggcattgcgattccacatggctgggcgacagagtcatcaccaccagcacccgaacctgggccctgcccacctacaacaaccacctctacaagcaaatatccaatgggacatcgggaggaagcaccaacgacaacacctacttcggctacagcaccccctgggggtattttgacttcaacagattccactgccacttctcaccacgtgactggcagcgactcatcaacaacaactggggattccggccaaaaagactcagcttcaagctcttcaacatccaggtcaaggaggtcacgcagaatgaaggcaccaagaccatcgccaataaccttaccagcacgattcaggtatttacggactcggaataccagctgccgtacgtcctcggctccgcgcaccagggctgcctgcctccgttcccggcggacgtcttcatgattccccagtacggctaccttacactgaacaatggaagtcaagccgtaggccgttcctccttctactgcctggaatattttccatctcaaatgctgcgaactggaaacaattttgaattcagctacaccttcgaggacgtgcctttccacagcagctacgcacacagccagagcttggaccgactgatgaatcctctcatcgaccagtacctgtactacttatccagaactcagtccacaggaggaactcaaggtacccagcaattgttattttctcaagctgggcctgcaaacatgtcggctcaggctaagaactggctacctggaccttgctaccggcagcagcgagtctctacgacactgtcgcaaaacaacaacagcaactttgcttggactggtgccaccaaatatcacctgaacggaagagactctttggtaaatcccggtgtcgccatggcaacccacaaggacgacgaggaacgcttcttcccgtcgagtggagtcctgatgtttggaaaacagggtgctggaagagacaatgtggactacagcagcgttatgctaaccagcgaagaagaaattaaaaccactaaccctgtagccacagaacaatacggtgtggtggctgacaacttgcagcaaaccaatacagggcctattgtgggaaatgtcaacagccaaggagccttacctggcatggtctggcagaaccgagacgtgtacctgcagggtcccatctgggccaagattcctcacacggacggcaacttccacccttcaccgctaatgggaggatttggactgaagcacccacctcctcagatcctgatcaagaacacgccggtacctgcggatcctccaacaacgttcagccaggcgaaattggcttccttcattacgcagtacagcaccggacaggtcagcgtggaaatcgagtgggagctgcagaaggagaacagcaaacgctggaacccagagattcagtacacttcaaactactacaaatctacaaatgtggactttgctgtcaatacagagggaacttattctgagcctcgccccattggtactcgttacctcacccgtaatctgtaa

SEQ ID NO: 504 - protein, 738 aa, Adeno-associated virus
MAADGYLPDWLEDNLSEGIREWWDLKPGAPKPKANQQKQDDGRGLVLPGYKYLGPFNGLDKGEPVNAADAAALEHDKAYDQQLKAGDNPYLRYNHADAEFQERLQEDTSFGGNLGRAVFQAKKRVLEPLGLVEEGAKTAPGKKRPVEPSPQRSPDSSTGIGKKGQQPARKRLNFGQTGDSESVPDPQPLGEPPAAPSSVGSGTMAAGGGAPMADNNEGADGVGSSSGNWHCDSTWLGDRVITTSTRTWALPTYNNHLYKQISNGTSGGSTNDNTYFGYSTPWGYFDFNRFHCHFSPRDWQRLINNNWGFRPKRLSFKLFNIQVKEVTQNEGTKTIANNLTSTIQVFTDSEYQLPYVLGSAHQGCLPPFPADVFMIPQYGYLTLNNGSQAVGRSSFYCLEYFPSQMLRTGNNFSFSYTFEDVPFHSSYAHSQSLDRLMNPLIDQYLYYLSRTQSTGGTAGTQQLLFSQAGPSNMSAQARNWLPGPCYRQQRVSTTLSQNNNSNFAWTGATKYHLNGRDSLVNPGVAMATNKDDEDRFFPSSGILMFGKQGAGKDNVDYSNVMLTSEEEIKTTNPVATEQYGVVADNLQRQNTAPIVGAVNSQGALPGMVWQNRDVYLQGPIWAKIPHTDGNFHPSPLMGGFGLKHPPPQILIKNTPVPADPPTAFNQAKLNSFITQYSTGQVSVEIEWELQKENSKRWNPEIQYTSNYYKSTNVDFAVNTEGVYSEPRPIGTRYLTRNL

SEQ ID NO: 505 - protein, 736 aa, Adeno-associated virus
MAADGYLPDWLEDNLSEGIREWLNLKPGAPQPKANQQKQDNARGLVLPGYKYLGPFNGLDKGDPVNEADAAALEHDKAYGQQLKAGDNPYLKYNHADAEFQERLQKDTSFGGNLGKAVFQAKKRILEPLGLVETPAKTAPGKKRPVDPSPQRSPDSSSGIGKKSPHPARKRLNFGQTGEAESVPDPQPIGEPPSDPSSVGSGTMAAGGGAPMADNNEGADGVGNSSGNWHCDSTWLGDRVITTSTRTWALPTYNNHLYKQISSQSGATNDNHYFGYSTPWGYFDFNRFHCHFSPRDWQRLINNNWGFRPKRLSFKLFNIQVKEVTQNDGTTTIANNLTSTVQVFTDSEYQLPYVLGSAHQGCLPPFPADVFMIPQYGYLTLNNGSQAVGRSSFYCLEYFPSQMLRTGNNFQFSYTFEDVPFHSSYAHSQSLDRLMNPLIDQYLYYLSKTQGTNATVQGAKLQFSQAGPSNMRDQARNWLPGPCYRQQRVSKTANDNNNSEYAWTGATKYHLNGRDSLVNPGPAMASHKDDEEKFFPMNGTLVFGKNGAGNSNVDIENVMITDEEEIRTTNPVATEQYGVVSDNLQSSNTRPITGDVDSQGVLPGMVWQDRDVYLQGPIWAKIPHTDGHFHPSPLMGGFGLKHPPPQILIKNTPVPANPATTFTPGKFASFITQYSTGQVSVQIEWELQKENSKRWNPEIQYTSNYNKSVNVDFTVDTNGVYSEPRPIGTRYLTRNL

SEQ ID NO: 506 - protein, 736 aa, Adeno-associated virus; identical to SEQ ID NO: 81

SEQ ID NO: 507 - protein, 736 aa, Adeno-associated virus
MAADGYLPDWLEDNLSEGIREWWDLKPGAPKPKANQQKQDDGRGLVLPGYKYLGPFNGLDKGEPVNAADAAALEHDKAYDQQLKAGDNPYLRYNHADAEFQERLQEDTSFGGNLGRAVFQAKKRVLEPLGLVEEGAKTAPGKKRPVEQSPQEPDSSSGIGKTGQQPAKKRLNFGQTGDSESVPDPQPLGEPPAAPSGLGPNTMASGGGAPMADNNEGADGVGNSSGNWHCDSTWLGDRVITTSTRTWALPTYNNHLYKQISNGTSGGSTNDNTYFGYSTPWGYFDFNRFHCHFSPRDWQRLINNNWGFRPKRLNFKLFNIQVKEVTTNEGTKTIANNLTSTVQVFTDSEYQLPYVLGSAHQGCLPPFPADVFMVPQYGYLTLNNGSQALGRSSFYCLEYFPSQMLRTGNNFQFSYTFEDVPFHSSYAHSQSLDRLMNPLIDQYLYYLVRTQTTGTGGTQTLAFSQAGPSSMANQARNWVPGPCYRQQRVSTTTNQNNNSNFAWTGAAKFKLNGRDSLMNPGVAMASHKDDEDRFFPSSGVLIFGKQGAGNDGVDYSQVLITDEEEIKATNPVATEEYGAVAINNQAANTQAQTGLVHNQGVIPGMVWQNRDVYLQGPIWAKIPHTDGNFHPSPLMGGFGLKHPPPQILIKNTPVPADPPLTFNQAKLNSFITQYSTGQVSVEIEWELQKENSKRWNPEIQYTSNYYKSTNVDFAVNTEGVYSEPRPIGTRYLTRNL

SEQ ID NO: 508 - protein, 736 aa, synthetic construct; identical to SEQ ID NO: 507
  REGION 1..736: note = Description of Artificial Sequence: Synthetic polypeptide

SEQ ID NO: 509 - protein, 736 aa, synthetic construct
  REGION 1..736: note = Description of Artificial Sequence: Synthetic polypeptide
MAADGYLPDWLEDNLSEGIREWWDLKPGAPKPKANQQKQDDGRGLVLPGYKYLGPFNGLDKGEPVNAADAAALEHDKAYDQQLKAGDNPYLRYNHADAEFQERLQEDTSFGGNLGRAVFQAKKRVLEPLGLVEEGAKTAPGKKRPVEQSPQEPDSSSGIGKTGQQPAKKRLNFGQTGDSESVPDPQPLGEPPAAPSGLGPNTMASGGGAPMADNNEGADGVGNSSGNWHCDSTWLGDRVITTSTRTWALPTYNNHLYKQISNGTSGGSTNDNTYFGYSTPWGYFDFNRFHCHFSPRDWQRLINNNWGFRPKRLNFKLFNIQVKEVTTNEGTKTIANNLTSTVQVFTDSEYQLPYVLGSAHQGCLPPFPADVFMVPQYGYLTLNNGSQALGRSSFYCLEYFPSQMLRTGNNFQFSYTFEDVPFHSSYAHSQSLDRLMNPLIDQYLYYLVRTQTTGTGGTQTLAFSQAGPSSMANQARNWVPGPCYRQQRVSTTTNQNNNSNFAWTGAAKFKLNGRDSLMNPGVAMASHKDDEDRFFPSSGVLIFGKQGAGNDGVDYSQVLITDEEEIKATNPVATEEYGAVAINNQRANTQAQTGLVHNQGVIPGMVWQNRDVYLQGPIWAKIPHTDGNFHPSPLMGGFGLKHPPPQILIKNTPVPADPPLTFNQAKLNSFITQYSTGQVSVEIEWELQKENSKRWNPEIQYTSNYYKSTNVDFAVNTEGVYSEPRPIGTRYLTRNL

SEQ ID NO: 510 - protein, 736 aa, synthetic construct
  REGION 1..736: note = Description of Artificial Sequence: Synthetic polypeptide
MAADGYLPDWLEDNLSEGIREWWDLKPGAPKPKANQQKQDDGRGLVLPGYKYLGPFNGLDKGEPVNAADAAALEHDKAYDQQLKAGDNPYLRYNHADAEFQERLQEDTSFGGNLGRAVFQAKKRVLEPLGLVEEGAKTAPGKKRPVEQSPQEPDSSSGIGKTGQQPAKKRLNFGQTGDSESVPDPQPLGEPPAAPSGLGPNTMASGGGAPMADNNEGADGVGNSSGNWHCDSTWLGDRVITTSTRTWALPTYNNHLYKQISNGTSGGSTNDNTYFGYSTPWGYFDFNRFHCHFSPRDWQRLINNNWGFRPKRLNFKLFNIQVKEVTTNEGTKTIANNLTSTVQVFTDSEYQLPYVLGSAHQGCLPPFPADVFMVPQYGYLTLNNGSQALGRSSFYCLEYFPSQMLRTGNNFQFSYTFEDVPFHSSYAHSQSLDRLMNPLIDQYLYYLVRTQTTGTGGTQTLAFSQAGPSSMANQARNWVPGPCYRQQRVSTTTNQNNNSNFAWTGAAKFKLNGRDSLMNPGVAMASHKDDEDAFFPSSGVLIFGKQGAGNDGVDYSQVLITDEEEIKATNPVATEEYGAVAINNQAANTQAQTGLVHNQGVIPGMVWQNRDVYLQGPIWAKIPHTDGNFHPSPLMGGFGLKHPPPQILIKNTPVPADPPLTFNQAKLNSFITQYSTGQVSVEIEWELQKENSKRWNPEIQYTSNYYKSTNVDFAVNTEGVYSEPRPIGTRYLTRNL

SEQ ID NO: 511 - DNA, 1803 bp, Bovine adeno-associated virus
  source 1..1803: mol_type = genomic DNA
acggcgcctgcggcaaaaaagaggcctctagagcagagtcctcaagagccagactcctcgagcggagttggcaagaaaggcaaacagcctgccagaaagagactcaactttgacgacgaacctggagccggagacgggcctcccccagaaggaccatcttccggagctatgtctactgagactgaaatgcgtgcagcagctggcggaaatggtggcgatgcgggacaaggtgccgagggagtgggtaatgcctccggtgattggcattgcgattccacttggtcagagagccacgtcaccaccacctcaacccgcacctgggtcctgccgacctacaacaaccacctgtacctgcggctcggctcgagcaacgccagcgacaccttcaacggattctccaccccctggggatactttgactttaaccgcttccactgccacttctcgccaagagactggcaaaggctcatcaacaaccactggggactgcgccccaaaagcatgcaagtccgcatcttcaacatccaagttaaggaggtcacgacgtctaacggggagacgaccgtatccaacaacctcaccagcacggtccagatctttgcggacagcacgtacgagctcccgtacgtgatggatgcaggtcaggagggcagcttgcctcctttccccaacgacgtgttcatggtgcctcagtacgggtactgcggactggtaaccggaggcagctctcaaaaccagacagacagaaatgccttctactgtctggagtactttcccagccagatgctgagaaccggaaacaactttgagatggtgtacaagtttgaaaacgtgcccttccactccatgtacgctcacagccagagcctggataggctgatgaacccgctgctggaccagtacctgtgggagctccagtctaccacctctggaggaactctcaaccagggcaattcagccaccaactttgccaagctgaccaaaacaaacttttctggctaccgcaaaaactggctcccggggcccatgatgaagcagcagagattctccaagactgccagtcaaaactacaagattccccagggaagaaacaacagtctgctccattatgagaccagaactaccctcgacggaagatggagcaattttgccccgggaacggccatggcaaccgcagccaacgacgccaccgacttctctcaggcccagctcatctttgcggggcccaacatcaccggcaacaccaccacagatgccaataacctgatgttcacttcagaagatgaacttagggccaccaacccccgggacactgacctgtttggccacctggcaaccaaccagcaaaacgccaccaccgttcctaccgtagacgacgtggacggagtcggcgtgtacccgggaatggtgtggcaggacagagacatttactaccaagggcccatttgggccaaaattccacacacggatggacactttcacccgtctcctctcattggcggatttggactgaaaagcccgcctccacaaatattcatcaaaaacactcctgtacccgccaatcccgcaacgaccttctctccggccagaatcaacagcttcatcacccagtacagcaccggacaggtggctgtcaaaatagaatgggaaatccagaaggagcggtccaagagatggaacccagaggtccagttcacgtccaactacggagcacaggactcgcttctctgggctcccgacaacgccggagcctacaaagagcccagggccattggatcccgatacctcaccaaccacctctag

SEQ ID NO: 512 - DNA, 1617 bp, Bovine adeno-associated virus
  source 1..1617: mol_type = genomic DNA
atgcgtgcagcagctggcggaaatggtggcgatgcgggacaaggtgccgagggagtgggtaatgcctccggtgattggcattgcgattccacttggtcagagagccacgtcaccaccacctcaacccgcacctgggtcctgccgacctacaacaaccacctgtacctgcggctcggctcgagcaacgccagcgacaccttcaacggattctccaccccctggggatactttgactttaaccgcttccactgccacttctcgccaagagactggcaaaggctcatcaacaaccactggggactgcgccccaaaagcatgcaagtccgcatcttcaacatccaagttaaggaggtcacgacgtctaacggggagacgaccgtatccaacaacctcaccagcacggtccagatctttgcggacagcacgtacgagctcccgtacgtgatggatgcaggtcaggagggcagcttgcctcctttccccaacgacgtgttcatggtgcctcagtacgggtactgcggactggtaaccggaggcagctctcaaaaccagacagacagaaatgccttctactgtctggagtactttcccagccagatgctgagaaccggaaacaactttgagatggtgtacaagtttgaaaacgtgcccttccactccatgtacgctcacagccagagcctggataggctgatgaacccgctgctggaccagtacctgtgggagctccagtctaccacctctggaggaactctcaaccagggcaattcagccaccaactttgccaagctgaccaaaacaaacttttctggctaccgcaaaaactggctcccggggcccatgatgaagcagcagagattctccaagactgccagtcaaaactacaagattccccagggaagaaacaacagtctgctccattatgagaccagaactaccctcgacggaagatggagcaattttgccccgggaacggccatggcaaccgcagccaacgacgccaccgacttctctcaggcccagctcatctttgcggggcccaacatcaccggcaacaccaccacagatgccaataacctgatgttcacttcagaagatgaacttagggccaccaacccccgggacactgacctgtttggccacctggcaaccaaccagcaaaacgccaccaccgttcctaccgtagacgacgtggacggagtcggcgtgtacccgggaatggtgtggcaggacagagacatttactaccaagggcccatttgggccaaaattccacacacggatggacactttcacccgtctcctctcattggcggatttggactgaaaagcccgcctccacaaatattcatcaaaaacactcctgtacccgccaatcccgcaacgaccttctctccggccagaatcaacagcttcatcacccagtacagcaccggacaggtggctgtcaaaatagaatgggaaatccagaaggagcggtccaagagatggaacccagaggtccagttcacgtccaactacggagcacaggactcgcttctctgggctcccgacaacgccggagcctacaaagagcccagggccattggatcccgatacctcaccaaccacctctag

SEQ ID NO: 513 - DNA, 1173 bp, Bovine adeno-associated virus
  source 1..1173: mol_type = genomic DNA
atggcgctggtaagctggctggtggaacatggcatcacttccgagaagcagtggattcaggagaatcaggagagctacctgtccttcaactccacgggaaactctcggagccagattaaagccgcgcttgacaacgcgtcaaaaattatgagtctgaccaaatctgcctcagactatctcgtgggacagactgttccagaggacatttctgaaaacagaatctggcagatttttgatctcaacggctacgacccggcatacgcgggctctgttctctacggctggtgcactcgcgcctttggaaagaggaacaccgtctggctgtatggacccgcgaccaccggaaagaccaacatcgcggaagccatctctcacaccgtgcccttttatggctgtgtgaactggactaatgagaactttccctttaatgactgtgtggaaaaaatgttgatctggtgggaggagggaaagatgaccagcaaggtggtggaacccgccaaggccatcttgggggggtctagagtacgagtggatcaaaaatgtaaatcctctgtacaagtagactctaccccggtgattatcacctccaatactaacatgtgtgtggtggtggatgggaactccacgacctttgaacaccagcagccgctggaagaccgcatgttcagatttgaactcatgcggcggctcccgccagattttggcaagattaccaagcaggaagtcaaagacttttttgcttgggcaaaggtcaaccaggtgccggtgactcacgagtttatggttcccaagaaagtggcgggaactgagagggcggagacttctagaaaacgcccactggatgacgtcaccaataccaactataaaagtccggagaagcgggcccggctctcagttgttcctgagacgcctcgcagttcagacgtgcctgtagagcccgctcctctgcgacctctcaactggtcttccaggtatgaatgcagatgtgactatcatgctaaatttgactctgtaacgggggaatgtgacgagtgtgaatatttgaatcggggcaaaaatggctgtatctttcataatgctacacattgtcaaatttgtcacgctgttcctccatgggaaaaggaaaatgtgtcagattttaatgattttgatgactgtaataaagagcagtaa

SEQ ID NO: 514 - DNA, 1833 bp, Bovine adeno-associated virus
  source 1..1833: mol_type = genomic DNA
atggctaccttctatgaagtcattgttcgcgttccatttgatgtggaagagcacctgcctggaatttctgacaactttgtagactgggtaactggtcaaatttgggagctgcctcccgagtcagatttgaatttgactctgattgagcagcctcagctgacggtggctgacagaattcgccgcgtgttcctgtacgagtggaacaaattttccaagcaggagagcaaattctttgtgcagtttgaaaagggatctgaatattttcatctgcacacgctcgtggagacctccggcatctcttctatggtccttggccgctacgtgagtcagattcgcgcccagctggtgaaggtggtgttccagaacattgagccgcggattaacgactgggtcgccatcaccaaggtaaagaagggcggagccaataaggtggtggattctgggtatattcccgcctacctgctgccgaaggtccaaccagagcttcagtgggcgtggactaacctcgaagagtataaattggccgccctcaatctggaggagcgcaaacggctcgtcgctcagtttcagcttgagtcctcgcagcgctcgcaagaggcatcttcccagagggacgtttcggctgacccggtcatcaagagcaagacttcccagaaatacatggcgctggtaagctggctggtggaacatggcatcacttccgagaagcagtggattcaggagaatcaggagagctacctgtccttcaactccacgggaaactctcggagccagattaaagccgcgcttgacaacgcgtcaaaaattatgagtctgaccaaatctgcctcagactatctcgtgggacagactgttccagaggacatttctgaaaacagaatctggcagatttttgatctcaacggctacgacccggcatacgcgggctctgttctctacggctggtgcactcgcgcctttggaaagaggaacaccgtctggctgtatggacccgcgaccaccggaaagaccaacatcgcggaagccatctctcacaccgtgcccttttatggctgtgtgaactggactaatgagaactttccctttaatgactgtgtggaaaaaatgttgatctggtgggaggagggaaagatgaccagcaaggtggtggaacccgccaaggccatcttgggggggtctagagtacgagtggatcaaaaatgtaaatcctctgtacaagtagactctaccccggtgattatcacctccaatactaacatgtgtgtggtggtggatgggaactccacgacctttgaacaccagcagccgctggaagaccgcatgttcagatttgaactcatgcggcggctcccgccagattttggcaagattaccaagcaggaagtcaaagacttttttgcttgggcaaaggtcaaccaggtgccggtgactcacgagtttatggttcccaagaaagtggcgggaactgagagggcggagacttctagaaaacgcccactggatgacgtcaccaataccaactataaaagtccggagaagcgggcccggctctcagttgttcctgagacgcctcgcagttcagacgtgcctgtagagcccgctcctctgcgacctctcaactggtcttccaggtatgaatgcagatgtgactatcatgctaaatttgactctgtaacgggggaatgtgacgagtgtgaatatttgaatcggggcaaaaatggctgtatctttcataatgctacacattgtcaaatttgtcacgctgttcctccatgggaaaaggaaaatgtgtcagattttaatgattttgatgactgtaataaagagcagtaa

SEQ ID NO: 515 - DNA, 2211 bp, Bovine adeno-associated virus
  source 1..2211: mol_type = genomic DNA
atgtcttttgttgaccaccctccagattggttggaatcgatcggcgacggctttcgtgaatttctcggccttgaggcgggtcccccgaaacccaaggccaatcaacagaagcaagataacgctcgaggtcttgtgcttcctgggtacaagtatcttggtcctgggaacggccttgataagggcgatcctgtcaattttgctgacgaggttgcccgagagcacgacctctcctaccagaaacagcttgaggcgggcgataacccttacctcaagtacaaccacgcggacgcagagtttcaggagaaactcgcttctgacacttcttttgggggaaaccttgggaaggctgttttccaggctaaaaagaggattctcgaacctcttggcctggttgagacgccggataaaacggcgcctgcggcaaaaaagaggcctctagagcagagtcctcaagagccagactcctcgagcggagttggcaagaaaggcaaacagcctgccagaaagagactcaactttgacgacgaacctggagccggagacgggcctcccccagaaggaccatcttccggagctatgtctactgagactgaaatgcgtgcagcagctggcggaaatggtggcgatgcgggacaaggtgccgagggagtgggtaatgcctccggtgattggcattgcgattccacttggtcagagagccacgtcaccaccacctcaacccgcacctgggtcctgccgacctacaacaaccacctgtacctgcggctcggctcgagcaacgccagcgacaccttcaacggattctccaccccctggggatactttgactttaaccgcttccactgccacttctcgccaagagactggcaaaggctcatcaacaaccactggggactgcgccccaaaagcatgcaagtccgcatcttcaacatccaagttaaggaggtcacgacgtctaacggggagacgaccgtatccaacaacctcaccagcacggtccagatctttgcggacagcacgtacgagctcccgtacgtgatggatgcaggtcaggagggcagcttgcctcctttccccaacgacgtgttcatggtgcctcagtacgggtactgcggactggtaaccggaggcagctctcaaaaccagacagacagaaatgccttctactgtctggagtactttcccagccagatgctgagaaccggaaacaactttgagatggtgtacaagtttgaaaacgtgcccttccactccatgtacgctcacagccagagcctggataggctgatgaacccgctgctggaccagtacctgtgggagctccagtctaccacctctggaggaactctcaaccagggcaattcagccaccaactttgccaagctgaccaaaacaaacttttctggctaccgcaaaaactggctcccggggcccatgatgaagcagcagagattctccaagactgccagtcaaaactacaagattccccagggaagaaacaacagtctgctccattatgagaccagaactaccctcgacggaagatggagcaattttgccccgggaacggccatggcaaccgcagccaacgacgccaccgacttctctcaggcccagctcatctttgcggggcccaacatcaccggcaacaccaccacagatgccaataacctgatgttcacttcagaagatgaacttagggccaccaacccccgggacactgacctgtttggccacctggcaaccaaccagcaaaacgccaccaccgttcctaccgtagacgacgtggacggagtcggcgtgtacccgggaatggtgtggcaggacagagacatttactaccaagggcccatttgggccaaaattccacacacggatggacactttcacccgtctcctctcattggcggatttggactgaaaagcccgcctccacaaatattcatcaaaaacactcctgtacccgccaatcccgcaacgaccttctctccggccagaatcaacagcttcatcacccagtacagcaccggacaggtggctgtcaaaatagaatgggaaatccagaaggagcggtccaagagatggaacccagaggtccagttcacgtccaactacggagcacaggactcgcttctctgggctcccgacaacgccggagcctacaaagagcccagggccattggatcccgatacctcaccaaccacctctag

SEQ ID NO: 516 - DNA, 4694 bp, Bovine adeno-associated virus
  source 1..4694: mol_type = genomic DNA
gtggcactcccccccctgtcgcgttcgctcgttcgctggctcgattgggggggtggcagctcaaagagctgccagacgacggccctctgggccgtcgcccccccaatcgagccagcgaacgagcgaacgcgacaggggggggagtgccacactctctagcaagggggttttgtaggtggtgatgtcattgttgatgtcattatagttgtcacgcgatagttaatgattaacagtcatgtgatgtgtgttatccaataggatgaaagcgcgcgaatgagatctcgcgagacttccggggtataaaaggggtgagtgaacgagcccgccgccattctctgctctggactgctagaggaccctcgctgccatggctaccttctatgaagtcattgttcgcgttccatttgatgtggaagagcacctgcctggaatttctgacaactttgtagactgggtaactggtcaaatttgggagctgcctcccgagtcagatttgaatttgactctgattgagcagcctcagctgacggtggctgacagaattcgccgcgtgttcctgtacgagtggaacaaattttccaagcaggagagcaaattctttgtgcagtttgaaaagggatctgaatattttcatctgcacacgctcgtggagacctccggcatctcttctatggtccttggccgctacgtgagtcagattcgcgcccagctggtgaaggtggtgttccagaacattgagccgcggattaacgactgggtcgccatcaccaaggtaaagaagggcggagccaataaggtggtggattctgggtatattcccgcctacctgctgccgaaggtccaaccagagcttcagtgggcgtggactaacctcgaagagtataaattggccgccctcaatctggaggagcgcaaacggctcgtcgctcagtttcagcttgagtcctcgcagcgctcgcaagaggcatcttcccagagggacgtttcggctgacccggtcatcaagagcaagacttcccagaaatacatggcgctggtaagctggctggtggaacatggcatcacttccgagaagcagtggattcaggagaatcaggagagctacctgtccttcaactccacgggaaactctcggagccagattaaagccgcgcttgacaacgcgtcaaaaattatgagtctgaccaaatctgcctcagactatctcgtgggacagactgttccagaggacatttctgaaaacagaatctggcagatttttgatctcaacggctacgacccggcatacgcgggctctgttctctacggctggtgcactcgcgcctttggaaagaggaacaccgtctggctgtatggacccgcgaccaccggaaagaccaacatcgcggaagccatctctcacaccgtgcccttttatggctgtgtgaactggactaatgagaactttccctttaatgactgtgtggaaaaaatgttgatctggtgggaggagggaaagatgaccagcaaggtggtggaacccgccaaggccatcttgggggggtctagagtacgagtggatcaaaaatgtaaatcctctgtacaagtagactctaccccggtgattatcacctccaatactaacatgtgtgtggtggtggatgggaactccacgacctttgaacaccagcagccgctggaagaccgcatgttcagatttgaactcatgcggcggctcccgccagattttggcaagattaccaagcaggaagtcaaagacttttttgcttgggcaaaggtcaaccaggtgccggtgactcacgagtttatggttcccaagaaagtggcgggaactgagagggcggagacttctagaaaacgcccactggatgacgtcaccaataccaactataaaagtccggagaagcgggcccggctctcagttgttcctgagacgcctcgcagttcagacgtgcctgtagagcccgctcctctgcgacctctcaactggtcttccaggtatgaatgcagatgtgactatcatgctaaatttgactctgtaacgggggaatgtgacgagtgtgaatatttgaatcggggcaaaaatggctgtatctttcataatgctacacattgtcaaatttgtcacgctgttcctccatgggaaaaggaaaatgtgtcagattttaatgattttgatgactgtaataaagagcagtaaataaagtgagtagtcatgtcttttgttgaccaccctccagattggttggaatcgatcggcgacggctttcgtgaatttctcggccttgaggcgggtcccccgaaacccaaggccaatcaacagaagcaagataacgctcgaggtcttgtgcttcctgggtacaagtatcttggtcctgggaacggccttgataagggcgatcctgtcaattttgctgacgaggttgcccgagagcacgacctctcctaccagaaacagcttgaggcgggcgataacccttacctcaagtacaaccacgcggacgcagagtttcaggagaaactcgcttctgacacttcttttgggggaaaccttgggaaggctgttttccaggctaaaaagaggattctcgaacctcttggcctggttgagacgccggataaaacggcgcctgcggcaaaaaagaggcctctagagcagagtcctcaagagccagactcctcgagcggagttggcaagaaaggcaaacagcctgccagaaagagactcaactttgacgacgaacctggagccggagacgggcctcccccagaaggaccatcttccggagctatgtctactgagactgaaatgcgtgcagcagctggcggaaatggtggcgatgcgggacaaggtgccgagggagtgggtaatgcctccggtgattggcattgcgattccacttggtcagagagccacgtcaccaccacctcaacccgcacctgggtcctgccgacctacaacaaccacctgtacctgcggctcggctcgagcaacgccagcgacaccttcaacggattctccaccccctggggatactttgactttaaccgcttccactgccacttctcgccaagagactggcaaaggctcatcaacaaccactggggactgcgccccaaaagcatgcaagtccgcatcttcaacatccaagttaaggaggtcacgacgtctaacggggagacgaccgtatccaacaacctcaccagcacggtccagatctttgcggacagcacgtacgagctcccgtacgtgatggatgcaggtcaggagggcagcttgcctcctttccccaacgacgtgttcatggtgcctcagtacgggtactgcggactggtaaccggaggcagctctcaaaaccagacagacagaaatgccttctactgtctggagtactttcccagccagatgctgagaaccggaaacaactttgagatggtgtacaagtttgaaaacgtgcccttccactccatgtacgctcacagccagagcctggataggctgatgaacccgctgctggaccagtacctgtgggagctccagtctaccacctctggaggaactctcaaccagggcaattcagccaccaactttgccaagctgaccaaaacaaacttttctggctaccgcaaaaactggctcccggggcccatgatgaagcagcagagattctccaagactgccagtcaaaactacaagattccccagggaagaaacaacagtctgctccattatgagaccagaactaccctcgacggaagatggagcaattttgccccgggaacggccatggcaaccgcagccaacgacgccaccgacttctctcaggcccagctcatctttgcggggcccaacatcaccggcaacaccaccacagatgccaataacctgatgttcacttcagaagatgaacttagggccaccaacccccgggacactgacctgtttggccacctggcaaccaaccagcaaaacgccaccaccgttcctaccgtagacgacgtggacggagtcggcgtgtacccgggaatggtgtggcaggacagagacatttactaccaagggcccatttgggccaaaattccacacacggatggacactttcacccgtctcctctcattggcggatttggactgaaaagcccgcctccacaaatattcatcaaaaacactcctgtacccgccaatcccgcaacgaccttctctccggccagaatcaacagcttcatcacccagtacagcaccggacaggtggctgtcaaaatagaatgggaaatccagaaggagcggtccaagagatggaacccagaggtccagttcacgtccaactacggagcacaggactcgcttctctgggctcccgacaacgccggagcctacaaagagcccagggccattggatcccgatacctcaccaaccacctctagcccaattctgttgcataccctcaataaaccgtgtattcgtttcagtaaaatactgcctcttgtggtcattcggcgtacaacagcttacaacaacaacaaaacccccttgctagagagtgtggcactcccccccctgtcgcgttcgctcgttcgctggctcgattgggggggtggcagctcaaagagctgccagacgacggccctctgggccgtcgcccccccaatcgagccagcgaacgagcgaacgcgacaggggggggagtgccac

SEQ ID NO: 517 - protein, 390 aa, Bovine adeno-associated virus
MALVSWLVEHGITSEKQWIQENQESYLSFNSTGNSRSQIKAALDNASKIMSLTKSASDYLVGQTVPEDISENRIWQIFDLNGYDPAYAGSVLYGWCTRAFGKRNTVWLYGPATTGKTNIAEAISHTVPFYGCVNWTNENFPFNDCVEKMLIWWEEGKMTSKVVEPAKAILGGSRVRVDQKCKSSVQVDSTPVIITSNTNMCVVVDGNSTTFEHQQPLEDRMFRFELMRRLPPDFGKITKQEVKDFFAWAKVNQVPVTHEFMVPKKVAGTERAETSRKRPLDDVTNTNYKSPEKRARLSVVPETPRSSDVPVEPAPLRPLNWSSRYECRCDYHAKFDSVTGECDECEYLNRGKNGCIFHNATHCQICHAVPPWEKENVSDFNDFDDCNKEQ

SEQ ID NO: 518 - protein, 610 aa, Bovine adeno-associated virus
MATFYEVIVRVPFDVEEHLPGISDNFVDWVTGQIWELPPESDLNLTLIEQPQLTVADRIRRVFLYEWNKFSKQESKFFVQFEKGSEYFHLHTLVETSGISSMVLGRYVSQIRAQLVKVVFQNIEPRINDWVAITKVKKGGANKVVDSGYIPAYLLPKVQPELQWAWTNLEEYKLAALNLEERKRLVAQFQLESSQRSQEASSQRDVSADPVIKSKTSQKYMALVSWLVEHGITSEKQWIQENQESYLSFNSTGNSRSQIKAALDNASKIMSLTKSASDYLVGQTVPEDISENRIWQIFDLNGYDPAYAGSVLYGWCTRAFGKRNTVWLYGPATTGKTNIAEAISHTVPFYGCVNWTNENFPFNDCVEKMLIWWEEGKMTSKVVEPAKAILGGSRVRVDQKCKSSVQVDSTPVIITSNTNMCVVVDGNSTTFEHQQPLEDRMFRFELMRRLPPDFGKITKQEVKDFFAWAKVNQVPVTHEFMVPKKVAGTERAETSRKRPLDDVTNTNYKSPEKRARLSVVPETPRSSDVPVEPAPLRPLNWSSRYECRCDYHAKFDSVTGECDECEYLNRGKNGCIFHNATHCQICHAVPPWEKENVSDFNDFDDCNKEQ

SEQ ID NO: 519 - protein, 538 aa, Bovine adeno-associated virus
MRAAAGGNGGDAGQGAEGVGNASGDWHCDSTWSESHVTTTSTRTWVLPTYNNHLYLRLGSSNASDTFNGFSTPWGYFDFNRFHCHFSPRDWQRLINNHWGLRPKSMQVRIFNIQVKEVTTSNGETTVSNNLTSTVQIFADSTYELPYVMDAGQEGSLPPFPNDVFMVPQYGYCGLVTGGSSQNQTDRNAFYCLEYFPSQMLRTGNNFEMVYKFENVPFHSMYAHSQSLDRLMNPLLDQYLWELQSTTSGGTLNQGNSATNFAKLTKTNFSGYRKNWLPGPMMKQQRFSKTASQNYKIPQGRNNSLLHYETRTTLDGRWSNFAPGTAMATAANDATDFSQAQLIFAGPNITGNTTTDANNLMFTSEDELRATNPRDTDLFGHLATNQQNATTVPTVDDVDGVGVYPGMVWQDRDIYYQGPIWAKIPHTDGHFHPSPLIGGFGLKSPPPQIFIKNTPVPANPATTFSPARINSFITQYSTGQVAVKIEWEIQKERSKRWNPEVQFTSNYGAQDSLLWAPDNAGAYKEPRAIGSRYLTNHL

SEQ ID NO: 520 - protein, 736 aa, synthetic construct
  REGION 1..736: note = Description of Artificial Sequence: Synthetic polypeptide
MSFVDHPPDWLESIGDGFREFLGLEAGPPKPKANQQKQDNARGLVLPGYKYLGPGNGLDKGDPVNFADEVAREHDLSYQKQLEAGDNPYLKYNHADAEFQEKLASDTSFGGNLGKAVFQAKKRILEPLGLVETPDKTAPAAKKRPLEQSPQEPDSSSGVGKKGKQPARKRLNFDDEPGAGDGPPPEGPSSGAMSTETEMRAAAGGNGGDAGQGAEGVGNASGDWHCDSTWSESHVTTTSTRTWVLPTYNNHLYLRLGSSNASDTFNGFSTPWGYFDFNRFHCHFSPRDWQRLINNHWGLRPKSMQVRIFNIQVKEVTTSNGETTVSNNLTSTVHIFADSTYELPYVMDAGQEGSLPPFPNDVFMVPQYGYCGLVTGGSSQNQTDRNAFYCLEYFPSQMLRTGNNFEMVYKFENVPFHSMYAHSQSLDRLMNPLLDQYLWELQSTTSGGTLNQGNSATNFAKLTNKNFSGYRKNWLPGPMMKQQRFSKTASQNYKIPQGGNNSLLHYETRTTLDRRWSNFAPGTAMATAANDATDFSQAQLIFAGPNITGNTTTDANNLMFTSEDELRATNPRDTDLFGHLATNQQNATTVPTVDDVDGVGVYPGMVWQDRDIYYQGPIWAKIPHTDGHFHPSPLIGGFGLKSPPPQIFIKNTPVPANPATTFSPARINSFITQYSTGQVAVKIEWEIQKERSKRWNPEVQFTSNYGAQDSLLWAPDNAGAYKEPRAIGSRYLTNHL

SEQ ID NO: 521 - protein, 736 aa, synthetic construct
  REGION 1..736: note = Description of Artificial Sequence: Synthetic polypeptide
MSFVDHPPDWLESIGDGFREFLGLEAGPPKPKANQQKQDNARGLVLPGYKYLGPGNGLDKGDPVNFADEVAREHDLSYQKQLEAGDNPYLKYNHADAEFQEKLASDTSFGGNLGKAVFQAKKRILEPLGLVETPDKTAPAAKKRPLEQSPQEPDSSSGVGKKGKQPARKRLNFDDEPGAGDGPPPEGPSSGAMSTETEMRAAAGGNGGDAGQGAEGVGNASGDWHCDSTWSESHVTTTSTRTWVLPTYNNHLYLRLGSSNASDTFNGFSTPWGYFDFNRFHCHFSPRDWQRLINNHWGLRPKSMQVRIFNIQVKEVTTSNGETTVSNNLTSTVQIFADSTYELPYVMDAGQEGSLPPFPNDVFMVPQYGYCGLVTGGSSQNQTDRNAFYCLEYFPSQMLRTGNNFEMVYKFENVPFHSMYAHSQSLDRLMNPLLDQYLWELQSTTSGGTLNQGNSATNFAKLTKTNFSGYRKNWLPGPMMKQQRFSKTASQNYKIPQGRNNSLLHYETRTTLDGRWSNFAPGTAMATAANDATDFSQAQLIFAGPNITGNTTTDANNLMFTSEDELRATNPRDTDLFGHLATNQQNATTVPTVDDVDGVGVYPGMVWQDRDIYYQGPIWAKIPHTDGHFHPSPLIGGFGLKSPPPQIFIKNTPVPANPATTFSPARINSFITQYSTGQVAVKIEWEIQKERSKRWNPEVQFTSNYGAQDSLLWAPDNAGAYKEPRAIGSRYLTNHL

SEQ ID NO: 522 - protein, 736 aa, Bovine adeno-associated virus; identical to SEQ ID NO: 521

SEQ ID NO: 523 - protein, 600 aa, Bovine adeno-associated virus
TAPAAKKRPLEQSPQEPDSSSGVGKKGKQPARKRLNFDDEPGAGDGPPPEGPSSGAMSTETEMRAAAGGNGGDAGQGAEGVGNASGDWHCDSTWSESHVTTTSTRTWVLPTYNNHLYLRLGSSNASDTFNGFSTPWGYFDFNRFHCHFSPRDWQRLINNHWGLRPKSMQVRIFNIQVKEVTTSNGETTVSNNLTSTVQIFADSTYELPYVMDAGQEGSLPPFPNDVFMVPQYGYCGLVTGGSSQNQTDRNAFYCLEYFPSQMLRTGNNFEMVYKFENVPFHSMYAHSQSLDRLMNPLLDQYLWELQSTTSGGTLNQGNSATNFAKLTKTNFSGYRKNWLPGPMMKQQRFSKTASQNYKIPQGRNNSLLHYETRTTLDGRWSNFAPGTAMATAANDATDFSQAQLIFAGPNITGNTTTDANNLMFTSEDELRATNPRDTDLFGHLATNQQNATTVPTVDDVDGVGVYPGMVWQDRDIYYQGPIWAKIPHTDGHFHPSPLIGGFGLKSPPPQIFIKNTPVPANPATTFSPARINSFITQYSTGQVAVKIEWEIQKERSKRWNPEVQFTSNYGAQDSLLWAPDNAGAYKEPRAIGSRYLTNHL

SEQ ID NO: 524 - DNA, 2214 bp, synthetic construct
  misc_feature 1..2214: note = Description of Artificial Sequence: Synthetic polynucleotide
  source 1..2214: mol_type = other DNA
atggctgccgatggttatcttccagattggctcgaggacactctctctgaaggaataagacagtggtggaagctcaaacctggcccaccaccaccaaagcccgcagagcggcataaggacgacagcaggggtcttgtgcttcctgggtacaagtacctcggacccttcaacggactcgacaagggagagccggtcaacgaggcagacgccgcggccctcgagcacgacaaagcctacgaccggcagctcgacagcggagacaacccgtacctcaagtacaaccacgccgacgcggagtttcaggagcgccttaaagaagatacgtcttttgggggcaacctcgggcgagcagtcttccaggccaaaaagaggcttcttgaacctcttggtctggttgaggaagcggctaagacggctcctggaaagaagaggcctgtagagcagtctcctcaggaaccggactcctcctcgggcatcggcaagacaggccagcagcccgctaaaaagagactcaatttcggtcagactggcgacacagagtcagtcccagaccctcaaccaatcggagaacctcccgcagccccctcaggtgtgggatctcttacaatggcttcaggtggtggcgcaccagtggcagacaataacgaaggtgccgatggagtgggtagttcctcgggaaattggcattgcgattcccaatggctgggggacagagtcatcaccaccagcacccgaacctgggccctgcccacctacaacaatcacctctacaagcaaatctccaacgggacatcgggaggagccaccaacgacaacacctacttcggctacagcaccccctgggggtattttgactttaacagattccactgccacttttcaccacgtgactggcagcgactcatcaacaacaactggggattccggcccaagagactcagcttcaagctcttcaacatccaggtcaaggaggtcacgcagaatgaaggcaccaagaccatcgccaataaccttaccagcacggtccaggtcttcacggactcggagtaccagctgccgtacgttctcggctctgcccaccagggctgcctgcctccgttcccggcggacgtgttcatgattccccagtacggctacctaacactcaacaacggtagtcaggccgtgggacgctcctccttctactgcctggaatactttccttcgcagatgctgagaaccggcaacaacttccagtttacttacaccttcgaggacgtgcctttccacagcagctacgcccacagccagagcttggaccggctgatgaatcctctgattgaccagtacctgtactacttgtctcggactcaaacaacaggaggcacggcaaatacgcagactctgggcttcagccaaggtgggcctaatacaatggccaatcaggcaaagaactggctgccaggaccctgttaccgccaacaacgcgtctcaacgacaaccgggcaaaacaacaatagcaactttgcctggactgctgggaccaaataccatctgaatggaagaaattcattggctaatcctggcatcgctatggcaacacacaaagacgacaaggagcgtttttttcccagtaacgggatcctgatttttggcaaacaaaatgctgccagagacaatgcggattacagcgatgtcatgctcaccagcgaggaagaaatcaaaaccactaaccctgtggctacagaggaatacggtatcgtggcagataacttgcagcagcaaaacacggctcctcaaattggaactgtcaacagccagggggccttacccggtatggtttggcagaaccgggacgtgtacctgcagggtcccatctgggccaagattcctcacacggacggcaacttccacccgtctccgctgatgggcggctttggcctgaaacatcctccgcctcagatcctgatcaagaacacgcctgtacctgcggatcctccgaccaccttcaaccagtcaaagctgaactctttcatcacgcaatacagcaccggacaggtcagcgtggaaattgaatgggagctgcagaaggaaaacagcaagcgctggaaccccgagatccagtacacctccaactactacaaatctacaagtgtggactttgctgttaatacagaaggcgtgtactctgaaccccaccccattggcacccgttacctcacccgtcccctgtaa

SEQ ID NO: 525 - protein, 737 aa, synthetic construct
  REGION 1..737: note = Description of Artificial Sequence: Synthetic polypeptide
MAADGYLPDWLEDTLSEGIRQWWKLKPGPPPPKPAERHKDDSRGLVLPGYKYLGPFNGLDKGEPVNEADAAALEHDKAYDRQLDSGDNPYLKYNHADAEFQERLKEDTSFGGNLGRAVFQAKKRLLEPLGLVEEAAKTAPGKKRPVEQSPQEPDSSSGIGKTGQQPAKKRLNFGQTGDTESVPDPQPIGEPPAAPSGVGSLTMASGGGAPVADNNEGADGVGSSSGNWHCDSQWLGDRVITTSTRTWALPTYNNHLYKQISNGTSGGATNDNTYFGYSTPWGYFDFNRFHCHFSPRDWQRLINNNWGFRPKRLSFKLFNIQVKEVTQNEGTKTIANNLTSTVQVFTDSEYQLPYVLGSAHQGCLPPFPADVFMIPQYGYLTLNNGSQAVGRSSFYCLEYFPSQMLRTGNNFQFTYTFEDVPFHSSYAHSQSLDRLMNPLIDQYLYYLSRTQTTGGTANTQTLGFSQGGPNTMANQAKNWLPGPCYRQQRVSTTTGQNNNSNFAWTAGTKYHLNGRNSLANPGIAMATHKDDKERFFPSNGILIFGKQNAARDNADYSDVMLTSEEEIKTTNPVATEEYGIVADNLQQQNTAPQIGTVNSQGALPGMVWQNRDVYLQGPIWAKIPHTDGNFHPSPLMGGFGLKHPPPQILIKNTPVPADPPTTFNQSKLNSFITQYSTGQVSVEIEWELQKENSKRWNPEIQYTSNYYKSTSVDFAVNTEGVYSEPHPIGTRYLTRPL

SEQ ID NO: 526 - protein, 736 aa, synthetic construct
  REGION 1..736: note = Description of Artificial Sequence: Synthetic polypeptide
MAADGYLPDWLEDNLSEGIREWWDLKPGAPKPKANQQKQDDGRGLVLPGYKYLGPFNGLDKGEPVNAADAAALEHDKAYDQQLKAGDNPYLRYNHADAEFQERLQEDTSFGGNLGRAVFQAKKRVLEPLGLVEEGAKTAPGKKRPVEQSPQEPDSSSGIGKTGQQPAKKRLNFGQTGDTESVPDPQPIGEPPAAPSGVGSLTMASGGGAPVADNNEGADGVGSSSGNWHCDSQWLGDRVITTSTRTWALPTYNNHLYKQISSASTGASNDNHYFGYSTPWGYFDFNRFHCHFSPRDWQRLINNNWGFRPKRLNFKLFNIQVKEVTDNNGVKTIANNLTSTVQVFTDSDYQLPYVLGSAHQGCLPPFPADVFMIPQYGYLTLNNGSQAVGRSSFYCLEYFPSQMLRTGNNFQFTYTFEDVPFHSSYAHSQSLDRLMNPLIDQYLYYLSRTQTTGGTANTQTLGFSQGGPNTMANQAKNWLPGPCYRQQRVSTTTGQNNNSNFAWTAGTKYHLNGRNSLANPGIAMATHKDDKERFFPSNGILIFGKQNAARDNADYSDVMLTSEEEIKTTNPVATEEYGIVADNLQQQNTAPQIGTVNSQGALPGMVWQNRDVYLQGPIWAKIPHTDGNFHPSPLMGGFGLKHPPPQILIKNTPVPADPPTTFNQSKLNSFITQYSTGQVSVEIEWELQKENSKRWNPEIQYTSNYYKSTSVDFAVNTEGVYSEPHPIGTRYLTRPL

SEQ ID NO: 527 - protein, 736 aa, synthetic construct
  REGION 1..736: note = Description of Artificial Sequence: Synthetic polypeptide
MAADGYLPDWLEDTLSEGIRQWWKLKPGPPPPKPAERHKDDSRGLVLPGYKYLGPFNGLDKGEPVNEADAAALEHDKAYDRQLDSGDNPYLKYNHADAEFQERLQGDTSFGGNLGRAVFQAKKRVLEPLGLVEEGAKTAPGKKRPVEQSPQEPDSSSGIGETGQQPAKKRLNFGQTGDSESVPDPQPLGEPPATPAAVGPTTMASGGGAPMADNNEGADGVGSSSGNWHCDSQWLGDRVITTSTRTWALPTYNNHLYKQISSASTGASNDNHYFGYSTPWGYFDFNRFHCHFSPRDWQRLINNNWGFRPKRLSFKLFNIQVKEVTDNNGVKTIANNLTSTVQVFTDSEYQLPYVLGSAHQGCLPPFPADVFMIPQYGYLTLNNGSQAVGRSSFYCLEYFPSQMLRTGNNFTFSYTFEDVPFHSSYAHSQSLDRLMNPLIDQYLYYLSRTQTTGGTANTQTLGFSQGGPNTMANQAKNWLPGPCYRQQRVSTTTGQNNNSNFAWTAGTKYHLNGRNSLANPGIAMATHKDDKERFFPSNGILIFGKQNAARDNADYSDVMLTSEEEIKTTNPVATEEYGIVADNLQQQNTAPQIGTVNSQGALPGMVWQNRDVYLQGPIWAKIPHTDGNFHPSPLMGGFGLKHPPPQILIKNTPVPADPPTTFNQSKLNSFITQYSTGQVSVEIEWELQKENSKRWNPEIQYTSNYYKSTSVDFAVNTEGVYSEPHPIGTRYLTRPL

SEQ ID NO: 528 - DNA, 2181 bp, synthetic construct
  misc_feature 1..2181: note = Description of Artificial Sequence: Synthetic polynucleotide
  source 1..2181: mol_type = other DNA
atgtcttttgttgatcaccctccagattggttggaagaagttggtgaaggtcttcgcgagtttttgggccttgaagcgggcccaccgaaaccaaaacccaatcagcagcatcaagatcaagcccgtggtcttgtgctgcctggttataactatctcggacccggaaacggtctcgatcgaggagagcctgtcaacagggcagacgaggtcgcgcgagagcacgacatctcgtacaacgagcagcttgaggcgggagacaacccctacctcaagtacaaccacgcggacgccgagtttcaggagaagctcgccgacgacacatccttcgggggaaacctcggaaaggcagtctttcaggccaagaaaagggttctcgaaccttttggcctggttgaagagggtgctaagacggcccctaccggaaagcggatagacgaccactttccaaaaagaaagaaggctcggaccgaagaggactccaagccttccacctcgtcagacgccgaagctggacccagcggatcccagcagctgcaaatcccagcacaaccagcctcaagtttgggagctgatacaatgtctgcgggaggtggcggcccattgggcgacaataaccaaggtgccgatggagtgggcaatgcctcgggagattggcattgcgattccacgtggatgggggacagagtcgtcaccaagtccacccgcacctgggtgctgcccagctacaacaaccaccagtaccgagagatcaaaagcggctccgtcgacggaagcaacgccaacgcctactttggatacagcaccccctgggggtactttgactttaaccgcttccacagccactggagcccccgagactggcaaagactcatcaacaactattggggcttcagaccccggtctctcagagtcaaaatcttcaacatccaagtcaaagaggtcacggtgcaggactccaccaccaccatcgccaacaacctcacctccaccgtccaagtgtttacggacgacgactaccaactcccgtacgtcgtcggcaacgggaccgagggatgcctgccggccttccccccgcaggtctttacgctgccgcagtacggctacgcgacgctgaaccgagacaacggagacaacccgacagagcggagcagcttcttttgcctagagtactttcccagcaagatgctgaggacgggcaacaactttgagtttacctacagctttgaagaggtgcccttccactgcagcttcgccccgagccagaacctctttaagctggccaacccgctggtggaccagtacctgtaccgcttcgtgagcacctcggccacgggcgccatccagttccaaaagaacctggcgggcagatacgccaacacctacaaaaactggttcccggggcccatgggccgaacccagggctggaacacgagctctggggtcagcagcaccaacagagtcagcgtcaacaacttttccgtctcaaaccggatgaacctggagggggccagctaccaagtgaacccccagcccaacgggatgacaaacacgctccaaggcagcaaccgctacgcgctggaaaacaccatgatcttcaacgctcaaaacgccacgccgggaactacctcggtgtacccagaggacaatctactgctgaccagcgagagcgagactcagcccgtcaaccgggtggcttacaacacgggcggtcagatggccaccaacgcccagaacgccaccacggctcccacggtcgggacctacaacctccaggaagtgcttcctggcagcgtatggatggagagggacgtgtacctccaaggacccatctgggccaagatcccagagacgggggcgcactttcacccctctccggccatgggcggattcggactcaaacacccgccgcccatgatgctcatcaaaaacacgccggtgcccggcaacatcaccagcttctcggacgtgcccgtcagcagcttcatcacccagtacagcaccgggcaggtcaccgtggagatggaatgggagctcaaaaaggaaaactccaagaggtggaacccagagatccagtacaccaacaactacaacgacccccagtttgtggactttgctccagacggctccggcgaatacagaaccaccagagccatcggaacccgatacctcacccgacccctt

SEQ ID NO: 529 - protein, 726 aa, synthetic construct
  REGION 1..726: note = Description of Artificial Sequence: Synthetic polypeptide
MSFVDHPPDWLEEVGEGLREFLGLEAGPPKPKPNQQHQDQARGLVLPGYNYLGPGNGLDRGEPVNRADEVAREHDISYNEQLEAGDNPYLKYNHADAEFQEKLADDTSFGGNLGKAVFQAKKRVLEPFGLVEEGAKTAPTGKRIDDHFPKRKKARTEEDSKPSTSSDAEAGPSGSQQLQIPAQPASSLGADTMSAGGGGPLGDNNQGADGVGNASGDWHCDSTWMGDRVVTKSTRTWVLPSYNNHQYREIKSGSVDGSNANAYFGYSTPWGYFDFNRFHSHWSPRDWQRLINNYWGFRPRSLRVKIFNIQVKEVTVQDSTTTIANNLTSTVQVFTDDDYQLPYVVGNGTEGCLPAFPPQVFTLPQYGYATLNRDNGDNPTERSSFFCLEYFPSKMLRTGNNFEFTYSFEEVPFHCSFAPSQNLFKLANPLVDQYLYRFVSTSATGAIQFQKNLAGRYANTYKNWFPGPMGRTQGWNTSSGSSTNRVSVNNFSVSNRMNLEGASYQVNPQPNGMTNTLQGSNRYALENTMIFNAQNATPGTTSVYPEDNLLLTSESETQPVNRVAYNTGGQMATNAQNATTAPTVGTYNLQEVLPGSVWMERDVYLQGPIWAKIPETGAHFHPSPAMGGFGLKHPPPMMLIKNTPVPGNITSFSDVPVSSFITQYSTGQVTVEMEWELKKENSKRWNPEIQYTNNYNDPQFVDFAPDGSGEYRTTRAIGTRYLTRPL

SEQ ID NO: 530 - protein, 735 aa, synthetic construct
  REGION 1..735: note = Description of Artificial Sequence: Synthetic polypeptide
MAADGYLPDWLEDTLSEGIRQWWKLKPGPPPPKPAERHKDDSRGLVLPGYKYLGPFNGLDKGEPVNEADAAALEHDKAYDRQLDSGDNPYLKYNHADAEFQERLKEDTSFGGNLGRAVFQAKKRILEPLGLVEEPVKTAPGKKRPVEHSPAEPDSSSGTGKSGQQPARKRLNFGQTGDADSVPDPQPLGQPPAAPSGLGTNTMASGSGAPMADNNEGADGVGNSSGNWHCDSTWMGDRVITTSTRTWALPTYNNHLYKQISSQSGASNDNHYFGYSTPWGYFDFNRFHCHFSPRDWQRLINNNWGFRPKRLSFKLFNIQVKEVTQNDGTTTIANNLTSTVQVFTDSEYQLPYVLGSAHQGCLPPFPADVFMVPQYGYLTLNNGSQAVGRSSFYCLEYFPSQMLRTGNNFTFSYTFEDVPFHSSYAHSQSLDRLMNPLIDQYLYYLSRTNTPSGTTTMSRLQFSQAGASDIRDQSRNWLPGPCYRQQRVSKTAADNNNSDYSWTGATKYHLNGRDSLVNPGPAMASHKDDEEKYFPQSGVLIFGKQDSGKTNVDIEKVMITDEEEIRTTNPVATEQYGSVSTNLQSGNTQAATSDVNTQGVLPGMVWQDRDVYLQGPIWAKIPHTDGHFHPSPLMGGFGLKHPPPQILIKNTPVPANPSTTFSAAKFASFITQYSTGQVSVEIEWELQKENSKRWNPEIQYTSNYNKSVNVDFTVDTNGVYSEPRPIGTRYLTRNL

SEQ ID NO: 531 - DNA, 1797 bp, synthetic construct
  misc_feature 1..1797: note = Description of Artificial Sequence: Synthetic polynucleotide
  source 1..1797: mol_type = other DNA
acggctccgaccggagacaagcggaaaggcgaagacgaacctcgtttgcccgacacttcttcacagactcccaagaaaaacaagaagcctcgcaaggaaagaccttccggcggggcagaagatccgggcgaaggcacctcttccaacgctggagcagcagcacccgcctctagtgtgggatcatctatcatggctgaaggaggtggcggcccagtgggcgatgcaggccagggtgccgatggagtgggcaattcctccggaaattggcattgcgattcccaatggctggaaaacggagtcgtcactcgaaccacccgaacctgggtcttgcccagctacaacaaccacctgtacaaacgaatccaaggacccagcggaggcgacaacaacaacaaattctttggattcagcaccccctggggatactttgactacaatcgattccactgccacttttccccgcgagactggcaacgactcatcaacaacaactggggcatccgtcccaaagcgatgcgctttagactctttaacatccaggttaaagaggtcacggtccaagacttcaacaccaccatcggcaacaacctcaccagtacggtccaggtctttgcggacaaggactaccaactgccgtacgtcctcggatcggctaccgaaggcaccttcccgccgttcccagcggatatctacacgatcccgcagtacgggtactgcacgctaaactacaacaacgaggcggtggatcgttcggccttctactgtctggactactttccctcagacatgctgcggacaggaaataactttgagtttacttacaccttcgaggacgttcctttccatagcatgtttgcccacaaccagacgctagaccggctgatgaatcccctcgtggatcagtacctctgggctttcagctccgtcagccaagcaggctcatctggacgagctcttcattactcgcgggcgactaaaaccaacatggcggctcaatataggaactggttacctgggcctttcttccgtgatcagcaaatctttacgggcgctagcaacatcactaaaaataacgtctttagcgtttgggaaaaaggcaagcaatgggaactcgacaatcggaccaacctaatgcagcccggtcctgcggcagcgaccacctttagcggagaacctgaccgtcaagccatgcaaaacacgctggcttttagcaggaccgtctacgatcaaacgaccgccacgaccgatcgtaaccagatactcatcaccaacgaagacgaaatcagacccaccaactcggtcggtatcgacgcgtggggagcagttcccaccaacaaccagtcgatcgtgacccccggcactcgcgcggccgtcaacaatcaaggggcgcttcccgggatggtgtggcaaaacagagacatttaccctacagggacccatttggccaaaattcccgacactgacaatcacttccatccgtccccgcttattgggcggtttggctgcaagcatccccctccccagattttcattaaaaacacacccgtccctgccaacccttcggaaacgttccagacggccaaagtggcctccttcatcaaccagtactcgaccggacagtgcaccgtcgaaatcttttgggaactcaagaaggaaacctccaagcgctggaaccccgaaatccagttcacctccaactttggcaacgcggccgacatccagtttgccgtctccgacacgggatcctattccgaacctcgtcccatcggtacccgttaccttaccaaacctctgtaa

SEQ ID NO: 532 - DNA, 1989 bp, synthetic construct
  misc_feature 1..1989: note = Description of Artificial Sequence: Synthetic polynucleotide
  source 1..1989: mol_type = other DNA
atgaggtcgtactacgaggtcatcgttcagctgcccaacgacgtcgagagtcaggtacctggaatctccgattcgttcgtcaactggattacgtcgcgagaatggacgttgcctgaggacgccgattgggatttggaccaggtcgatcaagttcaactgacgctcggcgacaaaatccaacgggagattcgaactcattgggggacgatggccaaagaaccggactttcactattttatccaactggaacaaggtgaggtgttctttcatttacacgtcctgctggaaacgtgttccgtaaagccgatggtactcggaagatatatccgacatattcaacaaaaaattgtgagtaaagtctactgcgccacgagcctacgatggaaggatggatgcgtggtgaccaagaccaaaaatttcgggggcgcgaacaaggtccgggccgagtcgtatattcccgcctacctgatcccgaaacagcaaccggaagtgcagtgggcgtggactaacgtgcccgagtatataaaagcgtgcttgcaccgagaactgcgtgccagtctcgcgcgacttcacttcgaggaggcgggcgtctcgcaatccaaggaaaatctcgcgagaactgcagacggcgctcccgtgatgccgacccgcgtcagcaaacgctacatggagctcgtggattggctcgtggagaaggggatcaccaccgagaaggaatggctgctggaaaacagagaaagctttcggagctttcaggcctcgagcaactcggcgcgtcagatcaagacggccctgcaaggcgccattcaggagatgcttctgaccaagacggcggaggactacctcgtcggaaaggatcccgtctcggacgacgacatccgtcagaaccgcatctacaagattctggaactgaaccactacgacccagcgtacgtggggagtattttggtcgggtggtgccagaagaaatggggcaagcgaaacacgctgtggctgttcggacatgcgaccaccggcaagaccaacatcgcggaggctattgcccatgctgtgccgttctatggatgcgttaactggaccaacgagaactttccgttcaacgactgcgtcgaaaaaatgattatctggtgggaggagggcaaaatgaccgccaaagtggtggaaacagccaaggcgattctgggaggatctcgggtgagagtggaccaaaaatgcaaagcttcggttccgatcgaaccgacgccggtcattattaccagtaacaccaacatgtgttatgtcatcgacgggaacacgaccacgttcgagcataagcagccgttggaggacaggatgtttaagctcgaattgctgactcggttgcctgatgactttggtaaggtgaccaaacaggaggtgcgtcaattcttcaggtggtctcaggatcacctgacccctgtgatcccagaattcctagtgcggaaggcggagtctcgcaaaagacccgccccttccggggaaggctatataagcccgacaaagcggcccgcgctcgcagagcagcagcaggcgtcggagagcgcggacccggttcccaccaggtatcgtatcaaatgctcgaaacattgcggtatggataaaatgttgtttccttgccaaatttgtgaatcgatgaacagagatattaatatttgtgctattcataaaacgaccgactgtaaagagtgtttccccgactacggggataaagatgatgtagaactacccccctgtacagaacacaacgtgtctcgttgttatcaatgtcattcgggcgaattgtatcgcgtgacttcggactctgacgagaaacctgcccccgagagtgatgaaggcaccgagccatcctatgctccctgcacgattcaccacctgatgggcaagagtcacgggttagtcacttgcgcggcgtgtcggttgaaaaatagtacgttgcatgatgacttggatgacggtgatctcgaacaataa

SEQ ID NO: 533 - DNA, 1626 bp, synthetic construct
  misc_feature 1..1626: note = Description of Artificial Sequence: Synthetic polynucleotide
  source 1..1626: mol_type = other DNA
atgaggtcgtactacgaggtcatcgttcagctgcccaacgacgtcgagagtcaggtacctggaatctccgattcgttcgtcaactggattacgtcgcgagaatggacgttgcctgaggacgccgattgggatttggaccaggtcgatcaagttcaactgacgctcggcgacaaaatccaacgggagattcgaactcattgggggacgatggccaaagaaccggactttcactattttatccaactggaacaaggtgaggtgttctttcatttacacgtcctgctggaaacgtgttccgtaaagccgatggtactcggaagatatatccgacatattcaacaaaaaattgtgagtaaagtctactgcgccacgagcctacgatggaaggatggatgcgtggtgaccaagaccaaaaatttcgggggcgcgaacaaggtccgggccgagtcgtatattcccgcctacctgatcccgaaacagcaaccggaagtgcagtgggcgtggactaacgtgcccgagtatataaaagcgtgcttgcaccgagaactgcgtgccagtctcgcgcgacttcacttcgaggaggcgggcgtctcgcaatccaaggaaaatctcgcgagaactgcagacggcgctcccgtgatgccgacccgcgtcagcaaacgctacatggagctcgtggattggctcgtggagaaggggatcaccaccgagaaggaatggctgctggaaaacagagaaagctttcggagctttcaggcctcgagcaactcggcgcgtcagatcaagacggccctgcaaggcgccattcaggagatgcttctgaccaagacggcggaggactacctcgtcggaaaggatcccgtctcggacgacgacatccgtcagaaccgcatctacaagattctggaactgaaccactacgacccagcgtacgtggggagtattttggtcgggtggtgccagaagaaatggggcaagcgaaacacgctgtggctgttcggacatgcgaccaccggcaagaccaacatcgcggaggctattgcccatgctgtgccgttctatggatgcgttaactggaccaacgagaactttccgttcaacgactgcgtcgaaaaaatgattatctggtgggaggagggcaaaatgaccgccaaagtggtggaaacagccaaggcgattctgggaggatctcgggtgagagtggaccaaaaatgcaaagcttcggttccgatcgaaccgacgccggtcattattaccagtaacaccaacatgtgttatgtcatcgacgggaacacgaccacgttcgagcataagcagccgttggaggacaggatgtttaagctcgaattgctgactcggttgcctgatgactttggtaaggtgaccaaacaggaggtgcgtcaattcttcaggtggtctcaggatcacctgacccctgtgatcccagaattcctagtgcggaaggcggagtctcgcaaaagacccgccccttccggggaaggctatataagcccgacaaagcggcccgcgctcgcagagcagcagcaggcgtcggagagcgcggacccggttcccaccagattggttggagcggttggtcaaaaagggagtgaatgctgcagctga

SEQ ID NO: 534 - DNA, 1323 bp, synthetic construct
  misc_feature 1..1323: note = Description of Artificial Sequence: Synthetic polynucleotide
  source 1..1323: mol_type = other DNA
atggagctcgtggattggctcgtggagaaggggatcaccaccgagaaggaatggctgctggaaaacagagaaagctttcggagctttcaggcctcgagcaactcggcgcgtcagatcaagacggccctgcaaggcgccattcaggagatgcttctgaccaagacggcggaggactacctcgtcggaaaggatcccgtctcggacgacgacatccgtcagaaccgcatctacaagattctggaactgaaccactacgacccagcgtacgtggggagtattttggtcgggtggtgccagaagaaatggggcaagcgaaacacgctgtggctgttcggacatgcgaccaccggcaagaccaacatcgcggaggctattgcccatgctgtgccgttctatggatgcgttaactggaccaacgagaactttccgttcaacgactgcgtcgaaaaaatgattatctggtgggaggagggcaaaatgaccgccaaagtggtggaaacagccaaggcgattctgggaggatctcgggtgagagtggaccaaaaatgcaaagcttcggttccgatcgaaccgacgccggtcattattaccagtaacaccaacatgtgttatgtcatcgacgggaacacgaccacgttcgagcataagcagccgttggaggacaggatgtttaagctcgaattgctgactcggttgcctgatgactttggtaaggtgaccaaacaggaggtgcgtcaattcttcaggtggtctcaggatcacctgacccctgtgatcccagaattcctagtgcggaaggcggagtctcgcaaaagacccgccccttccggggaaggctatataagcccgacaaagcggcccgcgctcgcagagcagcagcaggcgtcggagagcgcggacccggttcccaccaggtatcgtatcaaatgctcgaaacattgcggtatggataaaatgttgtttccttgccaaatttgtgaatcgatgaacagagatattaatatttgtgctattcataaaacgaccgactgtaaagagtgtttccccgactacggggataaagatgatgtagaactacccccctgtacagaacacaacgtgtctcgttgttatcaatgtcattcgggcgaattgtatcgcgtgacttcggactctgacgagaaacctgcccccgagagtgatgaaggcaccgagccatcctatgctccctgcacgattcaccacctgatgggcaagagtcacgggttagtcacttgcgcggcgtgtcggttgaaaaatagtacgttgcatgatgacttggatgacggtgatctcgaacaataa

SEQ ID NO: 535 - DNA, 960 bp, synthetic construct
  misc_feature 1..960: note = Description of Artificial Sequence: Synthetic polynucleotide
  source 1..960: mol_type = other DNA
atggagctcgtggattggctcgtggagaaggggatcaccaccgagaaggaatggctgctggaaaacagagaaagctttcggagctttcaggcctcgagcaactcggcgcgtcagatcaagacggccctgcaaggcgccattcaggagatgcttctgaccaagacggcggaggactacctcgtcggaaaggatcccgtctcggacgacgacatccgtcagaaccgcatctacaagattctggaactgaaccactacgacccagcgtacgtggggagtattttggtcgggtggtgccagaagaaatggggcaagcgaaacacgctgtggctgttcggacatgcgaccaccggcaagaccaacatcgcggaggctattgcccatgctgtgccgttctatggatgcgttaactggaccaacgagaactttccgttcaacgactgcgtcgaaaaaatgattatctggtgggaggagggcaaaatgaccgccaaagtggtggaaacagccaaggcgattctgggaggatctcgggtgagagtggaccaaaaatgcaaagcttcggttccgatcgaaccgacgccggtcattattaccagtaacaccaacatgtgttatgtcatcgacgggaacacgaccacgttcgagcataagcagccgttggaggacaggatgtttaagctcgaattgctgactcggttgcctgatgactttggtaaggtgaccaaacaggaggtgcgtcaattcttcaggtggtctcaggatcacctgacccctgtgatcccagaattcctagtgcggaaggcggagtctcgcaaaagacccgccccttccggggaaggctatataagcccgacaaagcggcccgcgctcgcagagcagcagcaggcgtcggagagcgcggacccggttcccaccagattggttggagcggttggtcaaaaagggagtgaatgctgcagctga

SEQ ID NO: 536 - DNA, 1608 bp, synthetic construct
  misc_feature 1..1608: note = Description of Artificial Sequence: Synthetic polynucleotide
  source 1..1608: mol_type = other DNA
atggctgaaggaggtggcggcccagtgggcgatgcaggccagggtgccgatggagtgggcaattcctccggaaattggcattgcgattcccaatggctggaaaacggagtcgtcactcgaaccacccgaacctgggtcttgcccagctacaacaaccacctgtacaaacgaatccaaggacccagcggaggcgacaacaacaacaaattctttggattcagcaccccctggggatactttgactacaatcgattccactgccacttttccccgcgagactggcaacgactcatcaacaacaactggggcatccgtcccaaagcgatgcgctttagactctttaacatccaggttaaagaggtcacggtccaagacttcaacaccaccatcggcaacaacctcaccagtacggtccaggtctttgcggacaaggactaccaactgccgtacgtcctcggatcggctaccgaaggcaccttcccgccgttcccagcggatatctacacgatcccgcagtacgggtactgcacgctaaactacaacaacgaggcggtggatcgttcggccttctactgtctggactactttccctcagacatgctgcggacaggaaataactttgagtttacttacaccttcgaggacgttcctttccatagcatgtttgcccacaaccagacgctagaccggctgatgaatcccctcgtggatcagtacctctgggctttcagctccgtcagccaagcaggctcatctggacgagctcttcattactcgcgggcgactaaaaccaacatggcggctcaatataggaactggttacctgggcctttcttccgtgatcagcaaatctttacgggcgctagcaacatcactaaaaataacgtctttagcgtttgggaaaaaggcaagcaatgggaactcgacaatcggaccaacctaatgcagcccggtcctgcggcagcgaccacctttagcggagaacctgaccgtcaagccatgcaaaacacgctggcttttagcaggaccgtctacgatcaaacgaccgccacgaccgatcgtaaccagatactcatcaccaacgaagacgaaatcagacccaccaactcggtcggtatcgacgcgtggggagcagttcccaccaacaaccagtcgatcgtgacccccggcactcgcgcggccgtcaacaatcaaggggcgcttcccgggatggtgtggcaaaacagagacatttaccctacagggacccatttggccaaaattcccgacactgacaatcacttccatccgtccccgcttattgggcggtttggctgcaagcatccccctccccagattttcattaaaaacacacccgtccctgccaacccttcggaaacgttccagacggccaaagtggcctccttcatcaaccagtactcgaccggacagtgcaccgtcgaaatcttttgggaactcaagaaggaaacctccaagcgctggaaccccgaaatccagttcacctccaactttggcaacgcggccgacatccagtttgccgtctccgacacgggatcctattccgaacctcgtcccatcggtacccgttaccttaccaaacctctgtaa

SEQ ID NO: 537 - DNA, 2232 bp, synthetic construct
  misc_feature 1..2232: note = Description of Artificial Sequence: Synthetic polynucleotide
  source 1..2232: mol_type = other DNA
atgtctctcatttctgatgcgattccagattggttggagcggttggtcaaaaagggagtgaatgctgcagctgatttctaccatttggaaagcggtcctcctcgtcctaaggcaaatcagcaaactcaagaatctcttgaaaaggacgattcgagaggtctcgtgttcccaggctacaattatctaggccctttcaacggtctagataaaggagaacccgtcaacgaggcagacgctgccgccttagaacacgacaaggcttacgacctcgaaatcaaggacgggcacaacccgtactttgagtacaacgaggccgacagacgtttccaggaacgtctcaaagacgatacctcctttggaggcaatttaggtaaagccatcttccaggccaaaaagagggttctcgaaccctttggtctggtggaagactcaaagacggctccgaccggagacaagcggaaaggcgaagacgaacctcgtttgcccgacacttcttcacagactcccaagaaaaacaagaagcctcgcaaggaaagaccttccggcggggcagaagatccgggcgaaggcacctcttccaacgctggagcagcagcacccgcctctagtgtgggatcatctatcatggctgaaggaggtggcggcccagtgggcgatgcaggccagggtgccgatggagtgggcaattcctccggaaattggcattgcgattcccaatggctggaaaacggagtcgtcactcgaaccacccgaacctgggtcttgcccagctacaacaaccacctgtacaaacgaatccaaggacccagcggaggcgacaacaacaacaaattctttggattcagcaccccctggggatactttgactacaatcgattccactgccacttttccccgcgagactggcaacgactcatcaacaacaactggggcatccgtcccaaagcgatgcgctttagactctttaacatccaggttaaagaggtcacggtccaagacttcaacaccaccatcggcaacaacctcaccagtacggtccaggtctttgcggacaaggactaccaactgccgtacgtcctcggatcggctaccgaaggcaccttcccgccgttcccagcggatatctacacgatcccgcagtacgggtactgcacgctaaactacaacaacgaggcggtggatcgttcggccttctactgtctggactactttccctcagacatgctgcggacaggaaataactttgagtttacttacaccttcgaggacgttcctttccatagcatgtttgcccacaaccagacgctagaccggctgatgaatcccctcgtggatcagtacctctgggctttcagctccgtcagccaagcaggctcatctggacgagctcttcattactcgcgggcgactaaaaccaacatggcggctcaatataggaactggttacctgggcctttcttccgtgatcagcaaatctttacgggcgctagcaacatcactaaaaataacgtctttagcgtttgggaaaaaggcaagcaatgggaactcgacaatcggaccaacctaatgcagcccggtcctgcggcagcgaccacctttagcggagaacctgaccgtcaagccatgcaaaacacgctggcttttagcaggaccgtctacgatcaaacgaccgccacgaccgatcgtaaccagatactcatcaccaacgaagacgaaatcagacccaccaactcggtcggtatcgacgcgtggggagcagttcccaccaacaaccagtcgatcgtgacccccggcactcgcgcggccgtcaacaatcaaggggcgcttcccgggatggtgtggcaaaacagagacatttaccctacagggacccatttggccaaaattcccgacactgacaatcacttccatccgtccccgcttattgggcggtttggctgcaagcatccccctccccagattttcattaaaaacacacccgtccctgccaacccttcggaaacgttccagacggccaaagtggcctccttcatcaaccagtactcgaccggacagtgcaccgtcgaaatcttttgggaactcaagaaggaaacctccaagcgctggaaccccgaaatccagttcacctccaactttggcaacgcggccgacatccagtttgccgtctccgacacgggatcctattccgaacctcgtcccatcggtacccgttaccttaccaaacctctgtaa

SEQ ID NO: 538 - protein, 535 aa, synthetic construct
  REGION 1..535: note = Description of Artificial Sequence: Synthetic polypeptide
MAEGGGGPVGDAGQGADGVGNSSGNWHCDSQWLENGVVTRTTRTWVLPSYNNHLYKRIQGPSGGDNNNKFFGFSTPWGYFDYNRFHCHFSPRDWQRLINNNWGIRPKAMRFRLFNIQVKEVTVQDFNTTIGNNLTSTVQVFADKDYQLPYVLGSATEGTFPPFPADIYTIPQYGYCTLNYNNEAVDRSAFYCLDYFPSDMLRTGNNFEFTYTFEDVPFHSMFAHNQTLDRLMNPLVDQYLWAFSSVSQAGSSGRALHYSRATKTNMAAQYRNWLPGPFFRDQQIFTGASNITKNNVFSVWEKGKQWELDNRTNLMQPGPAAATTFSGEPDRQAMQNTLAFSRTVYDQTTATTDRNQILITNEDEIRPTNSVGIDAWGAVPTNNQSIVTPGTRAAVNNQGALPGMVWQNRDIYPTGTHLAKIPDTDNHFHPSPLIGRFGCKHPPPQIFIKNTPVPANPSETFQTAKVASFINQYSTGQCTVEIFWELKKETSKRWNPEIQFTSNFGNAADIQFAVSDTGSYSEPRPIGTRYLTKPL

SEQ ID NO: 539 - protein, 440 aa, synthetic construct
  REGION 1..440: note = Description of Artificial Sequence: Synthetic polypeptide
MELVDWLVEKGITTEKEWLLENRESFRSFQASSNSARQIKTALQGAIQEMLLTKTAEDYLVGKDPVSDDDIRQNRIYKILELNHYDPAYVGSILVGWCQKKWGKRNTLWLFGHATTGKTNIAEAIAHAVPFYGCVNWTNENFPFNDCVEKMIIWWEEGKMTAKVVETAKAILGGSRVRVDQKCKASVPIEPTPVIITSNTNMCYVIDGNTTTFEHKQPLEDRMFKLELLTRLPDDFGKVTKQEVRQFFRWSQDHLTPVIPEFLVRKAESRKRPAPSGEGYISPTKRPALAEQQQASESADPVPTRYRIKCSKHCGMDKMLFPCQICESMNRDINICAIHKTTDCKECFPDYGDKDDVELPPCTEHNVSRCYQCHSGELYRVTSDSDEKPAPESDEGTEPSYAPCTIHHLMGKSHGLVTCAACRLKNSTLHDDLDDGDLEQ

SEQ ID NO: 540 - protein, 319 aa, synthetic construct
  REGION 1..319: note = Description of Artificial Sequence: Synthetic polypeptide
MELVDWLVEKGITTEKEWLLENRESFRSFQASSNSARQIKTALQGAIQEMLLTKTAEDYLVGKDPVSDDDIRQNRIYKILELNHYDPAYVGSILVGWCQKKWGKRNTLWLFGHATTGKTNIAEAIAHAVPFYGCVNWTNENFPFNDCVEKMIIWWEEGKMTAKVVETAKAILGGSRVRVDQKCKASVPIEPTPVIITSNTNMCYVIDGNTTTFEHKQPLEDRMFKLELLTRLPDDFGKVTKQEVRQFFRWSQDHLTPVIPEFLVRKAESRKRPAPSGEGYISPTKRPALAEQQQASESADPVPTRLVGAVGQKGSECCS

SEQ ID NO: 541 - protein, 662 aa, synthetic construct
  REGION 1..662: note = Description of Artificial Sequence: Synthetic polypeptide
MRSYYEVIVQLPNDVESQVPGISDSFVNWITSREWTLPEDADWDLDQVDQVQLTLGDKIQREIRTHWGTMAKEPDFHYFIQLEQGEVFFHLHVLLETCSVKPMVLGRYIRHIQQKIVSKVYCATSLRWKDGCVVTKTKNFGGANKVRAESYIPAYLIPKQQPEVQWAWTNVPEYIKACLHRELRASLARLHFEEAGVSQSKENLARTADGAPVMPTRVSKRYMELVDWLVEKGITTEKEWLLENRESFRSFQASSNSARQIKTALQGAIQEMLLTKTAEDYLVGKDPVSDDDIRQNRIYKILELNHYDPAYVGSILVGWCQKKWGKRNTLWLFGHATTGKTNIAEAIAHAVPFYGCVNWTNENFPFNDCVEKMIIWWEEGKMTAKVVETAKAILGGSRVRVDQKCKASVPIEPTPVIITSNTNMCYVIDGNTTTFEHKQPLEDRMFKLELLTRLPDDFGKVTKQEVRQFFRWSQDHLTPVIPEFLVRKAESRKRPAPSGEGYISPTKRPALAEQQQASESADPVPTRYRIKCSKHCGMDKMLFPCQICESMNRDINICAIHKTTDCKECFPDYGDKDDVELPPCTEHNVSRCYQCHSGELYRVTSDSDEKPAPESDEGTEPSYAPCTIHHLMGKSHGLVTCAACRLKNSTLHDDLDDGDLEQ

SEQ ID NO: 542 - protein, 541 aa, synthetic construct
  REGION 1..541: note = Description of Artificial Sequence: Synthetic polypeptide
MRSYYEVIVQLPNDVESQVPGISDSFVNWITSREWTLPEDADWDLDQVDQVQLTLGDKIQREIRTHWGTMAKEPDFHYFIQLEQGEVFFHLHVLLETCSVKPMVLGRYIRHIQQKIVSKVYCATSLRWKDGCVVTKTKNFGGANKVRAESYIPAYLIPKQQPEVQWAWTNVPEYIKACLHRELRASLARLHFEEAGVSQSKENLARTADGAPVMPTRVSKRYMELVDWLVEKGITTEKEWLLENRESFRSFQASSNSARQIKTALQGAIQEMLLTKTAEDYLVGKDPVSDDDIRQNRIYKILELNHYDPAYVGSILVGWCQKKWGKRNTLWLFGHATTGKTNIAEAIAHAVPFYGCVNWTNENFPFNDCVEKMIIWWEEGKMTAKVVETAKAILGGSRVRVDQKCKASVPIEPTPVIITSNTNMCYVIDGNTTTFEHKQPLEDRMFKLELLTRLPDDFGKVTKQEVRQFFRWSQDHLTPVIPEFLVRKAESRKRPAPSGEGYISPTKRPALAEQQQASESADPVPTRLVGAVGQKGSECCS

SEQ ID NO: 543 - protein, 743 aa, synthetic construct
  REGION 1..743: note = Description of Artificial Sequence: Synthetic polypeptide
MSLISDAIPDWLERLVKKGVNAAADFYHLESGPPRPKANQQTQESLEKDDSRGLVFPGYNYLGPFNGLDKGEPVNEADAAALEHDKAYDLEIKDGHNPYFEYNEADRRFQERLKDDTSFGGNLGKAIFQAKKRVLEPFGLVEDSKTAPTGDKRKGEDEPRLPDTSSQTPKKNKKPRKERPSGGAEDPGEGTSSNAGAAAPASSVGSSIMAEGGGGPVGDAGQGADGVGNSSGNWHCDSQWLENGVVTRTTRTWVLPSYNNHLYKRIQGPSGGDNNNKFFGFSTPWGYFDYNRFHCHFSPRDWQRLINNNWGIRPKAMRFRLFNIQVKEVTVQDFNTTIGNNLTSTVQVFADKDYQLPYVLGSATEGTFPPFPADIYTIPQYGYCTLNYNNEAVDRSAFYCLDYFPSDMLRTGNNFEFTYTFEDVPFHSMFAHNQTLDRLMNPLVDQYLWAFSSVSQAGSSGRALHYSRATKTNMAAQYRNWLPGPFFRDQQIFTGASNITKNNVFSVWEKGKQWELDNRTNLMQPGPAAATTFSGEPDRQAMQNTLAFSRTVYDQTTATTDRNQILITNEDEIRPTNSVGIDAWGAVPTNNQSIVTPGTRAAVNNQGALPGMVWQNRDIYPTGTHLAKIPDTDNHFHPSPLIGRFGCKHPPPQIFIKNTPVPANPSETFQTAKVASFINQYSTGQCTVEIFWELKKETSKRWNPEIQFTSNFGNAADIQFAVSDTGSYSEPRPIGTRYLTKPL

SEQ ID NO: 544 - protein, 598 aa, synthetic construct
  REGION 1..598: note = Description of Artificial Sequence: Synthetic polypeptide
TAPTGDKRKGEDEPRLPDTSSQTPKKNKKPRKERPSGGAEDPGEGTSSNAGAAAPASSVGSSIMAEGGGGPVGDAGQGADGVGNSSGNWHCDSQWLENGVVTRTTRTWVLPSYNNHLYKRIQGPSGGDNNNKFFGFSTPWGYFDYNRFHCHFSPRDWQRLINNNWGIRPKAMRFRLFNIQVKEVTVQDFNTTIGNNLTSTVQVFADKDYQLPYVLGSATEGTFPPFPADIYTIPQYGYCTLNYNNEAVDRSAFYCLDYFPSDMLRTGNNFEFTYTFEDVPFHSMFAHNQTLDRLMNPLVDQYLWAFSSVSQAGSSGRALHYSRATKTNMAAQYRNWLPGPFFRDQQIFTGASNITKNNVFSVWEKGKQWELDNRTNLMQPGPAAATTFSGEPDRQAMQNTLAFSRTVYDQTTATTDRNQILITNEDEIRPTNSVGIDAWGAVPTNNQSIVTPGTRAAVNNQGALPGMVWQNRDIYPTGTHLAKIPDTDNHFHPSPLIGRFGCKHPPPQIFIKNTPVPANPSETFQTAKVASFINQYSTGQCTVEIFWELKKETSKRWNPEIQFTSNFGNAADIQFAVSDTGSYSEPRPIGTRYLTKPL

SEQ ID NO: 545 - DNA, 4694 bp, synthetic construct
  misc_feature 1..4694: note = Description of Artificial Sequence: Synthetic polynucleotide
  source 1..4694: mol_type = other DNA
tggccagtttccaagacaggctcgctcgctcactcgggccggggccccaaaggggcccctagcgaccgcttcgcggtcgcggcccgagtgagcgagcgagcctgtcttggaaactggccagcactccggtgaggtaatgccgtcacgtggtcgggaatgggaacgggaaatctcgcgagaacgtaaacaaatataagacggcgccacacggcgctgcgtcatacgcgcgcgcgcaccggcgagatgaggtcgtactacgaggtcatcgttcagctgcccaacgacgtcgagagtcaggtacctggaatctccgattcgttcgtcaactggattacgtcgcgagaatggacgttgcctgaggacgccgattgggatttggaccaggtcgatcaagttcaactgacgctcggcgacaaaatccaacgggagattcgaactcattgggggacgatggccaaagaaccggactttcactattttatccaactggaacaaggtgaggtgttctttcatttacacgtcctgctggaaacgtgttccgtaaagccgatggtactcggaagatatatccgacatattcaacaaaaaattgtgagtaaagtctactgcgccacgagcctacgatggaaggatggatgcgtggtgaccaagaccaaaaatttcgggggcgcgaacaaggtccgggccgagtcgtatattcccgcctacctgatcccgaaacagcaaccggaagtgcagtgggcgtggactaacgtgcccgagtatataaaagcgtgcttgcaccgagaactgcgtgccagtctcgcgcgacttcacttcgaggaggcgggcgtctcgcaatccaaggaaaatctcgcgagaactgcagacggcgctcccgtgatgccgacccgcgtcagcaaacgctacatggagctcgtggattggctcgtggagaaggggatcaccaccgagaaggaatggctgctggaaaacagagaaagctttcggagctttcaggcctcgagcaactcggcgcgtcagatcaagacggccctgcaaggcgccattcaggagatgcttctgaccaagacggcggaggactacctcgtcggaaaggatcccgtctcggacgacgacatccgtcagaaccgcatctacaagattctggaactgaaccactacgacccagcgtacgtggggagtattttggtcgggtggtgccagaagaaatggggcaagcgaaacacgctgtggctgttcggacatgcgaccaccggcaagaccaacatcgcggaggctattgcccatgctgtgccgttctatggatgcgttaactggaccaacgagaactttccgttcaacgactgcgtcgaaaaaatgattatctggtgggaggagggcaaaatgaccgccaaagtggtggaaacagccaaggcgattctgggaggatctcgggtgagagtggaccaaaaatgcaaagcttcggttccgatcgaaccgacgccggtcattattaccagtaacaccaacatgtgttatgtcatcgacgggaacacgaccacgttcgagcataagcagccgttggaggacaggatgtttaagctcgaattgctgactcggttgcctgatgactttggtaaggtgaccaaacaggaggtgcgtcaattcttcaggtggtctcaggatcacctgacccctgtgatcccagaattcctagtgcggaaggcggagtctcgcaaaagacccgccccttccggggaaggctatataagcccgacaaagcggcccgcgctcgcagagcagcagcaggcgtcggagagcgcggacccggttcccaccaggtatcgtatcaaatgctcgaaacattgcggtatggataaaatgttgtttccttgccaaatttgtgaatcgatgaacagagatattaatatttgtgctattcataaaacgaccgactgtaaagagtgtttccccgactacggggataaagatgatgtagaactacccccctgtacagaacacaacgtgtctcgttgttatcaatgtcattcgggcgaattgtatcgcgtgacttcggactctgacgagaaacctgcccccgagagtgatgaaggcaccgagccatcctatgctccctgcacgattcaccacctgatgggcaagagtcacgggttagtcacttgcgcggcgtgtcggttgaaaaatagtacgttgcatgatgacttggatgacggtgatctcgaacaataaatgattgaaatgtagccatgtctctcatttctgatgcgattccagattggttggagcggttggtcaaaaagggagtgaatgctgcagctgatttctaccatttggaaagcggtcctcctcgtcctaaggcaaatcagcaaactcaagaatctcttgaaaaggacgattcgagaggtctcgtgttcccaggctacaattatctaggccctttcaacggtctagataaaggagaacccgtcaacgaggcagacgctgccgccttagaacacgacaaggcttacgacctcgaaatcaaggacgggcacaacccgtactttgagtacaacgaggccgacagacgtttccaggaacgtctcaaagacgatacctcctttggaggcaatttaggtaaagccatcttccaggccaaaaagagggttctcgaaccctttggtctggtggaagactcaaagacggctccgaccggagacaagcggaaaggcgaagacgaacctcgtttgcccgacacttcttcacagactcccaagaaaaacaagaagcctcgcaaggaaagaccttccggcggggcagaagatccgggcgaaggcacctcttccaacgctggagcagcagcacccgcctctagtgtgggatcatctatcatggctgaaggaggtggcggcccagtgggcgatgcaggccagggtgccgatggagtgggcaattcctccggaaattggcattgcgattcccaatggctggaaaacggagtcgtcactcgaaccacccgaacctgggtcttgcccagctacaacaaccacctgtacaaacgaatccaaggacccagcggaggcgacaacaacaacaaattctttggattcagcaccccctggggatactttgactacaatcgattccactgccacttttccccgcgagactggcaacgactcatcaacaacaactggggcatccgtcccaaagcgatgcgctttagactctttaacatccaggttaaagaggtcacggtccaagacttcaacaccaccatcggcaacaacctcaccagtacggtccaggtctttgcggacaaggactaccaactgccgtacgtcctcggatcggctaccgaaggcaccttcccgccgttcccagcggatatctacacgatcccgcagtacgggtactgcacgctaaactacaacaacgaggcggtggatcgttcggccttctactgtctggactactttccctcagacatgctgcggacaggaaataactttgagtttacttacaccttcgaggacgttcctttccatagcatgtttgcccacaaccagacgctagaccggctgatgaatcccctcgtggatcagtacctctgggctttcagctccgtcagccaagcaggctcatctggacgagctcttcattactcgcgggcgactaaaaccaacatggcggctcaatataggaactggttacctgggcctttcttccgtgatcagcaaatctttacgggcgctagcaacatcactaaaaataacgtctttagcgtttgggaaaaaggcaagcaatgggaactcgacaatcggaccaacctaatgcagcccggtcctgcggcagcgaccacctttagcggagaacctgaccgtcaagccatgcaaaacacgctggcttttagcaggaccgtctacgatcaaacgaccgccacgaccgatcgtaaccagatactcatcaccaacgaagacgaaatcagacccaccaactcggtcggtatcgacgcgtggggagcagttcccaccaacaaccagtcgatcgtgacccccggcactcgcgcggccgtcaacaatcaaggggcgcttcccgggatggtgtggcaaaacagagacatttaccctacagggacccatttggccaaaattcccgacactgacaatcacttccatccgtccccgcttattgggcggtttggctgcaagcatccccctccccagattttcattaaaaacacacccgtccctgccaacccttcggaaacgttccagacggccaaagtggcctccttcatcaaccagtactcgaccggacagtgcaccgtcgaaatcttttgggaactcaagaaggaaacctccaagcgctggaaccccgaaatccagttcacctccaactttggcaacgcggccgacatccagtttgccgtctccgacacgggatcctattccgaacctcgtcccatcggtacccgttaccttaccaaacctctgtaaattaaacccttcaataaaccgtttatgcgtaactgtatttccgtctcctgtcgttattcagtcacatgatgcggcattacctcaccggagtgctggccagtttccaagacaggctcgctcgctcactcgggccggggccccaaaggggcccctagcgaccgcttcgcggtcgcggcccgagtgagcgagcgagcctgtcttggaaactggcca

SEQ ID NO: 546 - DNA, 2211 bp, synthetic construct
  misc_feature 1..2211: note = Description of Artificial Sequence: Synthetic polynucleotide
  source 1..2211: mol_type = other DNA
atggctgctgatggttatcttccagattggctcgaggacactctctctgaaggaataagacagtggtggaagctcaaacctggcccaccaccaccaaagcccgcagagcggcataaggacgacagcaggggtcttgtgcttcctgggtacaagtacctcggacccttcaacggactcgacaagggagagccggtcaacgaggcagacgcagcggccctcgagcacgacaaggcctacgaccagcagctcaaggccggtgacaacccctacctcaagtacaaccacgccgacgcggagttccagcagcggcttcagggcgacacatcgtttgggggcaacctcggcagagcagtcttccaggccaaaaagagggttcttgaacctcttggtctggttgagcaagcgggtgagacggctcctggaaagaagagaccgttgattgaatccccccagcagcccgactcctccacgggtatcggcaaaaaaggcaagcagccggctaaaaagagactcaattttggtcagactggcgactcagagtcagtccccgacccacaacctctcggagaacctccagcaacccccgctgctgtgggacctactacaatggcttcaggtggtggcgcaccaatggcagacaataacgaaggcgccgacggagtgggtaatgcctcaggaaattggcattgcgattccacatggctgggcgacagagtcatcaccaccagcacccgcacctgggccttgcccacctacaataaccacctctacaagcaaatctccagtgcttcaacgggggccagcaacgacaaccactacttcggctacagcaccccctgggggtattttgacttcaacagattccactgccacttttcaccacgtgactggcagcgactcatcaacaacaattggggattccggcccaagagactcaacttcaaactcttcaacatccaagtcaaggaggtcacgacgaatgatggcgtcacaaccatcgctaataaccttaccagcacggttcaagtcttctcggactcagactatcagctcccgtacgtgctcgggtcggctcacgagggctgcctcccgccgttcccagcagacgtcttcatggtgccacagtatggatacctcaccctgaacaacgggagtcaggcagtaggacgctcttcattttactgcctggagtactttccttctcagatgctgcgtaccggaaacaactttaccttcagctacacttttgaggacgttcctttccacagcagctacgctcacagccagagtctggaccgtctcatgaatcctctcatcgaccagtacctgtattacctgaacagaactcagaatcagtccggaagtgcccaaaacaaggacttgctgtttagccgggggtctccagctggcatgtctgttcagcccaaaaactggctacctggaccctgttatcggcagcagcgcgtttctaaaacaaaaacagacaacaacaacagcaactttacctggactggtgcttcaaaatataaccttaatgggcgtgaatctataatcaaccctggcactgctatggcctcacacaaagacgacaaagacaagttctttcccatgagcggtgtcatgatttttggaaaggagagcgccggagcttcaaacactgcattggacaatgtcatgatcacagacgaagaggaaatcaaagccactaaccccgtggccaccgaaagatttgggactgtggcagtcaatctccagagcagcagcacagaccctgcgaccggagatgtgcatgttatgggagccttacctggaatggtgtggcaagacagagacgtatacctgcagggtcccatttgggccaaaattcctcacacagatggacactttcacccgtctcctcttatgggcggctttggactcaagaacccgcctcctcagatcctcatcaaaaacacgcctgttcctgcgaatcctccggcggagttttcagctacaaagtttgcttcattcatcacccaatactccacaggacaagtgagtgtggaaattgaatgggagctgcagaaagaaaacagcaagcgctggaatcccgaagtgcagtacacatccaattatgcaaaatctgccaacgttgattttactgtggacaacaatggactttatactgagcctcgccccattggcacccgttacctcacccgtcccctgtaa

SEQ ID NO: 547 - protein, 736 aa, synthetic construct
  REGION 1..736: note = Description of Artificial Sequence: Synthetic polypeptide
MAADGYLPDWLEDTLSEGIRQWWKLKPGPPPPKPAERHKDDSRGLVLPGYKYLGPFNGLDKGEPVNEADAAALEHDKAYDQQLKAGDNPYLKYNHADAEFQQRLQGDTSFGGNLGRAVFQAKKRVLEPLGLVEQAGETAPGKKRPLIESPQQPDSSTGIGKKGKQPAKKRLNFGQTGDSESVPDPQPLGEPPATPAAVGPTTMASGGGAPMADNNEGADGVGNASGNWHCDSTWLGDRVITTSTRTWALPTYNNHLYKQISSASTGASNDNHYFGYSTPWGYFDFNRFHCHFSPRDWQRLINNNWGFRPKRLNFKLFNIQVKEVTTNDGVTTIANNLTSTVQVFSDSDYQLPYVLGSAHEGCLPPFPADVFMVPQYGYLTLNNGSQAVGRSSFYCLEYFPSQMLRTGNNFTFSYTFEDVPFHSSYAHSQSLDRLMNPLIDQYLYYLNRTQNQSGSAQNKDLLFSRGSPAGMSVQPKNWLPGPCYRQQRVSKTKTDNNNSNFTWTGASKYNLNGRESIINPGTAMASHKDDKDKFFPMSGVMIFGKESAGASNTALDNVMITDEEEIKATNPVATERFGTVAVNLQSSSTDPATGDVHVMGALPGMVWQDRDVYLQGPIWAKIPHTDGHFHPSPLMGGFGLKNPPPQILIKNTPVPANPPAEFSATKFASFITQYSTGQVSVEIEWELQKENSKRWNPEVQYTSNYAKSANVDFTVDNNGLYTEPRPIGTRYLTRPL

SEQ ID NO: 548 - DNA, 2211 bp, synthetic construct
  misc_feature 1..2211: note = Description of Artificial Sequence: Synthetic polynucleotide
  source 1..2211: mol_type = other DNA
atggcttccgatggttatcttccagattggctcgaggacaacctctctgagggcatccgcgagtggtgggacttgaaacctggagccccgaaacccaaagccaaccagcaaaagcaggacgacggccggggtctggtgcttcctggctacaagtacctcggacccttcaacggactcgacaagggggagcccgtcaacgcggcggatgcagcggccctcgagcacgacaaggcctacgaccagcagctcagagcgggtgacaatccgtacctgcggtataaccacgccgacgccgagtttcaggagcgtctgcaagaagatacgtcttttgggggcaacctcgggcgagcagtcttccaggccaagaagagggttctcgaaccttttggtctggttgaggaaggtgctaagacggctcctggaaagaaacgtccggtagagcagtcgccacaagagccagactcctcctcgggcattggcaagacaggccagcagcccgctaaaaagagactcaattttggtcagactggcgactcagagtcagtccccgacccacaacctctcggagaacctccagcaacccccgctgctgtgggacctactacaatggcttcaggcggtggcgcaccaatggcagacaataacgaaggcgccgacggagtgggtaatgcctcaggaaattggcattgcgattccacatggctgggcgacagagtcatcaccaccagcacccgaacatgggccttgcccacctataacaaccacctctacaagcaaatctccagtgcttcaacgggggccagcaacgacaaccactacttcggctacagcaccccctgggggtattttgatttcaacagattccactgccatttctcaccacgtgactggcagcgactcatcaacaacaattggggattccggcccaagagactcaacttcaaactcttcaacatccaagtcaaggaggtcacgacgaatgatggcgtcacaaccatcgctaataaccttaccagcacggttcaagtcttctcggactcggagtaccagcttccgtacgtcctcggctctgcgcaccagggctgcctccctccgttcccggcggacgtgttcatgattccgcagtacggctacctaacgctcaacaatggcagccaggcagtgggacggtcatccttttactgcctggaatatttcccatcgcagatgctgagaacgggcaataactttaccttcagctacaccttcgaggacgtgcctttccacagcagctacgcgcacagccagagcctggaccggctgatgaatcctctcatcgaccagtacctgtattacctgaacagaactcagaatcagtccggaagtgcccaaaacaaggacttgctgtttagccgggggtctccagctggcatgtctgttcagcccaaaaactggctacctggaccctgttaccggcagcagcgcgtttctaaaacaaaaacagacaacaacaacagcaactttacctggactggtgcttcaaaatataaccttaatgggcgtgaatctataatcaaccctggcactgctatggcctcacacaaagacgacaaagacaagttctttcccatgagcggtgtcatgatttttggaaaggagagcgccggagcttcaaacactgcattggacaatgtcatgatcacagacgaagaggaaatcaaagccactaaccccgtggccaccgaaagatttgggactgtggcagtcaatctccagagcagcagcacagaccctgcgaccggagatgtgcatgttatgggagccttacctggaatggtgtggcaagacagagacgtatacctgcagggtcccatttgggccaaaattcctcacacagatggacactttcacccgtctcctcttatgggcggctttggacttaagcacccgcctcctcagatcctcatcaaaaacacgcctgttcctgcgaatcctccggcagagttttcggctacaaagtttgcttcattcatcacccagtattctactggccaagtcagcgtggagattgaatgggagctgcagaaagaaaacagcaaacgctggaatcccgaagtgcagtatacatctaactatgcaaaatctgccaacgttgatttcactgtggacaacaatggactttatactgagcctcgtcccattggcacccgttacctcacccgtcccctgtaa

SEQ ID NO: 549 - protein, 736 aa, synthetic construct
  REGION 1..736: note = Description of Artificial Sequence: Synthetic polypeptide
MASDGYLPDWLEDNLSEGIREWWDLKPGAPKPKANQQKQDDGRGLVLPGYKYLGPFNGLDKGEPVNAADAAALEHDKAYDQQLRAGDNPYLRYNHADAEFQERLQEDTSFGGNLGRAVFQAKKRVLEPFGLVEEGAKTAPGKKRPVEQSPQEPDSSSGIGKTGQQPAKKRLNFGQTGDSESVPDPQPLGEPPATPAAVGPTTMASGGGAPMADNNEGADGVGNASGNWHCDSTWLGDRVITTSTRTWALPTYNNHLYKQISSASTGASNDNHYFGYSTPWGYFDFNRFHCHFSPRDWQRLINNNWGFRPKRLNFKLFNIQVKEVTTNDGVTTIANNLTSTVQVFSDSEYQLPYVLGSAHQGCLPPFPADVFMIPQYGYLTLNNGSQAVGRSSFYCLEYFPSQMLRTGNNFTFSYTFEDVPFHSSYAHSQSLDRLMNPLIDQYLYYLNRTQNQSGSAQNKDLLFSRGSPAGMSVQPKNWLPGPCYRQQRVSKTKTDNNNSNFTWTGASKYNLNGRESIINPGTAMASHKDDKDKFFPMSGVMIFGKESAGASNTALDNVMITDEEEIKATNPVATERFGTVAVNLQSSSTDPATGDVHVMGALPGMVWQDRDVYLQGPIWAKIPHTDGHFHPSPLMGGFGLKHPPPQILIKNTPVPANPPAEFSATKFASFITQYSTGQVSVEIEWELQKENSKRWNPEVQYTSNYAKSANVDFTVDNNGLYTEPRPIGTRYLTRPL

SEQ ID NO: 550 - DNA, 2211 bp, synthetic construct
  misc_feature 1..2211: note = Description of Artificial Sequence: Synthetic polynucleotide
  source 1..2211: mol_type = other DNA
atggctgctgatggttatcttccagattggctcgaggacactctctctgaaggaataagacagtggtggaagctcaaacctggcccaccaccaccaaagcccgcagagcggcataaggacgacagcaggggtcttgtgcttcctgggtacaagtacctcggacccttcaacggactcgacaagggagagccggtcaacgaggcagacgcagcggccctcgagcacgacaaggcctacgaccagcagctcaaggccggtgacaacccctacctcaagtacaaccacgccgacgcggagttccagcagcggcttcagggcgacacatcgtttgggggcaacctcggcagagcagtcttccaggccaaaaagagggttcttgaacctcttggtctggttgagcaagcgggtgagacggctcctggaaagaagagaccgttgattgaatccccccagcagcccgactcctccacgggtatcggcaaaaaaggcaagcagccggctaaaaagagactcaattttggtcagactggcgactcagagtcagtccccgacccacaacctctcggagaacctccagcaacccccgctgctgtgggacctactacaatggcttcaggtggtggcgcaccaatggcagacaataacgaaggcgccgacggagtgggtaatgcctcaggaaattggcattgcgattccacatggctgggcgacagagtcatcaccaccagcacccgcacctgggccttgcccacctacaataaccacctctacaagcaaatctccagtgcttcaacgggggccagcaacgacaaccactacttcggctacagcaccccctgggggtattttgacttcaacagattccactgccacttttcaccacgtgactggcagcgactcatcaacaacaattggggattccggcccaagagactcaacttcaaactcttcaacatccaagtcaaggaggtcacgacgaatgatggcgtcacaaccatcgctaataaccttaccagcacggttcaagtcttctcggactcagactatcagctcccgtacgtgctcgggtcggctcacgagggctgcctcccgccgttcccagcagacgtcttcatggtgccacagtatggatacctcaccctgaacaacgggagtcaggcagtaggacgctcttcattttactgcctggagtactttccttctcagatgctgcgtaccggaaacaactttaccttcagctacacttttgaggacgttcctttccacagcagctacgctcacagccagagtctggaccgtctcatgaatcctctcatcgaccagtacctgtattacctgaacagaactcagaatcagtccggaagtgcccaaaacaaggacttgctgtttagccgggggtctccaactggcatgtctgttcagcccaaaaactggctacctggaccctgttatcggcagcagcgcgtttctaaaacaaaaacagacaacaacaacagcaactttacctggactggtgcttcaaaatataaccttaatgggcgtgaatctataatcaaccctggcactgctatggcctcacacaaagacgacaaagacaagttctttcccatgagcggtgtcatgatttttggaaaggagagcgccggagcttcaaacactgcattggacaatgtcatgatcacagacgaagaggaaatcaaagccactaaccccgtggccactgaaagatttgggactgtggcagtcaatctccagagcagcagcacagaccctgcgaccggagatgtgcatgccatgggagccttacctggaatggtgtggcaagacagagacgtatacctgcagggtcctatttgggccaaaattcctcacacggatggacactttcacccgtctcctctcatgggcggctttggactcaagaacccgcctcctcagatcctcatcaaaaacacgcctgttcctgcgaatcctccggcggagttttcagctacaaagtttgcttcattcatcacccagtattccacaggacaagtgagcgtggagattgaatgggagctgcagaaagaaaacagcaaacgctggaatcccgaagtgcagtatacatctaactatgcaaaatctgccaacgttgatttcactgtggacaacaatggactttatactgagcctcgccccattggcacccgttacctcacccgtcccctgtaa

SEQ ID NO: 551 - protein, 736 aa, synthetic construct
  REGION 1..736: note = Description of Artificial Sequence: Synthetic polypeptide
MAADGYLPDWLEDTLSEGIRQWWKLKPGPPPPKPAERHKDDSRGLVLPGYKYLGPFNGLDKGEPVNEADAAALEHDKAYDQQLKAGDNPYLKYNHADAEFQQRLQGDTSFGGNLGRAVFQAKKRVLEPLGLVEQAGETAPGKKRPLIESPQQPDSSTGIGKKGKQPAKKRLNFGQTGDSESVPDPQPLGEPPATPAAVGPTTMASGGGAPMADNNEGADGVGNASGNWHCDSTWLGDRVITTSTRTWALPTYNNHLYKQISSASTGASNDNHYFGYSTPWGYFDFNRFHCHFSPRDWQRLINNNWGFRPKRLNFKLFNIQVKEVTTNDGVTTIANNLTSTVQVFSDSDYQLPYVLGSAHEGCLPPFPADVFMVPQYGYLTLNNGSQAVGRSSFYCLEYFPSQMLRTGNNFTFSYTFEDVPFHSSYAHSQSLDRLMNPLIDQYLYYLNRTQNQSGSAQNKDLLFSRGSPTGMSVQPKNWLPGPCYRQQRVSKTKTDNNNSNFTWTGASKYNLNGRESIINPGTAMASHKDDKDKFFPMSGVMIFGKESAGASNTALDNVMITDEEEIKATNPVATERFGTVAVNLQSSSTDPATGDVHAMGALPGMVWQDRDVYLQGPIWAKIPHTDGHFHPSPLMGGFGLKNPPPQILIKNTPVPANPPAEFSATKFASFITQYSTGQVSVEIEWELQKENSKRWNPEVQYTSNYAKSANVDFTVDNNGLYTEPRPIGTRYLTRPL

SEQ ID NO: 552 - DNA, 2211 bp, synthetic construct
  misc_feature 1..2211: note = Description of Artificial Sequence: Synthetic polynucleotide
  source 1..2211: mol_type = other DNA
atggctgccgatggttatcttccagattggctcgaggacaacctctctgagggcattcgcgagtggtgggcgctgaaacctggagccccgaagcccaaagccaaccagcaaaagcaggacgacggccggggtctggtgcttcctggctacaagtacctcggacccttcaacggactcgacaagggggagcccgtcaacgcggcggatgcagcggccctcgagcacgacaaggcctacgaccagcagctcaaagcgggtgacaatccgtacctgcggtataaccacgccgacgccgagtttcaggagcgtctgcaagaagatacgtcttttgggggcaacctcgggcgagcagtcttccaggccaagaagcgggttctcgaacctctcggtctggttgaggaaggcgctaagacggctcctggaaagaaacgtccggtagagcaatcgccacaagagccagactcctcctcgggcatcggcaagacaggccagcagcccgctaaaaagagactcaattttggtcagactggcgactcagagtcagtccccgacccacaacctctcggagaacctccagcaacccccgctgctgtgggacctactacaatggcttcaggcggtggcgcaccaatggcagacaataacgaaggcgccgacggagtgggtaatgcctcaggaaattggcattgcgattccacatggctgggcgacagagtcatcaccaccagcacccgaacatgggccttgcccacctataacaaccacctctacaagcaaatctccagtgcttcgacgggggccagcaacgacaaccactacttcggctacagcaccccctgggggtattttgactttaacagattccactgccacttttcaccacgtgactggcagcgactcatcaacaacaactggggattccggcccaagagactcagcttcaagctcttcaacatccaggtcaaggaggtcacgacgaatgatggcgtcacaaccatcgctaataaccttaccagcacggttcaagtcttctcggactcggagtaccagcttccgtacgtcctcggctctgcgcaccagggctgcctccctccgttcccggcggacgtgttcatgattccgcaatacggctacctgacgctcaacaatggcagccaagccgtgggacgttcatccttttactgcctggaatatttcccttctcagatgctgagaacgggcaacaactttaccttcagctacacctttgaggaagtgcctttccacagcagctacgcgcacagccagagcctggaccggctgatgaatcctctcatcgatcaatacctgtattacctgaacagaactcaaaatcagtccggaagtgcccaaaacaaggacttgctgtttagccgtgggtctccagctggcatgtctgttcagcccaaaaactggctacctggaccctgttatcggcagcagcgcgtttctaaaacaaaaacagacaacaacaacagcaattttacctggactggtgcttcaaaatataacctcaatgggcgtgaatccatcatcaaccctggcactgctatggcctcacataaagacgacgaagacaagttctttcccatgagcggtgtcatgatttttggaaaagagagcgccggagcttcaaacactgcattggacaatgtcatgattacagacgaagaggaaattaaagccactaaccctgtggccaccgaaagatttgggaccgtggcagtcaatttccagagcagcagcacagaccctgcgaccggagatgtgcatgctatgggagcattacctggcatggtgtggcaagatagagacgtgtacctgcagggtcccatttgggccaaaattcctcacacagatggacactttcacccgtctcctcttatgggcggctttggactcaagaacccgcctcctcagatcctcatcaaaaacacgcctgttcctgcgaatcctccggcggagttttcagctacaaagtttgcttcattcatcacccaatactccacaggacaagtgagcgtggagattgaatgggagctgcagaaagaaaacagcaaacgctggaatcccgaagtgcagtatacatctaactatgcaaaatctgccaacattgatttcactgtggacaacaatggactttatactgagcctcgccccattggcacccgttacctcacccgtccccagtaa

SEQ ID NO: 553 - protein, 736 aa, synthetic construct
  REGION 1..736: note = Description of Artificial Sequence: Synthetic polypeptide
MAADGYLPDWLEDNLSEGIREWWALKPGAPKPKANQQKQDDGRGLVLPGYKYLGPFNGLDKGEPVNAADAAALEHDKAYDQQLKAGDNPYLRYNHADAEFQERLQEDTSFGGNLGRAVFQAKKRVLEPLGLVEEGAKTAPGKKRPVEQSPQEPDSSSGIGKTGQQPAKKRLNFGQTGDSESVPDPQPLGEPPATPAAVGPTTMASGGGAPMADNNEGADGVGNASGNWHCDSTWLGDRVITTSTRTWALPTYNNHLYKQISSASTGASNDNHYFGYSTPWGYFDFNRFHCHFSPRDWQRLINNNWGFRPKRLSFKLFNIQVKEVTTNDGVTTIANNLTSTVQVFSDSEYQLPYVLGSAHQGCLPPFPADVFMIPQYGYLTLNNGSQAVGRSSFYCLEYFPSQMLRTGNNFTFSYTFEEVPFHSSYAHSQSLDRLMNPLIDQYLYYLNRTQNQSGSAQNKDLLFSRGSPAGMSVQPKNWLPGPCYRQQRVSKTKTDNNNSNFTWTGASKYNLNGRESIINPGTAMASHKDDEDKFFPMSGVMIFGKESAGASNTALDNVMITDEEEIKATNPVATERFGTVAVNFQSSSTDPATGDVHAMGALPGMVWQDRDVYLQGPIWAKIPHTDGHFHPSPLMGGFGLKNPPPQILIKNTPVPANPPAEFSATKFASFITQYSTGQVSVEIEWELQKENSKRWNPEVQYTSNYAKSANIDFTVDNNGLYTEPRPIGTRYLTRPQ

SEQ ID NO: 554 - DNA, 2211 bp, synthetic construct
  misc_feature 1..2211: note = Description of Artificial Sequence: Synthetic polynucleotide
  source 1..2211: mol_type = other DNA
atggctgccgatggttatcttccagattggctcgaggacaacctctctgagggcattcgcgagtggtgggacttgaaacctggagccccgaaacccaaagccaaccagcaaaagcaggacgacggccggggtctggtgcttcctggctacaagtacctcggacccttcaacggactcgacaagggggagcccgtcaacgcggcggatgcagcggccctcgagcacgacaaggcctacgaccagcagctcaaagcgggtgacaatccgtaccttcggtataaccacgccgacgccgagtttcaggagcgtctgcaagaagatacgtcttttgggggcaacctcgggcgagcagtcttccaggccaaaaagagggttctcgaacctctcggtctggttgaggaagcggctaagacggctcctggaaagaaacgtccggtagagcagtcgccacaagagccagactcctcctcgggcattggcaagacaggccagcagcccgctaaaaagagactcaattttggtcagactggcgactcagagtcagtccccgacccacaacctctcggagaacctcccgcagccccctcaggtgtgggatctcttacaatggcttcaggtggtggcgcaccaatggcagacaataacgaaggcgccgacggagtgggtaatgcctcaggaaattggcattgcgattccacatggctgggcgacagagtcatcaccaccagcacccgcacctgggccttgcccacctacaataaccacctctacaagcaaatctccagtgcttcaacgggggccagcaacgacaaccactacttcggctacagcaccccctgggggtattttgacttcaacagattccactgccacttttcaccacgtgactggcaaagactcatcaacaacaattggggattccggcccaagagactcaacttcaagctcttcaacatccaagtcaaggaggtcacgacgaatgatggcgtcacgaccatcgctaataaccttaccagcacggttcaagtcttctcggactcggagtaccagttgccgtacgtcctcggctctgcgcaccagggctgcctccctccgttcccggcggacgtgttcatgattccgcagtacggctacctaacgctcaacaatggcagccaggcagtgggacggtcatccttttactgcctggaatatttcccatcgcagatgctgagaacgggcaacaactttaccttcagctacacctttgaggaagtgcctttccacagcagctacgcgcacagccagagcctggaccggctgatgaatcctctcatcgaccagtacctgtattacctgaacagaactcaaaatcagtccggaagtgcccaaaacaaggacttgctgtttagccgtgggtctccagctggcatgtctgttcagcccaaaaactggctacctggaccctgttaccggcagcagtgcgtttctaaaacaaaaacagacaacaacaacagcaactttacctggactggtgcttcaaaatataaccttaatgggcgtgaatctataatcaaccctggcactgctatggcctcacacaaagacgacaaagacaagttctttcccatgagcggtgtcatgatttttggaaaggagagcgccggagcttcaaacactgcattggacaatgtcatgatcacagacgaagaggaaatcaaagccactaaccccgtggccaccgaaagatttgggactgtggcagtcaatctccagagcagcagcacagaccctgcgaccggagatgtgcatgttatgggagccttacctggaatggtgtggcaagacagagacgtatacctgcagggtcctatttgggccaaaattcctcacacagatggacactttcacccgtctcctcttatgggcggctttggactcaagaacccgcctcctcagatcctcatcaaaaacacgcctgttcctgcgaatcctccggcggagttttcagctacaaagtttgcttcattcatcacccaatactccacaggacaagtgagcgtggagattgaatgggagctgcagaaagaaaacagcaagcgctggaatcccgaagtgcagtacacatccaattatgcaaaatctgccaacgttgatttcactgtggacaacaatggactttatactgagcctcgccccattggcacccgttacctcacccgtcccctgtaa

SEQ ID NO: 555 - protein, 736 aa, synthetic construct
  REGION 1..736: note = Description of Artificial Sequence: Synthetic polypeptide
MAADGYLPDWLEDNLSEGIREWWDLKPGAPKPKANQQKQDDGRGLVLPGYKYLGPFNGLDKGEPVNAADAAALEHDKAYDQQLKAGDNPYLRYNHADAEFQERLQEDTSFGGNLGRAVFQAKKRVLEPLGLVEEAAKTAPGKKRPVEQSPQEPDSSSGIGKTGQQPAKKRLNFGQTGDSESVPDPQPLGEPPAAPSGVGSLTMASGGGAPMADNNEGADGVGNASGNWHCDSTWLGDRVITTSTRTWALPTYNNHLYKQISSASTGASNDNHYFGYSTPWGYFDFNRFHCHFSPRDWQRLINNNWGFRPKRLNFKLFNIQVKEVTTNDGVTTIANNLTSTVQVFSDSEYQLPYVLGSAHQGCLPPFPADVFMIPQYGYLTLNNGSQAVGRSSFYCLEYFPSQMLRTGNNFTFSYTFEEVPFHSSYAHSQSLDRLMNPLIDQYLYYLNRTQNQSGSAQNKDLLFSRGSPAGMSVQPKNWLPGPCYRQQCVSKTKTDNNNSNFTWTGASKYNLNGRESIINPGTAMASHKDDKDKFFPMSGVMIFGKESAGASNTALDNVMITDEEEIKATNPVATERFGTVAVNLQSSSTDPATGDVHVMGALPGMVWQDRDVYLQGPIWAKIPHTDGHFHPSPLMGGFGLKNPPPQILIKNTPVPANPPAEFSATKFASFITQYSTGQVSVEIEWELQKENSKRWNPEVQYTSNYAKSANVDFTVDNNGLYTEPRPIGTRYLTRPL

SEQ ID NO: 556 - DNA, 2211 bp, synthetic construct
  misc_feature 1..2211: note = Description of Artificial Sequence: Synthetic polynucleotide
  source 1..2211: mol_type = other DNA
atggctgccgatggttatcttccagattggctcgaggacaacctctctgagggcattcgcgaatggtgggacttgaaacctggagccccgaaacccaaagtcaaccagcaaaagcaggacaacgctcggggtcttgtgcttccgggttacaaatacctcggacccttcaacggactcgacaagggggagcccgtcaacgcggcggacgcagcggccctcgagcacgacaaggcctacgaccagcagctcaaagcgggtgacaatccgtaccttcggtataaccacgccgacgccgagtttcaggagcgtctgcaagaagatacgtcttttgggggcaaccttggacgagcagtcttccaggccaagaagagggttctcgaaccttttggtctggttgaggaaggtgctaagacggctcctggaaagaaacgtccggtagagcagtcgccacaagagccagactcctcctcgggcattggcaagacaggccagcagcccgctaaaaagagactcaattttggtcagactggcgactcagagtcagtccccgacccacaacctctcggagaacctccagcaacccccgctgctgtgggacctactacaatggcttcaggcggtggcgcaccaatggcagacaataacgaaggcgccgacggagtgggtaatgcctcaggaaattggcattgcgattccacatggctgggcgacagagtcatcaccaccagcacccgcacctgggccttgcccacctacaataaccacctctacaagcaaatctccagtgcttcaacgggggccagcaacgacaaccactacttcggctacagcaccccctgggggtattttgacttcaacagattccactgccacttttcaccacgtgactggcaaagactcatcaacaacaattggggattccggcccaagagactcaacttcaagctcttcaacatccaagtcaaggaggtcacgacgaatgatggcgtcacgaccatcgctaataaccttaccagcacggttcaagtcttctcggactcggagtaccagttgccgtacgtcctcggctctgcgcaccagggctgcctccctccgttcccggcggacgtgttcatgattccgcaatacggctacctgacgctcaacaatggcagccaggcagtgggacggtcatccttttactgcctggaatatttcccatcgcagatgctgagaacgggcaataactttaccttcagctacacttttgaggacgttcctttccacagcagctacgctcacagccagagcctggaccggctgatgaatcctctcatcgaccagtacctgtattacctgaacagaactcagaatcagtccggaagtgcccaaaacaaggacttgctgtttagccgtgggtctccaactggcatgtctgttcagcccaaaaactggctacctggaccctgttatcggcagcagcgcgtttctaaaacaaaaacagacaacaacaacagcaactttacctggactggtgcttcaaaatataaccttaatgggcgtgaatctataatcaaccctggcactgctatggcctcacacaaagacgacgaagacaagttctttcccatgagcggtgtcatgatttttggaaaggagagcgccggagcttcaaacactgcattggacaatgtcatgatcacagacgaagaggaaatcaaagccactaaccccgtggccactgaaagatttgggactgtggcagtcaatctccagagcagcagcacagaccctgcgaccggagatgtgcatgccatgggagccttacctggaatggtgtggcaagacagagacgtatacctgcagggtcctatttgggccaaaattcctcacacggatggacactttcacccgtctcctctcatgggcggctttggacttaagcacccgcctcctcagatcctcatcaaaaacacgcctgttcctgcgaatcctccggcagagttttcggctacaaagtttgcttcattcatcacccagtattccacaggacaagtgagcgtggagattgaatgggagctgcagaaagaaaacagcaaacgctggaatcccgaagtgcagtatacatctaactatgcaaaatctgccaacgttgatttcactgtggacaacaatggactttatactgagcctcgccccattggcacccgttacctcacccgtcccctgtaa

SEQ ID NO: 557 - protein, 736 aa, synthetic construct
  REGION 1..736: note = Description of Artificial Sequence: Synthetic polypeptide
MAADGYLPDWLEDNLSEGIREWWDLKPGAPKPKVNQQKQDNARGLVLPGYKYLGPFNGLDKGEPVNAADAAALEHDKAYDQQLKAGDNPYLRYNHADAEFQERLQEDTSFGGNLGRAVFQAKKRVLEPFGLVEEGAKTAPGKKRPVEQSPQEPDSSSGIGKTGQQPAKKRLNFGQTGDSESVPDPQPLGEPPATPAAVGPTTMASGGGAPMADNNEGADGVGNASGNWHCDSTWLGDRVITTSTRTWALPTYNNHLYKQISSASTGASNDNHYFGYSTPWGYFDFNRFHCHFSPRDWQRLINNNWGFRPKRLNFKLFNIQVKEVTTNDGVTTIANNLTSTVQVFSDSEYQLPYVLGSAHQGCLPPFPADVFMIPQYGYLTLNNGSQAVGRSSFYCLEYFPSQMLRTGNNFTFSYTFEDVPFHSSYAHSQSLDRLMNPLIDQYLYYLNRTQNQSGSAQNKDLLFSRGSPTGMSVQPKNWLPGPCYRQQRVSKTKTDNNNSNFTWTGASKYNLNGRESIINPGTAMASHKDDEDKFFPMSGVMIFGKESAGASNTALDNVMITDEEEIKATNPVATERFGTVAVNLQSSSTDPATGDVHAMGALPGMVWQDRDVYLQGPIWAKIPHTDGHFHPSPLMGGFGLKHPPPQILIKNTPVPANPPAEFSATKFASFITQYSTGQVSVEIEWELQKENSKRWNPEVQYTSNYAKSANVDFTVDNNGLYTEPRPIGTRYLTRPL

SEQ ID NO: 558 - DNA, 2208 bp, synthetic construct
  misc_feature 1..2208: note = Description of Artificial Sequence: Synthetic polynucleotide
  variation 955: note = n is a, c, t, or g
  variation 971..972: note = n is a, c, t, or g
  variation 981: note = n is a, c, t, or g
  variation 986: note = n is a, c, t, or g
  variation 1235: note = n is a, c, t, or g
  variation 1694..1696: note = n is a, c, t, or g
  variation 1698: note = n is a, c, t, or g
  variation 1763..1765: note = n is a, c, t, or g
  variation 1778: note = n is a, c, t, or g
  variation 2204: note = n is a, c, t, or g
  source 1..2208: mol_type = other DNA
atggctgccgatggttatcttccagattggctcgaggacaacctctctgagggcattcgcgaatggtgggacttgaaacctggagccccgaaacccaaagtcaaccagcaaaagcaggacaacgctcggggtcttgtgcttccgggttacaaatacctcggacccttcaacggactcgacaagggggagcccgtcaacgcggcggacgcagcggccctcgagcacgacaaggcctacgaccagcagctcaaagcgggtgacaatccgtaccttcggtataaccacgccgacgccgagtttcaggagcgtctgcaagaagatacgtcttttgggggcaaccttggacgagcagtcttccaggccaagaagagggttctcgaaccttttggtctggttgaggaaggtgctaagacggctcctggaaagaaacgtccggtagagcagtcgccacaagagccagactcctcctcgggcattggcaagacaggccagcagcccgctaaaaagagactcaattttggtcagactggcgactcagagtcagtccccgacccacaacctctcggagaacctccagcaacccccgctgctgtgggacctactacaatggcttcaggcggtggcgcaccaatggcagacaataacgaaggcgccgacggagtgggtaatgcctcaggaaattggcattgcgattccacatggctgggcgacagagtcatcaccaccagcacccgaacatgggccttgcccacctataacaaccacctctacaagcaaatctccagtgcttcaacgggggccagcaacgacaaccactacttcggctacagcaccccctgggggtattttgatttcaacagattccactgccacttttcaccacgtgactggcagcgactcatcaataacaattggggattccggcccaagagactcaacttcaaactcttcaacntccaagtcaaggaggnnacgacgaangatgncgtcacaaccatcgctaataaccttaccagcacggttcaagtcttctcggactcggagtaccagcttccgtacgtcctcggctctgcgcaccagggctgcctccctccgttcccggcggacgtgttcatgattccgcaatacggctacctgacgctcaacaatggcagccaggcagtgggacggtcatccttttactgcctggaatatttcccatcgcagatgctgagaacgggcaataactttacctncagctacacttttgaggacgttcctttccacagcagctacgctcacagccagagcctggaccggctgatgaatcctctcatcgaccagtacctgtattacctgaacagaactcagaatcagtccggaagtgcccaaaacaaggacttgctgtttagccgtgggtctccaactggcatgtctgttcagcccaaaaactggctacctggaccctgttatcggcagcagcgcgtttctaaaacaaaaacagacaacaacaacagcaactttacctggactggtgcttcaaaatataaccttaatgggcgtgaatctataatcaaccctggcactgctatggcctcacacaaagacgacgaagacaagttctttcccatgagcggtgtcatgatttttggaaaggagagcgccggagcttcaaacactgcattggacaatgtcatgatcacagacgaagagannncnaagccactaaccccgtggccactgaaagatttgggactgtggcagtcaatctccaagcagcacannnaccctgcgaccgnagatgtgcatgccatgggagccttacctggaatggtgtggcaagacagagacgtatacctgcagggtcctatttgggccaaaattcctcacacggatggacactttcacccgtctcctctcatgggcggctttggacttaagcacccgcctcctcagatcctcatcaaaaacacgcctgttcctgcgaatcctccggcagagttttcggctacaaagtttgcttcattcatcacccagtattccacaggacaagtgagcgtggagattgaatgggagctgcagaaagaaaacagcaaacgctggaatcccgaagtgcagtatacatctaactatgcaaaatctgccaacgttgatttcactgtggacaacaatggactttatactgagcctcgccccattggcacccgttacctcacccgtccccngtaa

SEQ ID NO: 559 - protein, 723 aa, synthetic construct
  REGION 1..723: note = Description of Artificial Sequence: Synthetic polypeptide
MAADGYLPDWLEDNLSEGIREWWDLKPGAPKPKVNQQKQDNARGLVLPGYKYLGPFNGLDKGEPVNAADAAALEHDKAYDQQLKAGDNPYLRYNHADAEFQERLQEDTSFGGNLGRAVFQAKKRVLEPFGLVEEGAKTAPGKKRPVEQSPQEPDSSSGIGKTGQQPAKKRLNFGQTGDSESVPDPQPLGEPPATPAAVGPTTMASGGGAPMADNNEGADGVGNASGNWHCDSTWLGDRVITTSTRTWALPTYNNHLYKQISSASTGASNDNHYFGYSTPWGYFDFNRFHCHFSPRDWQRLINNNWGFRPKRLNFKLFNQVKETTDVTTIANNLTSTVQVFSDSEYQLPYVLGSAHQGCLPPFPADVFMIPQYGYLTLNNGSQAVGRSSFYCLEYFPSQMLRTGNNFTSYTFEDVPFHSSYAHSQSLDRLMNPLIDQYLYYLNRTQNQSGSAQNKDLLFSRGSPTGMSVQPKNWLPGPCYRQQRVSKTKTDNNNSNFTWTGASKYNLNGRESIINPGTAMASHKDDEDKFFPMSGVMIFGKESAGASNTALDNVMITDEEATNPVATERFGTVAVNLQSSPATDVHAMGALPGMVWQDRDVYLQGPIWAKIPHTDGHFHPSPLMGGFGLKHPPPQILIKNTPVPANPPAEFSATKFASFITQYSTGQVSVEIEWELQKENSKRWNPEVQYTSNYAKSANVDFTVDNNGLYTEPRPIGTRYLTRP

SEQ ID NO: 560 - DNA, 2208 bp, synthetic construct
  misc_feature 1..2208: note = Description of Artificial Sequence: Synthetic polynucleotide
  source 1..2208: mol_type = other DNA
atggctgccgatggttatcttccagattggctcgaggacactctctctgaaggaataagacagtggtggaagctcaaacctggcccaccaccaccaaagcccgcagagcggcataaggacgacagcaggggtcttgtgcttcctgggtacaagtacctcggacccttcaacggactcgacaagggagagccggtcaacgaggcagacgccgcggccctcgagcacgacaaagcctatgaccggcagctcgacagcggagacaacccgtacctcaagtacaaccacgccgacgcggagtttcaggagcgccttaaagaagatacgtcttttgggggcaacctcggacgagcagtcttccaggcgaaaaagagggttcttgaacctctgggcctggttgaggaacctgttaagacggctccgggaaaaaagaggccggtagagcactctcctgtggagccagactcctcctcgggaaccggaaaggcgggtcagcagcctgcaagaaaaagattgaattttggtcagactggagacgcagactcagtacctgacccccagcctctcggacagccaccagcagccccctctggtctgggaactaatacgatggctacaggcagtggcgcaccaatggcagacaataacgagggcgccgacggagtgggtaattcctcgggaaattggcattgcgattccacatggatgggcgacagagtcatcaccaccagcacccgaacctgggccctgcccacctacaacaaccacctctacaaacaaatttccagccaatcaggagcctcgaacgacaatcactactttggctacagcaccccttgggggtattttgacttcaacagattccactgccacttttcaccacgtgactggcaaagactcatcaacaacaactggggattccgacccaagagactcaagttcaagctctttaacattcaagtcaaagaggtcacgcagaatgacggtacgacgacgattgccaataaccttaccagcacggttcaggtgtttactgactcggagtaccagctcccgtacgtcctcggctcggcgcatcaaggatgcctcccgccgttcccagcagacgtcttcatggtgccacagtatggatacctcaccctgaacaacgggagtcaggcagtaggacgctcttcattttactgcctggagtactttccttctcagatgctgcgtaccggtaacaactttaccttcagctacacttttgaggacgttcctttccacagcagctacgctcacagccagagtctggaccgtctcatgaatcctctcatcgaccagtacctgtattacttgagcagaacagacgctccaagtggaaccaccacgcagtcaaggcttcagttttctcaggccggagcgagtgacattcgggaccagtctaggaactggcttcctggaccctgttaccgccagcagcgagtatcaaagacatctgcggataacaacaacagtgaatactcgtggactggagctaccaagtaccacctcaatggcagagactctctggtgaatccgggcccggccatggcaagccacaaggacgatgaagaaaagttttttcctcagagcggggttctcatctttgggaagcaaggctcagagaaaacaagtgtggacattgaaaaggtcatgattacagacgaagaggaaatcaggacaaccaatcccgtggctacggagcagtatggttctgtatctaccaacctccagagaggcaacagacaagcagctaccgcagatgtcaacacacaaggcgttcttccaggcatggtctggcaggacagagatgtgtaccttcaggggcccatctgggcaaagattccacacacggacggacattttcacccctctcccctcatgggtggattcggacttaaacaccctcctccacagattctcatcaagaacaccccggtacctgcgaatccttcgaccaccttcagtgcggcaaagtttgcttccttcatcacacagtactccacgggacaggtcagcgtggagatcgagtgggagctgcagaaggaaaacagcaaacgctggaatcccgaagttcagtacacttccaactacaacaagtctgttaatgtggactttactgtggacactaatggcgtgtattcagagcctcgccccattggcaccagatacctgactcgtaatctgtaa

SEQ ID NO: 561 - protein, 735 aa, synthetic construct
  REGION 1..735: note = Description of Artificial Sequence: Synthetic polypeptide
MAADGYLPDWLEDTLSEGIRQWWKLKPGPPPPKPAERHKDDSRGLVLPGYKYLGPFNGLDKGEPVNEADAAALEHDKAYDRQLDSGDNPYLKYNHADAEFQERLKEDTSFGGNLGRAVFQAKKRVLEPLGLVEEPVKTAPGKKRPVEHSPVEPDSSSGTGKAGQQPARKRLNFGQTGDADSVPDPQPLGQPPAAPSGLGTNTMATGSGAPMADNNEGADGVGNSSGNWHCDSTWMGDRVITTSTRTWALPTYNNHLYKQISSQSGASNDNHYFGYSTPWGYFDFNRFHCHFSPRDWQRLINNNWGFRPKRLKFKLFNIQVKEVTQNDGTTTIANNLTSTVQVFTDSEYQLPYVLGSAHQGCLPPFPADVFMVPQYGYLTLNNGSQAVGRSSFYCLEYFPSQMLRTGNNFTFSYTFEDVPFHSSYAHSQSLDRLMNPLIDQYLYYLSRTDAPSGTTTQSRLQFSQAGASDIRDQSRNWLPGPCYRQQRVSKTSADNNNSEYSWTGATKYHLNGRDSLVNPGPAMASHKDDEEKFFPQSGVLIFGKQGSEKTSVDIEKVMITDEEEIRTTNPVATEQYGSVSTNLQRGNRQAATADVNTQGVLPGMVWQDRDVYLQGPIWAKIPHTDGHFHPSPLMGGFGLKHPPPQILIKNTPVPANPSTTFSAAKFASFITQYSTGQVSVEIEWELQKENSKRWNPEVQYTSNYNKSVNVDFTVDTNGVYSEPRPIGTRYLTRNL

SEQ ID NO: 562 - DNA, 2208 bp, synthetic construct
  misc_feature 1..2208: note = Description of Artificial Sequence: Synthetic polynucleotide
  source 1..2208: mol_type = other DNA
atggctgccgatggttatcttccagattggctcgaggacactctctctgaaggaataagacagtggtggaagctcaaacctggcccaccaccaccaaagcccgcagagcggcataaggacgacagcaggggtcttgtgcttcctgggtacaagtacctcggacccttcaacggactcgacaagggagagccggtcaacgaggcagacgccgcggccctcgagcacgacaaagcctatgaccggcagctcgacagcggagacaacccgtacctcaagtacaaccacgccgacgcggagtttcaggagcgccttaaagaagatacgtcttttgggggcaacctcggacgagcagtcttccaggcgaaaaagagggttcttgaacctctgggcctggttgaggaacctgttaagacggctccgggaaaaaagaggccggtagagcactctcctgtggagccagactcctcctcgggaaccggaaaggcgggccagcagcctgcaagaaaaagattgaattttggtcagactggagacgcaaactcagtacctgacccccagcctctcggacagccaccagcagccccctctggtctgggaactaatacgatggctacaggcagtggcgcaccaatggcagacaataacgagggcgccgacggagtgggtaattcctcgggaaattggcattgcgattccacatggatgggcgacagagtcatcaccaccagcacccgaacctgggccctgcccacctacaacaaccacctctacaaacaaatttccagccaatcaggagcctcgaacgacaatcactactttggctacagcaccccttgggggtattttgacttcaacagattccactgccacttttcaccacgtgactggcaaagactcatcaacaacaactggggattccgacccaagagactcaagttcaagctctttaacattcaagtcaaagaggtcacgcagaatgacggtacgacgacgattgccaataaccttaccagcacggttcaggtgtttactgactcggagtaccagctcccgtacgtcctcggctcggcgcatcaaggatgcctcccgccgttcccagcagacgtcttcatggtgccacagtatggatacctcaccctgaacaacgggagtcgggcagtaggacgctcttcattttactgcctggagtactttccttctcagatgctgcgtaccggtaacaactttaccttcagctacacttttgaggacgttcctttccacagcagctacgctcacagccagagtctggaccgtctcatgaatcctctcatcgaccagtacctgtattacttgagcagaacagacactccaagtggaaccaccacgcagtcaaggcttcagttttctcaggccggagcgagtgacattcgggaccagtctaggaactggcttcctggaccctgttaccgccagcagcgagtatcaaagacatctgcggataacaacaacagtgaatactcgtggactggagctaccaagtaccacctcaatggcagagactctctggtgaatccgggcccggccatggcaagccacaaggacgatgaagaaaagttttttcctcagagcggggttctcatctttgggaagcaaggctcagagaaaacaagtgtggacattgaaaaggtcatgattacagacgaagaggaaatcaggacgaccaatcccgtggctacggagcagtatggttctgtatctaccaacctccagagaggcaacagacaagcagctaccgcagatgtcaacacacaaggcgttcttccaggcatggtctggcaggacagagatgtgtaccttcaggggcccatctgggcaaagattccacacacggacggacattttcacccctctcccctcatgggtggattcggacttaaacaccctcctccacagattctcatcaagaacaccccggtacctgcgaatccttcgaccaccttcagtgcggcaaagtttgcttccttcatcacacagtactccacgggacaggtcagcgtggagatcgagtgggagctgcagaaggaaaacagcaaacgctggaatcccgaagttcagtacacttccaactacaacaagtctgttaatgtggactttactgtggacactaatggcgtgtatacagagcctcgccccattggcaccagatacctgactcgtaatctgtaa

SEQ ID NO: 563 - protein, 735 aa, synthetic construct
  REGION 1..735: note = Description of Artificial Sequence: Synthetic polypeptide
MAADGYLPDWLEDTLSEGIRQWWKLKPGPPPPKPAERHKDDSRGLVLPGYKYLGPFNGLDKGEPVNEADAAALEHDKAYDRQLDSGDNPYLKYNHADAEFQERLKEDTSFGGNLGRAVFQAKKRVLEPLGLVEEPVKTAPGKKRPVEHSPVEPDSSSGTGKAGQQPARKRLNFGQTGDANSVPDPQPLGQPPAAPSGLGTNTMATGSGAPMADNNEGADGVGNSSGNWHCDSTWMGDRVITTSTRTWALPTYNNHLYKQISSQSGASNDNHYFGYSTPWGYFDFNRFHCHFSPRDWQRLINNNWGFRPKRLKFKLFNIQVKEVTQNDGTTTIANNLTSTVQVFTDSEYQLPYVLGSAHQGCLPPFPADVFMVPQYGYLTLNNGSRAVGRSSFYCLEYFPSQMLRTGNNFTFSYTFEDVPFHSSYAHSQSLDRLMNPLIDQYLYYLSRTDTPSGTTTQSRLQFSQAGASDIRDQSRNWLPGPCYRQQRVSKTSADNNNSEYSWTGATKYHLNGRDSLVNPGPAMASHKDDEEKFFPQSGVLIFGKQGSEKTSVDIEKVMITDEEEIRTTNPVATEQYGSVSTNLQRGNRQAATADVNTQGVLPGMVWQDRDVYLQGPIWAKIPHTDGHFHPSPLMGGFGLKHPPPQILIKNTPVPANPSTTFSAAKFASFITQYSTGQVSVEIEWELQKENSKRWNPEVQYTSNYNKSVNVDFTVDTNGVYTEPRPIGTRYLTRNL

SEQ ID NO: 564 - DNA, 2211 bp, synthetic construct
  misc_feature 1..2211: note = Description of Artificial Sequence: Synthetic polynucleotide
  source 1..2211: mol_type = other DNA
atggctgccgatggttatcttccagattggctcgaggacactctctctgaaggaataagacagtggtggaagctcaaacctggcccaccaccaccaaagcccgcagagcggcataaggacgacagcaggggtcttgtgcttcctgggtacaagtacctcggacccttcaacggactcgacaagggagagccggtcaacgaggcagacgccgcggccctcgagcacgacaaggcctacgaccagcagctcaaagcgggtgacaatccgtacctgcggtataaccacgccgacgccgagtttcaggagcgtctgcaagaagatacgtcttttgggggcaacctcgggcgagcagtcttccaggccaagaagcgggttctcgaacctctcggtctggttgaggaaggcgctaagacggctcctggaaagaaacgtccggtagagcagtcgccacaagagccagactcctcctcgggcatcggcaagacaggccagcagcccgctaaaaagagactcaattttggtcagactggcgactcagagtcagtccccgacccacaacctctcggagaacctccagcaacccccgctgctgtgggacctactacaatggcttcaggcggtggcgcaccaatggcagacaataacgaaggcgccgacggagtgggtaatgcctcaggaaattggcattgcgattccacatggctgggcgacagagtcatcaccaccagcacccgaacatgggccttgcccacctataacaaccacctctacaagcaaatctccagtgcttcgacgggggccagcaacgacaaccactacttcggctacagcaccccctgggggtattttgactttaacagattccactgccacttttcaccacgtgactggcagcgactcatcaacaataactggggattccggcccaagagactcagcttcaagctcttcaacatccaggtcaaggaggtcacgacgaatgatggcgtcacaaccatcgctaataaccttaccagcacggttcaagtcttctcggactcggagtaccagcttccgtacgtcctcggctctgcgcaccagggctgcctccctccgttcccggcggacgtgttcatgattccgcaatacggctacctgacgctcaacaatggcagccaagccgtgggacgttcatccttttactgcctggaatatttcccttctcagatgctgagaacgggcaacaactttaccttcagctacacctttgaggaagtgcctttccacagcagctacgcgcacagccagagcctggaccggctgatgaatcctctcatcgatcaatacctgtattacctgaacagaactcaaaatcagtccggaagtgcccaaaacaaggacttgctgtttagccgtgggtctccagctggcatgtctgttcagcccaaaaactggctacctggaccctgttatcggcagcagcgcgtttctaaaacaaaaacagacaacaacaacagcaattttacctggactggtgcttcaaaatataacctcaatgggcgtgaatccatcatcaaccctggcactgctatggcctcacacaaagacgacgaagacaagttctttcccatgagcggtgtcatgatttttggaaaagagagcgccggagcttcaaacactgcattggacaatgtcatgattacggacgaagaggaaattaaagccactaaccctgtggccaccgaaagatttgggaccgtggcagtcaatttccagagcagcagcacagaccctgcgaccggagatgtgcatgctatgggagcattacctggcatggtgtggcaagatagagacgtgtacctgcagggtcccatttgggccaaaattcctcacacagatggacactttcacccgtctcctcttatgggcggctttggactcaagaacccgcctcctcagatcctcatcaaaaacacgcctgttcctgcgaatcctccggcggagttttcagctacaaagtttgcttcattcatcactcaatactccacaggacaagtgagcgtggaaattgaatgggagctgcagaaagaaaacagcaaacgctggaatcccgaagtgcagtatacatctaactatgcaaaatctgccaacgttgatttcactgtggacaacaatggactttatactgagcctcgccccattggcacccgttacctcacccgtcccctgtaa

SEQ ID NO: 565 - protein, 736 aa, synthetic construct
  REGION 1..736: note = Description of Artificial Sequence: Synthetic polypeptide
MAADGYLPDWLEDTLSEGIRQWWKLKPGPPPPKPAERHKDDSRGLVLPGYKYLGPFNGLDKGEPVNEADAAALEHDKAYDQQLKAGDNPYLRYNHADAEFQERLQEDTSFGGNLGRAVFQAKKRVLEPLGLVEEGAKTAPGKKRPVEQSPQEPDSSSGIGKTGQQPAKKRLNFGQTGDSESVPDPQPLGEPPATPAAVGPTTMASGGGAPMADNNEGADGVGNASGNWHCDSTWLGDRVITTSTRTWALPTYNNHLYKQISSASTGASNDNHYFGYSTPWGYFDFNRFHCHFSPRDWQRLINNNWGFRPKRLSFKLFNIQVKEVTTNDGVTTIANNLTSTVQVFSDSEYQLPYVLGSAHQGCLPPFPADVFMIPQYGYLTLNNGSQAVGRSSFYCLEYFPSQMLRTGNNFTFSYTFEEVPFHSSYAHSQSLDRLMNPLIDQYLYYLNRTQNQSGSAQNKDLLFSRGSPAGMSVQPKNWLPGPCYRQQRVSKTKTDNNNSNFTWTGASKYNLNGRESIINPGTAMASHKDDEDKFFPMSGVMIFGKESAGASNTALDNVMITDEEEIKATNPVATERFGTVAVNFQSSSTDPATGDVHAMGALPGMVWQDRDVYLQGPIWAKIPHTDGHFHPSPLMGGFGLKNPPPQILIKNTPVPANPPAEFSATKFASFITQYSTGQVSVEIEWELQKENSKRWNPEVQYTSNYAKSANVDFTVDNNGLYTEPRPIGTRYLTRPL

SEQ ID NO: 566 - protein, 735 aa, synthetic construct
  REGION 1..735: note = Description of Artificial Sequence: Synthetic polypeptide
MAADGYLPDWLEDTLSEGIRQWWKLKPGPPPPKPAERHKDDSRGLVLPGYKYLGPFNGLDKGEPVNEADAAALEHDKAYDRQLDSGDNPYLKYNHADAEFQERLKEDTSFGGNLGRAVFQAKKRVLEPLGLVEEPVKTAPGKKRPVEHSPVEPDSSSGTGKAGQQPARKRLNFGQTGDADSVPDPQPLGQPPAAPSGLGTNTMATGSGAPMADNNEGADGVGNSSGNWHCDSTWMGDRVITTSTRTWALPTYNNHLYKQISSQSGASNDNHYFGYSTPWGYFDFNRFHCHFSPRDWQRLINNNWGFRPKRLKFKLFNIQVKEVTQNDGTTTIANNLTSTVQVFTDSEYQLPYVLGSAHQGCLPPFPADVFMVPQYGYLTLNNGSQAVGRSSFYCLEYFPSQMLRTGNNFTFSYTFEDVPFHSSYAHSQSLDRLMNPLIDQYLYYLSRTDTPSGTTTQSRLQFSQAGASDIRNQSRNWLPGPCYRQQRVSKTSADNNNSEYSWTGATKYHLNGRDSLVNPGPAMASHKDDEEKFFPQSGVLIFGKQGSEKTSVDIEKVMITDEEEIRTTNPVATEQYGSVSTNLQRGNRQAATADVNTQGVLPGMVWQDRDVYLQGPIWAKIPHTDGHFHPSPLMGGFGLKHPPPQILIKNTPVPANPSTTFSAAKFASFITQYSTGQVSVEIEWELQKENSKRWNPEVQYTSNYNKSVNVDFTVDTNGVYSEPRPIGTRYLTRNQ

SEQ ID NO: 567 - DNA, 2208 bp, synthetic construct
  misc_feature 1..2208: note = Description of Artificial Sequence: Synthetic polynucleotide
  source 1..2208: mol_type = other DNA
atggctgccgatggttatcttccagattggctcgaggacactctctctgaaggaataagacagtggtggaagctcaaacctggcccaccaccaccaaagcccgcagagcggcataaggacgacagcaggggtcttgtgcttcctgggtacaagtacctcggacccttcaacggactcgacaagggagagccggtcaacgaggcagacgccgcggccctcgagcacgacaaagcctatgaccggcagctcgacagcggagacaacccgtacctcaagtacaaccacgccgacgcggagtttcaggaacgccttaaagaagatacgtcttttgggggcaacctcggacgagcagtcttccaggcgaaaaagagggttcttgaacctctgggcctggttgaggaacctgttaagacggctccgggaaaaaagaggccggtagagcactctcctgtggagccagactcctcctcgggaaccggaaaggcgggccagcagcctgcaagaaaaagattgaattttggtcagactggagacgcagactcagtacctgacccccagcctctcggacagccaccagcagccccctctggtctgggaactaatacgatggctacaggcagtggcgcaccaatggcagacaataacgagggcgccgacggagtgggtaattcctcgggaaattggcattgcgattccacatggatgggcgacagagtcatcaccaccagcacccgaacctgggccctgcccacctacaacaaccacctctacaaacaaatttccagccaatcaggagcctcgaacgacaatcactactttggctacagcaccccttgggggtattttgacttcaacagattccactgccacttttcaccacgtgactggcaaagactcatcaacaacaactggggattccgacccaagagactcaagttcaagctctttaacattcaagtcaaagaggtcacgcagaatgacggtacgacgacgattgccaataaccttaccagcacggttcaggtgtttactgactcggagtaccagctcccgtacgtcctcggctcggcgcatcaaggatgcctcccgccgttcccagcagacgtcttcatggtgccacagtatggatacctcaccctgaacaacgggagtcaggcagtaggacgctcttcattttactgcctggagtactttccttctcagatgctgcgtaccggtaacaactttaccttcagctacacttttgaggacgttcctttccacagcagctacgctcacagccagagtctggaccgtctcatgaatcctctcatcgaccagtacctgtattacttgagcagaacagacactccaagtggaaccaccacgcagtcaaggcttcagttttctcaggccggagcgagtgacattcggaaccagtctaggaactggcttcctggaccctgttaccgccagcagcgagtatcaaagacatctgcggataacaacaacagtgaatactcgtggactggagctaccaagtaccacctcaatggcagagactctctggtgaatccgggcccggccatggcaagccacaaggacgatgaagaaaagttttttcctcagagcggggttctcatctttgggaagcaaggctcagagaaaacaagtgtggacattgaaaaggtcatgattacagacgaagaggaaatcaggacaaccaatcccgtggctacggagcagtatggttctgtatctaccaacctccagagaggcaacagacaagcagctaccgcagatgtcaacacacaaggcgttcttccaggcatggtctggcaggacagagatgtgtaccttcaggggcccatctgggcaaagattccacacacggacggacattttcacccctctcccctcatgggtggattcggacttaaacaccctcctccacagattctcatcaagaacaccccggtacctgcgaatccttcgaccaccttcagtgcggcaaagtttgcttccttcatcacacagtactccacgggacaggtcagcgtggagatcgagtgggagctgcagaaggaaaacagcaaacgctggaatcccgaagttcagtacacttccaactacaacaagtctgttaatgtggactttactgtggacactaatggcgtgtattcagagcctcgccccattggcaccagatacctgactcgtaatcagtaa

SEQ ID NO: 568 - DNA, 2208 bp, synthetic construct
  misc_feature 1..2208: note = Description of Artificial Sequence: Synthetic polynucleotide
  source 1..2208: mol_type = other DNA
atggctgccgatggttatcttccagattggctcgaggacactctctctgaaggaataagacagtggtggaagctcaaacctggcccaccaccaccaaagcccgcagagcggcataaggacgacagcaggggtcttgtgcttcctgggtacaagtacctcggacccttcaacggactcgacaagggagagccggtcaacgaggcagacgccgcggccctcgagcacgacaaagcctatgaccggcagctcgacagcggagacaacccgtacctcaagtacaaccacgccgacgcggagtttcaggagcgccttaaagaagatacgtcttttgggggcaacctcggacgagcagtcttccaggcgaaaaagagggttcttgaacctctgggcctggttgaggaacctgttaagacggctccgggaaaaaagaggccggtagagcactctcctgtggagccagactcctcctcgggaaccggaaaggcgggccagcagcctgcaagaaaaagattgaattttggtcagactggagacgcagactcagtacctgatccccagcctctcggacagccaccagcagccccctctggtctgggaactaatacgatggctacaggcagtggcgcaccaatggcagacaataacgagggcgccgacggagtgggtaattcctcgggaaattggcattgcgattccacatggatgggcgacagagtcatcaccaccagcacccgaacctgggccctgcccacctacaacaaccacctctacaaacaaatttccagccaatcaggagcctcgaacgacaatcactactttggctacagcaccccttgggggtattttgacttcaacagattccactgccacttttcaccacgtgactggcaaagactcatcaacaacaactggggattccgacccaagagactcaagttcaagctctttaacattcaagtcaaagaggtcacgcagaatgacggtacgacgacgattgccaataaccttaccagcacggttcaggtgtttactgactcggagtaccagctcccgtatgtcctcggctcggcgcatcaaggatgcctcccgccgttcccagcagacgtcttcatggtgccacagtatggatacctcaccctgaacaacgggagtcaggcagtaggacgctcttcattttactgcctggagtactttccttctcagatgctgcgtaccggtaacaactttaccttcagctacacttttgaggacgttcctttccacagcagctacgctcacagccagagtctggaccgtctcatgaatcctctcatcgaccagtacctgtattacttgagcagaacagacactccaagtggaaccaccacgcagtcaaggcttcagttttctcaggccggagcgagtgacattcgggaccagtctaggaactggcttcctggaccctgttaccgccagcagcgagtatcaaagacatctgcggataacaacaacagtgaatactcgtggactggagctaccaagtaccacctcaatggcagagactctctggtgaatccgggcccggccatggcaagccacaaggacgatgaagaaaagttttttcctcagagcggggttctcatctttgggaagcaaggctcagagaaaacaagtgtggacattgaaaaggtcatgattacagacgaagaggaaatcaggacaaccaatcccgtggctacggagcagtatggttctgtatctaccaacctccagagaggcaacagacaagcagctaccgcagatgtcaacacacaaggcgttcttccaggcatggtctggcaggacagagatgtgtaccttcaggggcccatctgggcaaagattccacacacggacggacattttcacccctctcccctcatgggtggattcggacttaaacaccctcctccacagattctcatcaagaacaccccggtacctgcgaatccttcgaccaccttcagtgcggcaaagtttgcttccttcatcacacagtactccacgggacaggtcagcgtggagatcgagtgggagctgcagaaggaaaacagcaaacgctggaatcccgaagttcagtacacttccaactacaacaagtctgttaatgtggactttactgtggacactaatggcgtgtattcagagcctcgccccattggcaccagatacctgactcgtaatctgtaa

SEQ ID NO: 569 - protein, 735 aa, synthetic construct
  REGION 1..735: note = Description of Artificial Sequence: Synthetic polypeptide
MAADGYLPDWLEDTLSEGIRQWWKLKPGPPPPKPAERHKDDSRGLVLPGYKYLGPFNGLDKGEPVNEADAAALEHDKAYDRQLDSGDNPYLKYNHADAEFQERLKEDTSFGGNLGRAVFQAKKRVLEPLGLVEEPVKTAPGKKRPVEHSPVEPDSSSGTGKAGQQPARKRLNFGQTGDADSVPDPQPLGQPPAAPSGLGTNTMATGSGAPMADNNEGADGVGNSSGNWHCDSTWMGDRVITTSTRTWALPTYNNHLYKQISSQSGASNDNHYFGYSTPWGYFDFNRFHCHFSPRDWQRLINNNWGFRPKRLKFKLFNIQVKEVTQNDGTTTIANNLTSTVQVFTDSEYQLPYVLGSAHQGCLPPFPADVFMVPQYGYLTLNNGSQAVGRSSFYCLEYFPSQMLRTGNNFTFSYTFEDVPFHSSYAHSQSLDRLMNPLIDQYLYYLSRTDTPSGTTTQSRLQFSQAGASDIRDQSRNWLPGPCYRQQRVSKTSADNNNSEYSWTGATKYHLNGRDSLVNPGPAMASHKDDEEKFFPQSGVLIFGKQGSEKTSVDIEKVMITDEEEIRTTNPVATEQYGSVSTNLQRGNRQAATADVNTQGVLPGMVWQDRDVYLQGPIWAKIPHTDGHFHPSPLMGGFGLKHPPPQILIKNTPVPANPSTTFSAAKFASFITQYSTGQVSVEIEWELQKENSKRWNPEVQYTSNYNKSVNVDFTVDTNGVYSEPRPIGTRYLTRNL

SEQ ID NO: 570 - DNA, 2601 bp, synthetic construct
  misc_feature 1..2601: note = Description of Artificial Sequence: Synthetic polynucleotide
  source 1..2601: mol_type = other DNA
ccatcgacgtcagacgcggaagcttcgatcaactacgcggacaggtaccaaaacaaatgttctcgtcacgtgggcatgaatctgatgctgtttccctgcagacaatgcgagagactgaatcagaattcaaatatctgcttcactcacggtgtcaaagactgtttagagtgctttcccgtgtcagaatctcaacccgtttctgtcgtcaaaaaggcgtatcagaaactgtgctacattcatcacatcatgggaaaggtgccagacgcttgcactgcttgcgacctggtcaatgtggacttggatgactgtgtttctgaacaataaatgacttaaaccaggtatgactgccgatggttatcttccagattggctcgaggacaaccttagtgaaggaattcgcgagtggtgggctttgaaacctggagcccctcaacccaaggcaaatcaacaacatcaagacaacgctcgaggtcttgtgcttccgggttacaaataccttggacccggcaacggactcgacaagggggagccggtcaacgcagcagacgcggcggccctcgagcacgacaaggcctacgaccagcagctcaaggccggagacaacccgtacctcaagtacaaccacgccgacgccgagttccaggagcggctcaaagaagatacgtcttttgggggcaacctcgggcgagcagtcttccaggccaaaaagaggcttcttgaacctcttggtctggttgaggaagcggctaagacggctcctggaaagaagaggcctgtagagcagtctcctcaggaaccggactcctccgcgggtattggcaaatcgggtgcacagcccgctaaaaagagactcaatttcggtcagactggcgacacagagtcagtcccagaccctcaaccaatcggagaacctcccgcagccccctcaggtgtgggatctcttacaatggcttcaggtggtggcgcaccagtggcagacaataacgaaggtgccgatggagtgggtagttcctcgggaaattggcattgcgattcccaatggctgggggacagagtcatcaccaccagcacccgaacctgggccctgcccacctacaacaatcacctctacaagcaaatctccaacagcacatctggaggatcttcaaatgacaacgcctacttcggctacagcaccccctgggggtattttgacttcaacagattccactgccacttctcaccacgtgactggcagcgactcatcaacaacaactggggattccggcctaagcaactcaacttcaagctcttcaacattcaggtcaaagaggttacggacaacaatggagtcaagaccatcgccaataaccttaccagcacggtccaggtcttcacggactcagactatcagctcccgtacgtgctcgggtcggctcacgagggctgcctcccgccgttcccagcggacgttttcatgattcctcagtacgggtatctgacgcttaatgatggaagccaggccgtgggtcgttcgtccttttactgcctggaatatttcccgtcgcaaatgctaagaacgggtaacaacttccagttcagctacgagtttgagaacgtacctttccatagcagctacgctcacagccaaagcctggaccgactaatgaatccactcatcgaccaatacttgtactatctctcaaagactattaacggttctggacagaatcaacaaacgctaaaattcagtgtggccggacccagcaacatggctgtccagggaagaaactacatacctggacccagctaccgacaacaacgtgtctcaaccactgtgactcaaaacaacaacagcgaatttgcttggcctggagcttcttcttgggctctcaatggacgtaatagcttgatgaatcctggacctgctatggccagccacaaagaaggagaggaccgtttctttcctttgtctggatctttaatttttggcaaacaaggaactggaagagacaacgtggatgcggacaaagtcatgataaccaacgaagaagaaattaaaactactaacccggtagcaacggagtcctatggacaagtggccacaaaccaccagagtgcccaagcacaggcgcagaccggctgggttcaaaaccaaggaatacttccgggtatggtttggcaggacagagatgtgtacctgcaaggacccatttgggccaaaattcctcacacggacggcaactttcacccttctccgctgatgggagggtttggaatgaagcacccgcctcctcagatcctcatcaaaaacacacctgtacctgcggatcctccaacggccttcaacaaggacaagctgaactctttcatcacccagtattctactggccaagtcagcgtggagatcgagtgggagctgcagaaggaaaacagcaagcgctggaacccggagatccagtacacttccaactattacaagtctaataatgttgaatttgctgttaatactgaaggtgtatatagtgaaccccgccccattggcaccagatacctgactcgtaatctgtaattgcttgttaatcaataaaccgtttaattcgtttcagttgaactgcggcc

SEQ ID NO: 571 - DNA, 2601 bp, synthetic construct
  misc_feature 1..2601: note = Description of Artificial Sequence: Synthetic polynucleotide
  source 1..2601: mol_type = other DNA
ccatcgacgtcagacgcggaagcttcgatcaactacgcggacaggtaccaaaacaaatgttctcgtcacgtgggcatgaatctgatgctgtttccctgcagacaatgcgagagactgaatcagaattcaaatatctgcttcactcacggtgtcaaagactgtttagagtgctttcccgtgtcagaatctcaacccgtttctgtcgtcaaaaaggcgtatcagaaactgtgctacattcatcacatcatgggaaaggtgccagacgcttgcactgcttgcgacctggtcaatgtggacttggatgactgtgtttctgaacaataaatgacttaaaccaggtatggctgccgatggttatcttccagattggctcgaggacaaccttagtgaaggaattcgcgagtggtgggctttgaaacctggagcccctcaacccaaggcaaatcaacaacatcaagacaacgctcgaggtcttgtgcttccgggttacaaataccttggacccggcaacggactcgacaagggggagccggtcaacgcagcagacgcggcggccctcgagcacgacaaggcctacgaccagcagctcaaggccggagacaacccgtacctcaagtacaaccacgccgacgccgagttccaggagcggctcaaagaagatacgtcttttgggggcaacctcgggcgagcagtcttccaggccaaaaagaggcttcttgaacctcttggtctggttgaggaagcggctaagacggctcctggaaagaagaggcctgtagagcagtctcctcaggaaccggactcctccgcgggtattggcaaatcgggtgcacagcccgctaaaaagagactcaatttcggtcagactggcgacacagagtcagtcccagaccctcaaccaatcggagaacctcccgcagccccctcaggtgtgggatctcttacaatggcttcaggtggtggcgcaccagtggcagacaataacgaaggtgccgatggagtgggtagttcctcgggaaattggcattgcgattcccaatggctgggggacagagtcatcaccaccagcacccgaacctgggccctgcccacctacaacaatcacctctacaagcaaatctccaacagcacatctggaggatcttcaaatgacaacgcctacttcggctacagcaccccctgggggtattttgacttcaacagattccactgccacttctcaccacgtgactggcagcgactcatcaacaacaactggggattccggcctaagcgactcaacttcaagctcttcaacattcaggtcaaagaggttacggacaacaatggagtcaagaccatcgccaataaccttaccagcacggtccaggtcttcacggactcagactatcagctcccgtacgtgctcgggtcggctcacgagggctgcctcccgccgttcccagcggacgttttcatgattcctcagtacgggtatctgacgcttaatgatggaagccaggccgtgggtcgttcgtccttttactgcctggaatatttcccgtcgcaaatgctaagaacgggtaacaacttccagttcagctacgagtttgagaacgtacctttccatagcagctacgctcacagccaaagcctggaccgactaatgaatccactcatcgaccaatacttgtactatctctcaaagactattaacggttctggacagaatcaacaaacgctaaaattcagtgtggccggacccagcaacatggctgtccagggaagaaactacatacctggacccagctaccgacaacaacgtgtctcaaccactgtgactcaaaacaacaacagcgaatttgcttggcctggggcttcttcttgggctctcaatggacgtaatagcttgatgaatcctggacctgctatggccagccacaaagaaggagaggaccgtttctttcctttgtctggatctttaatttttggcaaacaaggaactggaagagacaacgtggatgcggacaaagtcatgataaccaacgaagaagaaattaaaactactaacccggtagcaacggagtcctatggacaagtggccacaaaccaccagagtgcccaagcacaggcgcagaccggctgggttcaaaaccaaggaatacttccgggtatggtttggcaggacagagatgtgtacctgcaaggacccatttgggccaaaattcctcacacgggcggcaactttcacccttctccgctgatgggagggtttggaatgaagcacccgcctcctcagatcctcatcaaaaacacacctgtacctgcggatcctccaacggccttcaacaaggacaagctgaactctttcatcacccagtattctactggccaagtcagcgtggagatcgagtgggagctgcagaaggaaaacagcaagcgctggaacccggagatccagtacacttccaactattacaagtctaataatgttgaatttgctgttaatactggaggtgtatatagtgaaccccgccccattggcaccagatacctgactcgtaatctgtaattgcttgttaatcaataaaccgtttaattcgtttcagttgaactgcggcc

SEQ ID NO: 572 - DNA, 2601 bp, synthetic construct
  misc_feature 1..2601: note = Description of Artificial Sequence: Synthetic polynucleotide
  source 1..2601: mol_type = other DNA
ccatcgacgtcagacgcggaagcttcgatcaactacgcggacaggtaccaaaacaaatgttctcgtcacgtgggcatgaatctgatgctgtttccctgcagacaatgcgagagactgaatcagaattcaaatatctgcttcactcacggtgtcaaagactgtttagagtgctttcccgtgtcagaatctcaacccgtttctgtcgtcaaaaaggcgtatcagaaactgtgctacattcatcacatcatgggaaaggtgccagacgcttgcactgcttgcgacctggtcaatgtggactcggatgactgtgtttctgaacaataaatgacttaaaccaggtatggctgccgatggttatcttccagattggctcgaggacaaccttagtgaaggaattcgcgagtggtgggctttgaaacctggagcccctcaacccaaggcaaatcaacaacatcaagacaacgctcgaggtcttgtgcttccgggttacaaataccttggacccggcaacggactcgacaagggggagccggtcaacgcagcagacgcggcggccctcgagcacgacaaggcctacgaccagcagctcaaggccggagacaacccgtacctcaagtacaaccacgccgacgccgagttccaggagcggctcaaagaagatacgtcttttgggggcaacctcgggcgagcagtcttccaggccaaaaagaggcttcttgaacctcttggtctggttgaggaagcggctaagacggctcctggaaagaagaggcctgtagagcagtctcctcaggaaccggactcctccgcgggtattgacaaatcgggtgcacagcccgctaaaaagagactcaatttcggtcagactggcgacacagagtcagtcccagaccctcaaccaatcggagaacctcccgcagccccctcaggtgtgggatctcttacaatggcttcaggtggtggcgcaccagtggcagacaataacgaaggtgccgatggagtgggtagttcctcgggaaattggcattgcgattcccaatggctgggggacagagtcatcaccaccagcacccgaacctgggccctgcccacctacaacaatcacctctacaagcaaatctccaacagcacatctggaggatcttcaaatgacaacgcctacttcggctacagcaccccctgggggtattttgacttcaacagattccactgccacttctcaccacgtgactggcagcgactcatcaacaacaactggggattccggcctaagcgactcaacttcaagctcttcaacattcaggtcaaagaggttacggacaacaatggagtcaagaccatcgccaataaccttaccagcacggtccaggtcttcacggactcggactatcagctcccgtacgtgctcgggtcggctcacgagggctgcctcccgccgttcccagcggacgttttcatgattcctcagtacgggtatctgacgcttaatgatggaagccaggccgtgggtcgttcgtccttttactgcctggaatatttcccgtcgcaaatgctaagaacgggtaacaacttccagttcagctacgagtttgagaacgtacctttccatagcagctacgctcacagccaaagcctggaccgactaatgaatccactcatcgaccaatacttgtactatctctcaaagactattaacggttctggacagaatcaacaaacgctaaaattcagtgtggccggacccagcaacatggctgtccagggaagaaactacatacctggacccagctaccgacaacaacgtgtctcaaccactgtgactcaaaacaacaacagcgaatttgcttggcctggagcttcttcttgggctctcaatggacgtaatagcttgatgaatcctggacctgctatggccagccacaaagaaggagaggaccgtttctttcctttgtctggatctttaatttttggcaaacaaggaactggaagagacaacgtggatgcggacaaagtcatgataaccaacgaagaagaaattaaaactactaacccggtagcaacggagtcctatggacaagtggccacaaaccaccagagtgcccaagcacaggcgcagaccggctgggttcaaaaccaaggaatacttccgggtatggtttggcaggacagagatgtgtacctgcaaggacccatttgggccaaaattcctcacacggacggcaactttcacccttctccgctgatgggagggtttggaatgaagcacccgcctcctcagatcctcatcaaaaacacacctgtacctgcggatcctccaacggccttcaacaaggacaagctgaactctttcatcacccagtattctactggccaagtcagcgtggagatcgagtgggagctgcagaaggaaaacagcaagcgctggaacccggagatccagtacacttccaactattacaagtctaataatgttgaatttgctgttaatactgaaggtgtatatagtgaaccccgccccattggcaccagatacctgactcgtaatctgtaattgcttgttaatcaataaaccgtttaattcgtttcagttgaactgcggcc

SEQ ID NO: 573 - DNA, 2601 bp, synthetic construct
  misc_feature 1..2601: note = Description of Artificial Sequence: Synthetic polynucleotide
  source 1..2601: mol_type = other DNA
ccatcgacgtcagacgcggaagcttcgatcaactacgcggacaggtaccaaaacaaatgttctcgtcacgtgggcatgaatctgatgctgtttccctgcagacaatgcgagagactgaatcagaattcaaatatctgcttcactcacggtgtcaaagactgtttagagtgctttcccgtgtcagaatctcaacccgtttctgtcgtcaaaaaggcgtatcagaaactgtgctacattcatcacatcatgggaaaggtgccagacgcttgcactgcttgcgacctggtcaatgtggacttggatgactgtgtttctgaacaataaatgacttaaaccaggtatggctgccgatggttatcttccagattggctcgaggacaaccttagtgaaggaattcgcgagtggtgggctttgaaacctggagcccctcaacccaaggcaaatcaacaacatcaagacaacgctcgaggtcttgtgcttccgggttacaaataccttggacccggcaacggactcgacaagggggagccggtcaacgcagcagacgcggcggccctcgagcacgacaaggcctacgaccagcagctcaaggccggagacaacccgtacctcaagtacaaccacgccgacgccgagttccaggagcggctcaaagaagatacgtcttttgggggcaacctcgggcgagcagtcctccaggccaaaaagaggcttcttgaacctcttggtctggttgaggaagcggctaagacggctcctggaaagaagaggcctgtagagcagtctcctcaggaaccggactcctccgcgggtattggcaaatcgggtgcacagcccgctaaaaagagactcaatttcggtcagactggcgacacagagtcagtcccagaccctcaaccaatcggagaacctcccgcagccccctcaggtgtgggatctcttacaatggcttcaggtggtggcgcaccagtggcagacaataacgaaggtgccgatggagtgggtagttcctcgggaaattggcattgcgattcccaatggctgggggacagagtcatcaccaccagcacccgaacctgggccctgcccacctacaacaatcacctctacaagcaaatctccaacagcacatctggaggatcttcaaatgacaacgcctacttcggctacagcaccccctgggggtattttgacttcaacagattccactgccacttctcaccacgtgactggcagcgactcatcaacaacaactggggattccggcctaagcgactcaacttcaagctcttcaacattcaggtcaaagaggttacggacaacaatggagtcaagaccatcgccaataaccttaccagcacggtccaggtcttcacggactcagactatcagctcccgtacgtgctcgggtcggctcacgagggctgcctcccgccgttcccagcggacgttttcatgattcctcagtacgggtatctgacgcttaatgatggaagccaggccgtgggtcgttcgtccttttactgcctggaatatttcccgtcgcaaatgctaagaacgggtaacaacttccagttcagctacgagtttgagaacgtacctttccatagcagctacgctcacagccaaagcctggaccgactaatgaatccactcatcgaccaatacttgtactatctctcaaagactattaacggttctggacagaatcaacaaacgctaaaattcagtgtggccggatccagcaacatggctgtccagggaagaaactacatacctggacccagctaccgacaacaacgtgtctcaaccactgtgactcaaaacaacaacagcgaatttgcttggcctggagcttcttcttgggctctcaatggacgtaatagcttgatgaatcctggacctgctatggccagccacaaagaaggagaggaccgtttctttcctttgtctggatctttaatttttggcaaacaaggaactggaagagacaacgtggatgcggacaaagtcatgataaccaacgaagaagaaattaaaactactaacccggtagcaacggagtcctatggacaagtggccacaaaccaccagagtgcccaagcacaggcgcagaccggctgggttcaaaaccaaggaatacttccaggtatggtttggcaggacagagatgtgtacctgcaaggacccatttgggccaaaattcctcacacggacggcaactttcacccttctccgctgatgggagggtttggaatgaagcacccgcctcctcagatcctcatcaaaaacacacctgtacctgcggatcctccaacggccttcaacaaggacaagctgaactctttcatcacccagtattctactggccaagtcagcgtggagatcgagtgggagctgcagaaggaaaacagcaagcgctggaacccggagatccagtacacttccaactattacaagtctaataatgttgaatttgctgttaatactgaaggtgtatatagtgaaccccgccccattggcaccagatacctgactcgtaatctgtaattgcttgttaatcaataaaccgtttaattcgtttcagttgaactgcggcc

SEQ ID NO: 574 - DNA, 2601 bp, synthetic construct
  misc_feature 1..2601: note = Description of Artificial Sequence: Synthetic polynucleotide
  source 1..2601: mol_type = other DNA
ccatcgacgtcagacgcggaagcttcgatcaactacgcggacaggtaccaaaacaaatgttctcgtcacgtgggcatgaatctgatgctgtttccctgcagacaatgcgagagactgaatcagaattcaaatatctgcttcactcacggtgtcaaagactgtttagagtgctttcccgtgtcagaatctcaacccgtttctgtcgtcaaaaaggcgtatcagaaactgtgctacattcatcacatcatgggaaaggtgccagacgcttgcactgcttgcgacctggtcaatgtggacttggatgactgtgtttctgaacaataaatgacttaaaccaggtatggctgccgatggttatcttccagattggctcgaggacaaccttagtgaaggaattcgcgagtggtgggctttgaaacctggagcccctcaacccaaggcaaatcaacaacatcaagacaacgctcgaggtcttgtgcttccgggttacaaataccttggacccggcaacggactcgacaagggggagccggtcaacgcagcagacgcggcggccctcgagcacgacagggcctacgaccagcagctcaaggccggagacaacccgtacctcaagtacaaccacgccgacgccgagttccaggagcggctcaaagaagatacgtcttttgggggcaacctcgggcgagcagtcttccaggccaaaaagaggcttcttgaacctcttggtctggttgaggaagcggctaagacggctcctggaaagaagaggcctgtagagcagtctcctcaggaaccggactcctccgcgggtattggcaaatcgggtgcacagcccgctaaaaagagactcaatttcggtcagactggcgacacagagtcagtcccagaccctcaaccaatcggagaacctcccgcagccccctcaggtgtgggatctcttacaatggcttcaggtggtggcgcaccagtggcagacaataacgaaggtgccgatggagtgggtagttcctcgggaaattggcattgcgattcccaatggctgggggacagagtcatcaccaccagcacccgaacctgggccctgcccacctacaacaatcacctctacaagcaaatctccaacagcacatctggaggatcttcaaatgacaacgcctacttcggctacagcaccccctgggggtattttgacttcaacagattccactgccacttctcaccacgtgactggcagcgactcatcaacaacaactggggattccggcctaagcgactcaacttcaagctcttcaacattcaggtcaaagaggttacggacaacaatggagtcaagaccatcgccaataaccttaccagcacggtccaggtcttcacggactcagactatcagctcccgtacgtgctcgggtcggctcacgagggctgcctcccgccgttcccagcggacgttttcatgattcctcagtacgggtatctgacgcttaatgatggaagccaggccgtgggtcgttcgtccttttactgcctggaatatttcccgtcgcaaatgctaagaacgggtaacaacttccagttcagctacgagtttgagaacgtacctttccatagcagctacgctcacagccaaagcctggaccgactaatgaatccactcatcgaccaatacttgtactatctctcaaagactattaacggttctggacagaatcaacaaacgctaaaattcagtgtggccggacctagcaacatggctgtccagggaagaaactacatacctggacccagctaccgacaacaacgtgtctcaaccactgtgactcaaaacaacaacagcgaatttgcttggcctggagcttcttcttgggctctcaatggacgtaatagcttgatgaatcctggacctgctatggccagccacaaagaaggagaggaccgtttctttcctttgtctggatctttaatttttggcaaacaaggaactggaagagacaacgtggatgcggacaaagtcatgataaccaacgaagaagaaattaaaactactaacccggtagcaacggagtcctatggacaagtggccacaaaccaccagagtgcccaagcacaggcgcagaccggctgggttcaaaaccaaggaatacttccgggtatggtttggcaggacagagatgtgtacctgcaaggacccatttgggccaaaattcctcacacggacggcaactttcacccttctccgctgatgggagggtttggaatgaagcacccgcctcctcagatcctcatcaaaaacacacctgtacctgcggatcctccaacggccttcaacaaggacaagctgaactctttcatcacccagtattctactggccaagtcagcgtggagatcgagtgggagctgcagaagaaaaacagcaagcgctggaacccggagatccagtacacttccaactattacaagtctaataatgttgaatttgctgttaacactgaaggtgtatatagtgaaccccgccccattggcaccagatacctgactcgtaatctgtaattgcttgttaatcaataaaccgtttaattcgtttcagttgaactgcggcc

SEQ ID NO: 575 - DNA, 2601 bp, synthetic construct
  misc_feature 1..2601: note = Description of Artificial Sequence: Synthetic polynucleotide
  source 1..2601: mol_type = other DNA
ccatcgacgtcagacgcggaagcttcgatcaactacgcggacaggtaccaaaacaaatgttctcgtcacgtgggcatgaatctgatgctgtttccctgcagacaatgcgagagactgaatcagaattcaaatatctgcttcactcacggtgtcaaagactgtttagagtgctttcccgtgtcagaatctcaacccgtttctgtcgtcaaaaaggcgtatcagaaactgtgctacattcatcacatcatgggaaaggtgccagacgcttgcactgcttgcgacctggtcaatgtggacttggatgactgtgtttctgaacaataaatgacttaaaccaggtatggctgccgatggttatcttccagattggctcgaggacaaccttagtgaaggaattcgcgagtggtgggctttgaaacctggagcccctcaacccaaggcaaatcaacaacatcaagacaacgctcgaggtcttgtgcttccgggttacaaataccttggacccggcaacggactcgacaagggggagccggtcaacgcagcagacgcggcggccctcgagcacgacaaggcctacgaccagcagctcaaggccggagacaacccgtacctcaagtacaaccacgccgacgccgagttccaggagcggctcaaagaagatacgtcttttgggggcaacctcgggcgagcagtcttccaggccaaaaagaggcttcttgaacctcttggtctggttgaggaagcggctaagacggctcctggaaagaagaggcctgtagagcagtctcctcaggaaccggactcctccgcgggtattggcaaatcgggtgcacagcccgctaaaaagagactcaatttcggtcagactggcgacacagagtcagtcccagaccctcaaccaatcggagaacctcccgcagccccctcaggtgtgggatctcttacaatggcttcaggtggtggcgcaccagtggcagacaataacgaaggtgccgatggagtgggtagttcctcgggaaattggcattgcgattcccaatggctgggggacagagtcatcaccaccagcacccgaacctgggccctgcccacctacaacaatcacctctacaagcaaatctccaacagcacatctggaggatcttcaaatgacaacgcctacttcggctacagcaccccctgggggtattttgacttcaacagattccactgccacttctcaccacgtgactggcagcgactcatcaacaacaactggggattccggcctaagcgactcaacttcaagctcttcaacattcaggtcaaagaggttacggacaacaatggagtcaagaccatcgccaataaccttaccagcacggtccaggtcttcacggactcagactatcagctcccgtacgtgctcgggtcggctcacgagggctgcctcccgccgttcccagcggacgttttcatgattcctcagtacgggtatctgacgcttaatgatggaagccaggccgtgggtcgttcgtccttttactgcctggaatatttcccgtcgcaaatgctaagaacgggtaacaacttccagttcagctacgagtttgagaacgtacctttccatagcagctacgctcacagccaaagcctggaccgactaatgaatccactcatcgaccaatacttgtactatctctcaaagactattaacggttctggacagaatcaacaaacgctaaaattcagtgtggccggacccagcaacatggctgtccagggaagaaactacatacctggacccagctaccgacaacaacgtgtctcaaccactgtgactcaaaacaacaacagcgaatttgcttggcctggagcttcttcttgggctctcaatggacgtaatagcttgatgaatcctggacctgctatggccagccacaaagaaggagaggaccgtttctttcctttgtctggatctttaatttttggcaaacaaggaactggaagagacaacgtggatgcggacaaagtcatgataaccaacgaagaagaaattaaaactactaacccggtagcaacggagtcctatggacaagtggccacaaaccaccagagtgcccaagcacgggcgcagaccggctgggttcaaaaccaaggaatacttccgggtatggtttggcaggacagagatgtgtacctgcaaggacccatttgggccaaaattcctcacacggacggcaactttcacccttctccgctgatgggagggtttggaatgaagcacccgcctcctcagatcctcatcaaaaacacacctgtacctgcggatcctccaacggccttcaacaaggacaagctgaactctttcatcacccagtattctactggccaagtcagcgtggagatcgagtgggagctgcagaaggaaaacagcaagcgctggaacccggagatccagtacacttccaactattacaagtctaataatgttgaatttgctgttaatactgaaggtgtatatagtgaaccccgccccattggcaccagatacctgactcgtaatctgtaattgcttgttaatcaataaaccgtttaattcgtttcagttgaactgcggcc

SEQ ID NO: 576 - DNA, 2601 bp, synthetic construct
  misc_feature 1..2601: note = Description of Artificial Sequence: Synthetic polynucleotide
  source 1..2601: mol_type = other DNA
ccatcgacgtcagacgcggaagcttcgatcaactacgcggacaggtaccaaaacaaatgttctcgtcacgtgggcatgaatctgatgctgtttccctgcagacaatgcgagagactgaatcagaattcaaatatctgcttcactcacggtgtcaaagactgtttagagtgctttcccgtgtcagaatctcaacccgtttctgtcgtcaaaaaggcgtatcagaaactgtgctacattcatcacatcatgggaaaggtgccagacgcttgcactgcttgcgacctggtcaatgtggacttggatgactgtgtttctgaacaataaatgacttaaaccaggtatggctgccgatggttatcttccagattggctcgaggacaaccttagtgaaggaattcgcgagtggtgggctttgaaacctggagcccctcaacccaaggcaaatcaacaacatcaagacaacgctcgaggtcttgtgcttccgggttacaaataccttggacccggcaacggactcgacaagggggagccggtcaacgcagtagacgcggcggccctcgagcacgacaaggcctacgaccagcagctcaaggccggagacaacccgtacctcaagtacaaccacgccgacgccgagttccaggagcggctcaaagaagatacgtcttttgggggcaacctcgggcgagcagtcttccaggccaaaaagaggcttcttgaacctcttggtctggttgaggaagcggctaagacggctcctggaaagaagaggcctgtagagcagtctcctcaggaaccggactcctccgcgggtattggcaaatcgggtgcacagcccgctaaaaagagactcaatttcggtcagactggcgacacagagtcagtcccagaccctcaaccaatcggagaacctcccgcagccccctcaggtgtgggatctcttacaatggcttcaggtggtggcgcaccagtggcagacaataacgaaggtgccgatggagtgggtagttcctcgggaaattggcattgcgattcccaatggctgggggacagagtcatcaccaccagcacccgaacctgggccctgcccacctacaacaatcacctctacaagcaaatctccaacagcacatctggaggatcttcaaatgacaacgcctacttcggctacagcaccccctgggggtattttgacttcaacagattccactgccacttctcaccacgtgactggcagcgactcatcaacaacaactggggatttcggcctaagcgactcaacttcaagctcttcaacattcaggtcaaagaggttacggacaacaatggagtcaagaccatcgccaataaccttaccagcacggtccaggtcttcacggactcagactatcagctcccgtacgtgctcgggtcggctcacgagggctgcctcccgccgttcccagcggacgttttcatgattcctcagtacgggtatctgacgcttaatgatggaagccaggccgtgggtcgttcgtccttttactgcctggaatatttcccgtcgcaaatgctaagaacgggtaacaacttccagttcagctacgagtttgagaacgtacctttccatagcagctacgctcacagccaaagcctggaccgactaatgaatccactcatcgaccaatacttgtactatctctcaaagactattaacggttctggacagaatcaacaaacgctaaaattcagtgtggccggacccagcaacatggctgtccagggaagaaactacatacctggacccagctaccgacaacaacgtgtctcaaccactgtgactcaaaacaacaacagcgaatttgcttggcctggagcttcttcttgggctctcaatggacgtaatagcttgatgaatcctggacctgctatggccagccacaaagaaggagaggaccgtttctttcctttgtctggatctttaatttttggcaaacaaggaactggaagagacaacgtggatgcggacaaagtcatgataaccaacgaagaagaaattaaaactactaacccggtagcaacggagtcctatggacaagtggccacaaaccaccagagtgcccaagcacaggcgcagaccggctgggttcaaaaccaaggaatacttccgggtatggtttggcaggacagagatgtgtacctgcaaggacccatttgggccaaaattcctcacacggacggcaactttcacccttctccgctgatgggagggtttggaatgaagcacccgcctcctcagatcctcatcaaaaacacacctgtacctgcggatcctccaacggccttcaacaaggacaagctgaactctttcatcacccagtattctactggccaagtcagcgtggagatcgagtgggagctgcagaaggaaaacagcaagcgctggaacccggagatccagtacacttccaactattacaagtctaataatgttgaatttgctgttaatactgaaggtgtatatagtgaaccccgccccattggcaccagatacctgactcgtaatctgtaattgcttgttaatcaataaaccgtttaattcgtttcagttgaactgcggcc

SEQ ID NO: 577 - DNA, 2580 bp, synthetic construct
  misc_feature 1..2580: note = Description of Artificial Sequence: Synthetic polynucleotide
  source 1..2580: mol_type = other DNA
ccatcgacgtcagacgcggaagcttcgatcaactacgcggacaggtaccaaaacaaatgttctcgtcacgtgggcatgaatctgatgctgtttccctgcagacaatgcgagagactgaatcagaattcaaatatctgcttcactcacggtgtcaaagactgtttagagtgctttcccgtgtcagaatctcaacccgtttctgtcgtcaaaaaggcgtatcagaaactgtgctacattcatcacatcatgggaaaggtgccagacgcttgcactgcttgcgacctggtcaatgtggacttggatgactgtgtttctgaacaataaatgacttaaaccaggtatggctgccgatggttatcttccagattggctcgaggacaaccttagtgaaggaattcgcgagtggtgggctttgaaacctggagcccctcaacccaaggcaaatcaacaacatcaagacaacgctcgaggtcttgtgcttccgggttacaaataccttggacccggcaacggactcgacaagggggagccggtcaacgcagcagacgcggcggccctcgagcacgacaaggcctacgaccagcagctcaaggccggagacaacccgtacctcaagtacaaccacgccgacgccgagttccaggagcggctcaaagaagatacgtcttttgggggcaacctcgggcgagcagtcttccaggccaaaaagaggcttcttgaacctcttggtctggttgaggaagcggctaagacggctcctggaaagaagaggcctgtagagcagtctcctcgggaaccggactcctccgcgggtattggcaaatcgggtgcacagcccgctaaaaagagactcaatttcggtcagactggcgacacagagtcagtcccagaccctcaaccaatcggagaacctcccgcagccccctcaggtgtgggatctcttacaatggcttcaggtggtggcgcaccagtggcagacaataacgaaggtgccgatggagtgggtagttcctcgggaaattggcattgcgattcccaatggctgggggacagagtcatcaccaccagcacccgaacctgggccctgcccacctacaacaatcacctctacaagcaaatctccaacagcacatctggaggatcttcaaatgacaacgcctacttcggctacagcaccccctgggggtattttgacttcaacagattccactgccacttctcaccacgtgactggcagcgactcatcaacaacaactggggattccggcctaagcgactcaacttcaagctcttcaacattcaggtcaaagaggttacggacaacaatggagtcaagaccatcgccaataaccttaccagcacggtccaggtcttcacggactcagactatcagctcccgtacgtgctcgggtcggctcacgagggctgcctcccgccgttcccagcggacgttttcatgattcctcagtacgggtatctgacgcttaatgatggaagccaggccgtgggtcgttcgtccttttactgcctggaatatttcccgtcgcaaatgctaagaacgggtaacaacttccagttcagctacgagtttgagaacgtacctttccatagcagctacgctcacagccaaagcctggaccgactaatgaatccactcatcgaccaatacttgtactatctctcaaagactattaacggttctggacagaatcaacaaacgctaaaattcagtgtggccggacccagcaacatggctgtccagggaagaaactacatacctggacccagctaccgacaacaacgtgtctcaaccactgtgactcaaaacaacaacagcgaatttgcttggcctggagcttcttcttgggctctcaatggacgtaatagcttgatgaatcctggacctgctatggccagccacaaagaaggagaggaccgtttctttcctttgtctggatctttaatttttggcaaacaaggaactggaagagacaacgtggatgcggacaaagtcatgataaccaacgaagaagaaattaaaactactaacccggtagcaacggagtcctatggacaagtggccacaaaccaccagagtgcccaagcacaggcgcagaccggctgggttcaaaaccaaggaatacttccgggtatggtttggcaggacagagatgtgtacctgcaaggacccatttgggccaaaattcctcacacggacggcaactttcacccttctccgctgatgggagggtttggaatgaagcacccgcctcctcagatcctcatcaaaaacacacctgtacctgcggatcctccaacggccttcaacaaggacaagctgaactctttcatcacccagtattctactggccaagtcagcgtggagatcgagtgggaactgcagaaggaaaacagcaagcgctggaacccggagatccagtacacttccaactattacaagtctaataatgttgaatttgctgttaatactgaaggtgtatatagtgaaccccgccccattggcaccagatacctgactcgtaatctgtaattgcttgttaatcaataaaccgtttaatt

SEQ ID NO: 578 - DNA, 2601 bp, synthetic construct
  misc_feature 1..2601: note = Description of Artificial Sequence: Synthetic polynucleotide
  source 1..2601: mol_type = other DNA
ccatcgacgtcagacgcggaagcttcgatcaactacgcggacaggtaccaaaacaaatgttctcgtcacgtgggcatgaatctgatgctgtttccctgcagacaatgcgagagactgaatcagaattcaaatatctgcttcactcacggtgtcaaagactgtttagagtgctttcccgtgtcagaatctcaacccgtttctgtcgtcaaaaaggcgtatcagaaactgtgctacattcatcacatcatgggaaaggtgccagacgcttgcactgcttgcgacctggtcaatgtggacttggatgactgtgtttctgaacaataaatgacttaaaccaggtatggctgccgatggttatcttccagattggctcgaggacaaccttagtgaaggaattcgcgagtggtgggctttgaaacctggagcccctcaacccaaggcaaatcaacaacatcaagacaacgctcgaggtcttgtgcttccgggttacaaataccttggacccggcaacggactcgacaagggggagccggtcaacgcagcagacgcggcggccctcgagcacgacaaggcctacgaccagcagctcaaggccggagacaacccgtacctcaagtacaaccacgccgacgccgagttccaggagcggctcaaagaagatacgtcttttgggggcaacctcgggcgagcagtctttcaggccaaaaagaggcttcttgaacctcttggtctggttgaggaagcggctaagacggctcctggaaagaagaggcctgtagagcagtctcctcaggaaccggactcctccgcgggtattggcaaatcgggtgcacagcccgctaaaaagagactcaatttcggtcagactggcgacacagagtcagtcccagaccctcaaccaatcggagaacctcccgcagccccctcaggtgtgggatctcttacaatggcttcatgtggtggcgcaccagtggcagacaataacgaaggtgccgatggagtgggtagttcctcgggaaattggcattgcgattcccaatggctgggggacagagtcatcaccaccagcacccgaacctgggccctgcccacctacaacaatcacctctacaagcaaatctccaacagcacatctggaggatcttcaaatgacaacgcctacttcggctacagcaccccctgggggtattttgacttcaacagattccactgccacttctcaccacgtgactggcagcgactcatcaacaacaactggggattccggcctaagcgactcaacttcaagctcttcaacattcaggtcaaagaggttacggacaacaatggagtcaagaccatcgccaataaccttaccagcacggtccaggtcttcacggactcagactatcagctcccgtacgtgctcgggtcggctcacgagggctgcctcccgccgttcccagcggacgttttcatgattcctcagtacgggtatctgacgcttaatgatggaagccaggccgtgggtcgttcgtccttttactgcctggaatatttcccgtcgcaaatgctaagaacgggtaacaacttccagttcagctacgagtttgagaacgtacctttccatagcagctacgctcacagccaaagcctggaccgactaatgaatccactcatcgaccaatacttgtactatctctcaaagactattaacggttctggacagaatcaacaaacgctaaaattcagtgtggccggacccagcaacatggctgtccagggaagaaactacatacctggacccagctaccgacaacaacgtgtctcaaccactgtgactcaaaacaacaacagcgaatttgcttggcctggagcttcttcttgggctctcaatggacgtaatagcttgatgaatcctggacctgctatggccagccacaaagaaggagaggaccgtttctttcctttgtctggatctttaatttttggcaaacaaggaactggaagagacaacgtggatgcggacaaagtcatgataaccaacgaagaagaaattaaaactactaacccggtagcaacggagtcctatggacaagtggccacaaaccaccagagtgcccaagcacaggcgcagaccggctgggttcaaaaccaaggaatacttccgggtatggtttggcaggacagagatgtgtacctgcaaggacccatttgggccaaaattcctcacacggacggcaactttcacccttctccgctgatgggagggtttggaatgaagcacccgcctcctcagatcctcatcaaaaacacacctgtacctgcggatcctccaacggccttcaacaaggacaagctgaactctttcatcacccagtattctactggccaagtcagcgtggagatcgagtgggagctgcagaaggaaaacagcaagcgctggaacccggagatccagtacacttccaactattacaagtctaataatgttgaatttgctgttaatactgaaggtgtatatagtgaaccccgccccattggcaccagatacctgactcgtaatctgtaattgcttgttaatcaataaaccgtttaattcgtttcagttgaactgcggcc

SEQ ID NO: 579 - DNA, 2601 bp, synthetic construct
  misc_feature 1..2601: note = Description of Artificial Sequence: Synthetic polynucleotide
  source 1..2601: mol_type = other DNA
ccatcgacgtcagacgcggaagcttcgatcaactacgcggacaggtaccaaaacaaatgttctcgtcacgtgggcatgaatctgatgctgtttccctgcagacaatgcgagagactgaatcagaattcaaatatctgcttcactcacggtgtcaaagactgtttagagtgctttcccgtgtcagaatctcaacccgtttctgtcgtcaaaaaggcgtatcagaaactgtgctacattcatcacatcatgggaaaggtgccagacgcttgcactgcttgcgacctggtcaatgtggacttggatgactgtgtttctgaacaataaatgacttaaaccaggtatggctgccgatggttatcttccagattggctcgaggacaaccttagtgaaggaattcgcgagtggtgggctttgaaacctggagcccctcaacccaaggcaaatcaacaacatcaagacaacgctcgaggtcttgtgcttccgggttacaaataccttggacccggcaacggactcgacaagggggagccgatcaacgcagcagacgcggcggccctcgagcacgacaaggcctacgaccagcagctcaaggccggagacaacccgtacctcaagtacaaccacgccgacgccgagttccaggagcggctcaaagaagatacgtcttttgggggcaacctcgggcgagcagtcttccaggccaaaaagaggcttcttgaacctcttggtctggttgaggaagcggctaagacggctcctggaaagaagaggcctgtagagcagtctcctcaggaaccggactcctccgcgggtattggcaaatcgggtgcacagcccgctaaaaagagactcaatttcggtcagactggcgacacagagtcagtcccagaccctcaaccaatcggagaacctcccgcagccccctcaggtgtgggatctcttacaatggcttcaggtggtggcgcaccagtggcagacaataacgaaggtgccgatggagtgggtagttcctcgggaaattggcattgcgattcccaatggctgggggacagagtcatcaccaccagcacccgaacctgggccctgcccacctacaacaatcacctctacaagcaaatctccaacagcacatctggaggatcttcaaatgacaacgcctacttcggctacagcaccccctgggggtattttgacttcaacagattccactgccacttctcaccacgtgactggcagcgactcatcaacaacaactggggattccggcctaagcgactcaacttcaagctcttcaacattcaggtcaaagaggttacggacaacaatggagtcaagaccatcgccaataaccttaccagcacggtccaggtcttcacggactcagactatcagctcccgtacgtgctcgggtcggctcacgagggctgcctcccgccgttcccagcggacgttttcatgattcctcagtacgggtatctgacgcttaatgatggaagccaggccgtgggtcgttcgtccttttactgcctggaatatttcccgtcgcaaatgctaagaacgggtaacaacttccagttcagctacgagtttgagaacgtacctttccatagcagctacgctcacagccaaagcctggaccgactaatgaatccactcatcgaccaatacttgtactatctctcaaagactattaacggttctggacagaatcaacaaacgctaaaattcagtgtggccggacccagcaacatggctgtccagggaagaaactacatacctggacccagctaccgacaacaacgtgtctcaaccactgtgactcaaaacaacaacagcgaatttgcttggcctggagcttcttcttgggctctcaatggacgtaatagcttgatgaatcctggacctgctatggccagccacaaagaaggagaggaccgtttctttcctttgtctggatctttaatttttggcaaacaaggaactggaagagacaacgtggatgcggacaaagtcatgataaccaacgaagaagaaattaaaactactaacccggtagcaacggagtcctatggacaagtggccacaaaccaccagagtgcccaagcacaggcgcagaccggctgggttcaaaaccaaggaatacttccgggtatggtttggcaggacagagatgtgtacctgcaaggacccatttgggccaaaattcctcacacgtacggcaactttcacccttctccgctgatgggagggtttggaatgaagcacccgcctcctcagatcctcatcaaaaacacacctgtacctgcggatcctccaacggccttcaacaaggacaagctgaactctttcatcacccagtattctactggccaagtcagcgtggagatcgagtgggagctgcagaaggaaaacagcaagcgctggaacccggagatccagtacacttccaactattacaagtctaataatgttgaatttgctgttaatactgaaggtgtatatagtgaaccccgccccattggcaccagatacctgactcgtaatctgtaattgcttgttaatcaataaaccgtttaattcgtttcagttgaactgcggcc

SEQ ID NO: 580 - DNA, 2601 bp, synthetic construct
  misc_feature 1..2601: note = Description of Artificial Sequence: Synthetic polynucleotide
  source 1..2601: mol_type = other DNA
ccatcgacgtcagacgcggaagcttcgatcaactacgcggacaggtaccaaaacaaatgttctcgccacgtgggcatgaatctgatgctgtttccctgcagacaatgcgagagactgaatcagaattcaaatatctgcttcactcacggtgtcaaagactgtttagagtgctttcccgtgtcagaatctcaacccgtttctgtcgtcaaaaaggcgtatcagaaactgtgctacattcatcacatcatgggaaaggtgccagacgcttgcactgcttgcgacctggtcaatgtggacttggatgactgtgtttctgaacaataaatgacttaaaccaggtatggctgccgatggttatcttccagattggctcgaggacaaccttagtgaaggaattcgcgagtggtgggctttgaaacctggagcccctcaacccaaggcaaatcaacaacatcaagacaacgctcgaggtcttgtgcttccgggttacaaataccttggacccggcaacggactcgacaagggggagccggtcaacgcagcagacgcggcggccctcgagcacgacaaggcctacgaccagcagctcaaggccggagacaacccgtacctcaagtacaaccacgccgacgccgagttccaggagcggctcaaagaagatacgtcttttgggggcaacctcgggcgagcagtcttccaggccaaaaagaggcttcttgaacctcttggtctggttgaggaagcggctaagacggctcctggaaagaagaggcctgtagagcagtctcctcaggaaccggactcctccgcgggtattggcaaatcgggtgcacagcccgctaaaaagagactcaatttcggtcagactggcgacacagagtcagtcccagaccctcaaccaatcggagaacctcccgctgccccctcaggtgtgggatctcttacaatggcttcaggtggtggcgcaccagtggcagacaataacgaaggtgccgatggagtgggtagttcctcgggaaattggcattgcgattcccaatggctgggggacagagtcatcaccaccagcacccgaacctgggccctgcccacctacaacaatcacctctacaagcaaatctccaacagcacatctggaggatcttcaaatgacaacgcctacttcggctacagcaccccctgggggtattttgacttcaacagattccactgccacttctcaccacatgactggcagcgactcatcaacaacaactggggattccggcctaagcgactcaacttcaagctcttcaacattcaggtcaaagaggttacggacaacaatggagtcaagaccatcgccaataaccttaccagcacggtccaggtcttcacggactcagactatcagctcccgtacgtgctcgggtcggctcacgagggctgcctcccgccgttcccagcggacgttttcatgattcctcagtacgggtatctgacgcttaatgatggaagccaggccgtgggtcgttcgtccttttactgcctggaatatttcccgtcgcaaatgctaagaacgggtaacaacttccagttcagctacgagtttgagaacgtacctttccatagcagctacgctcacagccaaagcctggaccgactaatgaatccactcatcgaccaatacttgtactatctctcaaagactattaacggttctggacagaatcaacaaacgctaaaattcaatgtggccggacccagcaacatggctgtccagggaagaaactacatacctggacccagctaccgacaacaacgtgtctcaaccactgtgactcaaaacaacaacagcgaatttgcctggcctagagcttcttcttgggctctcaatggacgtaatagcttgatgaatcctggacctgctatggccagccacaaagaaggagaggaccgtttctttcctttgtctggatctttaatttttggcaaacaaggaactggaagagacaacgtggatgcggacaaagtcatgataaccaacgaagaagaaattaaaactactaacccggtagcaacggagtcctatggacaagtggccacaaaccaccagagtgcccaagcacaggcgcagaccggctgggttcaaaaccaaggaatacttccgggtatggtttggcaggacagagatgtgtacctgcaaggacccatttgggccaaaattcctcacacggacggcaactttcacccttctccgctgatgggagggtttggaatgaagcacccgcctcctcagatcctcatcaaaaacacacctgtacctgcggatcctccaacggccttcaacaaggacaagctgaactctttcatcacccagtattctactggccaagtcagcatggagatcgagtgggagctgcagaaggaaaacagcaagcgctggaacccggagatccagtacacttccaactattacaagtctaataatgttgaatttgctgttaatactgaaggtgtatatagtgaaccccgccccattggcaccagatacctgactcgtaatctgtaattgcttgttaatcaataaaccgtttaattcgtttcagttgaactgcggcc

SEQ ID NO: 581 - DNA, 2601 bp, synthetic construct
  misc_feature 1..2601: note = Description of Artificial Sequence: Synthetic polynucleotide
  source 1..2601: mol_type = other DNA
ccatcgacgtcagacgcggaagcttcgatcaactacgcggacaggtaccaaaacaaatgttctcgtcacgtgggcatgaatctgatgctgtttccctgcagacaatgcgagagactgaatcagaattcaaatatctgcttcactcacggtgtcaaagactgtttagagtgctttcccgtgtcagaatctcaacccgtttctgtcgtcaaaaaggcgtatcagaaactgtgctacattcatcacatcatgggaaaggtgccagacgcttgcactgcttgcgacctggtcaatgtggacttggatgactgtgtttctgaacaataaatgacttaaaccaggtatggctgccgatggttatcttccagattggctcgaggacaaccttagtgaaggaattcgcgagtggtgggctttgaaacctggagcccctcaacccaaggcaaatcaacaacatcaagacaacgctcgaggtcttgtgcttccgggttacaaataccttggacccggcaacggactcgacaagggggagccggtcaacgcagcagacgcggcggccctcgagcacgacaaggcctacgaccagcagctcaaggccggagacaacccgtacctcaagtacaaccacgccgacgccgagttccaggagcggctcaaagaagatacgtcttttgggggcaacctcgggcgagcagtcttccaggccaaaaagaggcttcttgaacctcttggtctggttgaggaagcggctaagacggctcctggaaagaagaggcctgtagagcagtctcctcaggaaccggactcctccgcgggtattggcaaatcgggtgcacagcccgctaaaaagagactcaatttcggtcagactggcgacacagagtcagtcccagaccctcaaccaatcggagaacctcccgcagccccctcaggtgtgggatctcttacaatggcttcaggtggtggcgcaccagtggcagacaataacgaaggtgccgatggagtgggtagttcctcgggaaattggcattgcgattcccaatggctgggggacagagtcatcaccaccagcacccgaacctgggccctgcccacctacaacaatcacctctacaagcaaatctccaacagcacatctggaggatcttcaaatgacaacgcctacttcggctacagcaccccctgggggtattttgacttcaacagattccactgccacttctcaccacgtgactggcagcgactcatcaacaacaactggggattccggcctaagcgactcaacttcaagctcttcaacattcaggtcaaagaggttacggacaacaatggagtcaagaccatcgccaataaccttaccagcacggtccaggtcttcacggactcagactatcagctcccgtacgtgctcgggtcggctcacgagggctgcctcccgccgttcccagcggacgttttcatgattcctcagtacgggtatctgacgcttaatgatggaagccaggccgtgggtcgttcgtccttttactgcctggaatatttcccgtcgcaaatgctaagaacgggtaacaacttccagttcagctacgagtttgagaacgtacctttccatagcagctacgctcacagccaaagcctggaccgactaatgaatccactcatcgaccaatacttgtactatctctcaaagactattaacggttctggacagaatcaacaaacgctaaaattcagtgtggccggacccagcaacatggctgtccagggaagaaactacatacctggacccagctaccgacaacaacgtgtctcaaccactgtgactcaaaacaacaacagcgaatttgcttggcctagagcttcttcttgggctctcaatggacgtaatagcttgatgaatcctggacctgctatggccagccacaaagaaggagaggaccgtttctttcctttgtctggatctttaatttttggcaaacaaggaactggaagagacaacgtggatgcggacaaagtcatgataaccaacgaagaagaaattaaaactactaacccggtagcaacggagtcctatggacaagtggccacaaaccaccagagtgcccaagcacaggcgcagaccggctgggttcaaaaccaaggaatacttccgggtatggtttggcaggacagagatgtgtacctgcaaggacccatttgggccaaaattcctcacacggacggcaactttcacccttctccgctgatgggagggtttggaatgaagcacccgcctcctcagatcctcatcaaaaacacacctgtacctgcggatcctccaacggccttcaacaaggacaagctgaactctttcatcacccagtattctactggccaagtcagcgtggagatcgagtgggagctgcagaaggaaaacagcaagcgctggaacccggagatccagtacacttccaactattacaagtctaataatgttgaatttgctgttaatactgaaggtgtatatagtgaaccccgccccattggcaccagatacctgactcgtaatctgtaattgcttgttaatcaataaaccgtttaattcgtttcagttgaactgcggcc

SEQ ID NO: 582 - DNA, 2601 bp, synthetic construct
  misc_feature 1..2601: note = Description of Artificial Sequence: Synthetic polynucleotide
  source 1..2601: mol_type = other DNA
ccatcgacgtcagacgcggaagcttcgatcaactacgcggacaggtaccaaaacaaatgttctcgtcacgtgggcatgaatctgatgctgtttccctgcagacaatgcgagagactgaatcagaattcaaatatctgcttcactcacggtgtcaaagactgtttagagtgctttcccgtgtcagaatctcaacccgtttctgtcgtcaaaaaggcgtatcagaaactgtgctacattcatcacatcatgggaaaggtgccagacgcttgcactgcttgcgacctggtcaatgtggacttggatgactgtgtttctgaacaataaatgacttaaaccaggtatggctgccgatggttatcttccagattggctcgaggacaaccttagtgaaggaattcgcgagtggtgggctttgaaacctggagcccctcaacccaaggcaaatcaacaacatcaagacaacgctcgaggtcttgtgcttccgggttacaaataccttggacccggcaacggactcgacaagggggagccggtcaacgcagcagacgcggcggccctcgagcacgacaaggcctacgaccagcagctcaaggccggagacaacccgtacctcaagtacaaccacgccgacgccgagttccaggagcggctcaaagaagatacgtcttttgggggcaacctcgggcgagcagtcttccaggccaaaaagaggcttcttgaacctcttggtctggttgaggaagcggctaagacggctcctggaaagaagaggcctgtagagcagtctcctcaggaaccggactcctccgcgggtattggcaaatcgggtgcacagcccgctaaaaagagactcaatttcggtcagactggcgacacagagtcagtcccagaccctcaaccaatcggagaacctcccgcagccccctcaggtgtgggatctcttacaatggcttcaggtggtggcgcaccagtggcagacaataacgaaggtgccgatggagtgggtagttcctcgggaaattggcattgcgattcccaatggctgggggacagagtcatcaccaccagcacccgaacctgggccctgcccacctacaacaatcacctctacaagcaaatctccaacagcacatctggaggatcttcaaatgacaacgcctacttcggctacagcaccccctgggggtattttgacttcaacagattccactgccacttctcaccacgtgactggcagcgactcatcaacaacaactggggattccggcctaagcgactcaacttcaagctcttcaacattcaggtcaaagaggttacggacaacaatggagtcaagaccatcgccaataaccttaccagcacggtccaggtcttcacggactcagactatcagctcccgtacgtgctcgggtcggctcacgagggctgcctcccgccgttcccagcggacgttttcatgattcctcagtacgggtatctgacgcttaatgatggaagccaggccgtgggtcgttcgtccttttactgcctggaatatttcccgtcgcaaatgctaagaacgggtaacaacttccagttcagctacgagtttgagaacgtacctttccatagcagctacgctcacagccaaagcctggaccgactaatgaatccactcatcgaccaatacttgtactatctctcaaagactattaacggttctggacagaatcaacaaacgctaaaattcagtgtggccggacccagcaacatggctgtccagggaagaaactacatacctggacccagctaccgacaacaacgtgtctcaaccactgtgactcaaaacaacaacagcgaatttgcttggcctagagcttcttcttgggctctcaatggacgtaatagcttgatgaatcctggacctgctatggccagccacaaagaaggagaggaccgtttctttcctttgtctggatctttaatttttggcaaacaaggaactggaagagacaacgtggatgcggacaaagtcatgataaccaacgaagaagaaattaaaactactaacccggtagcaacggagtcctatggacaagtggccacaaaccaccagagtgcccaagcacaggcgcagaccggctgggttcaaaaccaaggaatacttccgggtatggtttggcaggacagagatgtgtacctgcaaggacccatttgggccaaaattcctcacacggacggcaactttcacccttctccgctgatgggagggtttggaatgaagcacccgcctcctcagatcctcatcaaaaacacacctgtacctgcggatcctccaacggccttcaacaaggacaagctgaactctttcatcacccagtattctactggccaagtcagcgtggagatcgagtgggagcggcagaaggaaaacagcaagcgctggaacccggagatccagtacacttccaactattacaagtctaataatgttgaatttgctgttaatactgaaggtgtatatagtgaaccccgccccattggcaccagatacctgactcgtaatctgtaattgcttgttaatcaataaaccgtttaattcgtttcagttgaactgcggcc

SEQ ID NO: 583 - DNA, 2601 bp, synthetic construct
  misc_feature 1..2601: note = Description of Artificial Sequence: Synthetic polynucleotide
  source 1..2601: mol_type = other DNA
ccatcgacgtcagacgcggaagcttcgatcaactacgcggacaggtaccaaaacaaatgttctcgtcacgtgggcatgaatctgatgctgtttccctgcagacaatgcgagagactgaatcagaattcaaatatctgcttcactcacggtgtcaaagactgtttagagtgctttcccgtgtcagaatctcaacccgtttctgtcgtcaaaaaggcgtatcagaaactgtgctacattcatcacatcatgggaaaggtgccagacgcttgcactgcttgcgacctggtcaatgtggacttggatgactgtgtttctgaacaataaatgacttaaaccaggtatggctgccgatggttatcttccagattggctcgaggacaaccttagtgaaggaattcgcgagtggtgggctttgaaacctggagcccctcaacccaaggcaaatcaacaacatcaagacaacgctcgaggtcttgtgcttccgggttacaaataccttggacccggcaacggactcgacaagggggagccggtcaacgcagcagacgcggcggccctcgagcacgacaaggcctacgaccagcagctcaaggccggagacaacccgtacctcaagtacaaccacgccgacgccgagttccaggagcggctcaaagaagatacgtcttttgggggcaacctcgggcgagcagtcttccaggccaaaaagaggcttcttgaacctcttggtctggttgaggaagcggctaagacggctcctggaaagaagaggcctgtagagcagtctcctcaggaaccggactcctccgcgggtattggcaaatcgggtgcacagcccgctaaaaagagactcaatttcggtcagactggcgacacagagtcagtcccagaccctcaaccaatcggagaacctcccgcagccccctcaggtgtgggatctcttacaatggcttcaggtggtggcgcaccagtggcagacaataacgaaggtgccgatggagtgggtagttcctcgggaaattggcattgcgattcccaatggctgggggacagagtcatcaccaccagcacccgaacctgggccctgcccacctacaacaatcacctctacaagcaaatctccaacagcacatctggaggatcttcaaatgacaacgcctacttcggctacagcaccccctgggggtattttgacttcaacagattccactgccacttctcaccacgtgactggcagcgactcatcaacaacaactggggattccggcctaagcgactcaacttcaagctcttcaacattcaggtcaaagaggttacggacaacaatggagtcaagaccatcgccaataaccttaccagcacggtccaggtcttcgcggactcagactatcagctcccgtacgtgctcgggtcggctcacgagggctgcctcccgccgttcccagcggacgttttcatgattcctcagtacgggtatctgacgcttaatgatggaagccaggccgtgggtcgttcgtccttttactgcctggaatatttcccgtcgcaaatgctaagaacgggtaacaacttccagttcagctacgagtttgagaacgtacctttccatagcagctacgctcacagccaaagcctggaccgactaatgaatccactcatcgaccaatacttgtactatctctcaaagactattaacggttctggacagaatcaacaaacgctaaaattcagtgtggccggacccagcaacatggctgtccagggaagaaactacatacctggacccagctaccgacaacaacgtgtctcaaccactgtgactcaaaacaacaacagcgaatttgcttggcctagagcttcttcttgggctctcaatggacgtaatagcttgatgaatcctggacctgctatggccagccacaaagaaggagaggaccgtttctttcctttgtctggatctttaatttttggcaaacaaggaactggaagagacaacgtggatgcggacaaagtcatgataaccaacgaagaagaaattaaaactactaacccggtagcaacggagtcctatggacaagtggccacaaaccaccagagtgcccaagcacaggcgcagaccggctgggttcaaaaccaaggaatacttccgggtatggtttggcaggacagagatgtgtacctgcaaggacccatttgggccaaaattcctcacacggacggcaactttcacccttctccgctgatgggagggtttggaatgaagcacccgcctcctcagatcctcatcaaaaacacacctgtacctgcggatcctccaacggccttcaacaaggacaagctgaactctttcatcacccagtattctactggccaagtcagcgtggagatcgagtgggagctgcagaaggaaaacagcaagcgctggaacccggagatccagtacacttccaactattacaagtctaataatgttgaatttgctgttaatactgaaggtgtatatagtgaaccccgccccattggcaccagatacctgactcgtaatctgtaattgcttgttaatcaataaaccgtttaattcgtttcagttgaactgcggcc

SEQ ID NO: 584 - DNA, 2601 bp, synthetic construct
  misc_feature 1..2601: note = Description of Artificial Sequence: Synthetic polynucleotide
  source 1..2601: mol_type = other DNA
ccatcgacgtcagacgcggaagcttcgatcaactacgcggacaggtaccaaaacaaatgttctcgtcacgtgggcatgaatctgatgctgtttccctgcagacaatgcgagagactgaatcagaattcaaatatctgcttcactcacggtgtcaaagactgtttagagtgctttcccgtgtcagaatctcaacccgtttctgtcgtcaaaaaggcgtatcagaaactgtgctacattcatcacatcatgggaaaggtgccagacgcttgcactgcttgcgacctggtcaatgtggacttggatgactgtgtttctgaacaataaatgacttaaaccaggtatggctgccgatggttatcttccagattggctcgaggacaaccttagtgaaggaattcgcgagtggtgggctttgaaacctggagcccctcaacccaaggcaaatcaacaacatcaagacaacgctcgaggtcttgtgcttccgggttacaaataccttggacccggcaacggactcgacaagggggagccggtcaacgcagcagacgcggcggccctcgagcacgacaaggcctacgaccagcagctcaaggccggagacaacccgtacctcaagtacaaccacgccgacgccgagttccaggagcggctcaaagaagatacgtcttttgggggcaacctcgggcgagcagtcttccaggccaaaaagaggcttcttgaacctcttggtctggttgaggaagcggctaagacggctcctggaaagaagaggcctgtagagcagtctcctcaggaaccggactcctccgcgggtattggcaaatcgggtgcacagcccgctaaaaagagactcaatttcggtcagactggcgacacagagtcagtcccagaccctcaaccaatcggagaacctcccgcagccccctcaggtgtgggatctcttacaatggcttcaggtggtggcgcaccagtggcagacaataacgaaggtgccgatggagtgggtagttcctcgggaaattggcattgcgattcccaatggctgggggacagagtcatcaccaccagcacccgaacctgggccctgcccacctacaacaatcacctctacaagcaaatctccaacagcacatctggaggatcttcaaatgacaacgcctacttcggctacagcaccccctgggggtattttgacttcaacagattccactgccacttctcaccacgtgactggcagcgactcatcaacaacaactggggattccggcctaagcgactcaacttcaagctcttcaacattcaggtcaaagaggttacggacaacaatggagtcaagaccatcgccaataaccttaccagcacggtccaggtcttcacggactcagactatcagctcccgtacgtgctcgggtcggctcacgagggctgcctcccgccgttcccagcggacgttttcatgattcctcagtacgggtatctgacgcttaatgatggaagccaggccgtgggtcgttcgtccttttactgcctggaatatttcccgtcgcaaatgctaagaacgggtaacaacttccagttcagctacgagtttgagaacgtacctttccatagcagctacgctcacagccaaagcctggaccgactaatgaatccactcatcgaccaatacttgtactatctctcaaagactattaacggttctggacagaatcaacaaacgctaaaattcagtgtggccggacccagcaacatggctgtccagggaagaaactacatacctggacccagctaccgacaacaacgtgtctcaaccactgtgactcaaaacaacaacagcgaaattgcttggcctagagcttcttcttgggctctcaatggacgtaatagcttgatgaatcctggacctgctatggccagccacaaagaaggagaggaccgtttctttcctttgtctggatctttaatttttggcaaacaaggaactggaagagacaacgtggatgcggacaaagtcatgataaccaacgaagaagaaattaaaactactaacccagtagcaacggagtcctatggacaagtggccacaaaccaccagagtgcccaagcacaggcgcagaccggctgggttcaaaaccaaggaatacttccgggtatggtttggcaggacagagatgtgtacctgcaaggacccatttgggccaaaattcctcacacggacggcaactttcacccttctccgctgatgggagggtttggaatgaagcacccgcctcctcagatcctcatcaaaaacacacctgtacctgcggatcctccaacggccttcaacaaggacaagctgaactctttcatcacccagtattctactggccaagtcagcgtggagatcgagtgggagctgcagaaggaaaacagcaagcgctggaacccggagatccagtacacttccaactattgcaagtctaataatgttgaatttgctgttaatactgaaggtgtatatagtgaaccccgccccattggcaccagatacctgactcgtaatctgtaattgcttgttaatcaataaaccgtttaattcgtttcagttgaactgcggcc

SEQ ID NO: 585 - DNA, 2601 bp, synthetic construct
  misc_feature 1..2601: note = Description of Artificial Sequence: Synthetic polynucleotide
  source 1..2601: mol_type = other DNA
ccatcgacgtcagacgcggaagcttcgatcaactacgcggacaggtaccaaaacaaatgttctcgtcacgtgggcatgaatctgatgctgtttccctgcagacaatgcgagagactgaatcagaattcaaatatctgcttcactcacggtgtcaaagactgtttagagtgctttcccgtgtcagaatctcaacccgtttctgtcgtcaaaaaggcgtatcagaaactgtgctacattcatcacatcatgggaaaggtgccagacgcttgcactgcttgcgacctggtcaatgtggacttggatgtctgtgtttctgaacaataaatgacttaaaccaggtatggctgccgatggttatcttccagattggctcgaggacaaccttagtgaaggaattcgcgagtggtgggctttgaaacctggagcccctcaacccaaggcaaatcaacaacatcaagacaacgctcgaggtcttgtgcttccgggttacaaataccttggacccggcaacggactcgataagggggagccggtcaacgcagcagacgcggcggccctcgagcacgacaaggcctacgaccagcagctcaaggccggagacaacccgtacctcaagtacaaccacgccgacgccgagttccaggagcggctcaaagaagatacgtcttttgggggcaacctcgggcgagcagtcttccaggccaaaaagaggcttcttgaacctcttggtctggttgaggaagcggctaagacggctcctggaaagaagaggcctgtagagcagtctcctcaggaaccggactcctccgcgggtattggcaaatcgggtgcacagcccgctaaaaagagactcaatttcggtcagactggcgacacagagtcagtcccagaccctcaaccaatcggagaacctcccgcagccccctcaggtgtgggatctcttacaatggcttcaggtggtggcgcaccagtggcagacaataacgaaggtgccgatggagtgggtagttcctcgggaaattggcattgcgattcccaatggctgggggacagagtcatcaccaccagcacccgaacctgggccctgcccacctacaacaatcacctctacaagcaaatctccaacagcacatctggaggatcttcaaatgacaacgcctacttcggctacagcaccccctgggggtattttgacttcaacagattccactgccacttctcaccacgtgactggcagcgactcatcaacaacaactggggattccggcctaagcgactcaacttcaagctcttcaacattcaggtcaaagaggttacggacaacaatggagtcaagaccatcgccaataaccttaccagcacggtccaggtcttcacggactcagactatcagctcccgtacgtgctcgggtcggctcacgagggctgcctcccgccgttcccagcggacgttttcatgattcctcagtacgggtatctgacgcttaatgatggaagccaggccgtgggtcgttcgtccttttactgcctggaatatttcccgtcgcaaatgctaagaacgggtaacaacttccagttcagctacgagtttgagaacgtacctttccatagcagctacgctcacagccaaagcctggaccgactaatgaatccactcatcgaccaatacttgtactatctctcaaagactattaacggttctggacagaatcaacaaacgctaaaattcagtgtggccggacccagcaacatggctgtccagggaagaaactacatacctggacccagctaccgacaacaacgtgtctcaaccactgtgactcaaaacaacaacagcgaatttgcttggcctagagcttcttcttgggctctcaatggacgtaatagcttgatgaatcctggacctgctatggccagccacaaagaaggagaggaccgtttctttcctttgtctggatctttaatttttggcaaacaaggaactggaagagacaacgtggatgcggacaaagtcatgataaccaacgaagaagaaattaaaactactaacccggtagcaacggagtcctatggacaagtggccacaaaccaccagagtgcccaagcacaggcgcagaccggctgggttcaaaaccaaggaatacttccgggtatggtttggcaggacagagatgtgtacctgcaaggacccatttgggccaaaattcctcacacggacggcaactttcacccttctccgctgatgggagggtttggaatgaagcacccgcctcctcagatcctcatcaaaaacacacctgtacctgcggatcctccaacggccttcaacaaggacaagctgaactctttcatcacccagtattctactggccaagtcagcgtggagatcgagtgggagctgcagaaggaaaacagcaagcgctggaacccggagatccagtacacttccaactattacaagtctaataatgttgaatttgctgttaatactgaaggtgtatatagtgaaccccgccccattggcaccagatacctgactcgtaatctgtaattgcttgttaatcaataaaccgtttaattcgtttcagttgaactgcggcc

SEQ ID NO: 586 - protein, 736 aa, synthetic construct
  REGION 1..736: note = Description of Artificial Sequence: Synthetic polypeptide
MTADGYLPDWLEDNLSEGIREWWALKPGAPQPKANQQHQDNARGLVLPGYKYLGPGNGLDKGEPVNAADAAALEHDKAYDQQLKAGDNPYLKYNHADAEFQERLKEDTSFGGNLGRAVFQAKKRLLEPLGLVEEAAKTAPGKKRPVEQSPQEPDSSAGIGKSGAQPAKKRLNFGQTGDTESVPDPQPIGEPPAAPSGVGSLTMASGGGAPVADNNEGADGVGSSSGNWHCDSQWLGDRVITTSTRTWALPTYNNHLYKQISNSTSGGSSNDNAYFGYSTPWGYFDFNRFHCHFSPRDWQRLINNNWGFRPKQLNFKLFNIQVKEVTDNNGVKTIANNLTSTVQVFTDSDYQLPYVLGSAHEGCLPPFPADVFMIPQYGYLTLNDGSQAVGRSSFYCLEYFPSQMLRTGNNFQFSYEFENVPFHSSYAHSQSLDRLMNPLIDQYLYYLSKTINGSGQNQQTLKFSVAGPSNMAVQGRNYIPGPSYRQQRVSTTVTQNNNSEFAWPGASSWALNGRNSLMNPGPAMASHKEGEDRFFPLSGSLIFGKQGTGRDNVDADKVMITNEEEIKTTNPVATESYGQVATNHQSAQAQAQTGWVQNQGILPGMVWQDRDVYLQGPIWAKIPHTDGNFHPSPLMGGFGMKHPPPQILIKNTPVPADPPTAFNKDKLNSFITQYSTGQVSVEIEWELQKENSKRWNPEIQYTSNYYKSNNVEFAVNTEGVYSEPRPIGTRYLTRNL

SEQ ID NO: 587 - protein, 736 aa, synthetic construct
  REGION 1..736: note = Description of Artificial Sequence: Synthetic polypeptide
MAADGYLPDWLEDNLSEGIREWWALKPGAPQPKANQQHQDNARGLVLPGYKYLGPGNGLDKGEPVNAADAAALEHDKAYDQQLKAGDNPYLKYNHADAEFQERLKEDTSFGGNLGRAVFQAKKRLLEPLGLVEEAAKTAPGKKRPVEQSPQEPDSSAGIGKSGAQPAKKRLNFGQTGDTESVPDPQPIGEPPAAPSGVGSLTMASGGGAPVADNNEGADGVGSSSGNWHCDSQWLGDRVITTSTRTWALPTYNNHLYKQISNSTSGGSSNDNAYFGYSTPWGYFDFNRFHCHFSPRDWQRLINNNWGFRPKRLNFKLFNIQVKEVTDNNGVKTIANNLTSTVQVFTDSDYQLPYVLGSAHEGCLPPFPADVFMIPQYGYLTLNDGSQAVGRSSFYCLEYFPSQMLRTGNNFQFSYEFENVPFHSSYAHSQSLDRLMNPLIDQYLYYLSKTINGSGQNQQTLKFSVAGPSNMAVQGRNYIPGPSYRQQRVSTTVTQNNNSEFAWPGASSWALNGRNSLMNPGPAMASHKEGEDRFFPLSGSLIFGKQGTGRDNVDADKVMITNEEEIKTTNPVATESYGQVATNHQSAQAQAQTGWVQNQGILPGMVWQDRDVYLQGPIWAKIPHTGGNFHPSPLMGGFGMKHPPPQILIKNTPVPADPPTAFNKDKLNSFITQYSTGQVSVEIEWELQKENSKRWNPEIQYTSNYYKSNNVEFAVNTGGVYSEPRPIGTRYLTRNL

SEQ ID NO: 588 - protein, 736 aa, synthetic construct
  REGION 1..736: note = Description of Artificial Sequence: Synthetic polypeptide
MAADGYLPDWLEDNLSEGIREWWALKPGAPQPKANQQHQDNARGLVLPGYKYLGPGNGLDKGEPVNAADAAALEHDKAYDQQLKAGDNPYLKYNHADAEFQERLKEDTSFGGNLGRAVFQAKKRLLEPLGLVEEAAKTAPGKKRPVEQSPQEPDSSAGIDKSGAQPAKKRLNFGQTGDTESVPDPQPIGEPPAAPSGVGSLTMASGGGAPVADNNEGADGVGSSSGNWHCDSQWLGDRVITTSTRTWALPTYNNHLYKQISNSTSGGSSNDNAYFGYSTPWGYFDFNRFHCHFSPRDWQRLINNNWGFRPKRLNFKLFNIQVKEVTDNNGVKTIANNLTSTVQVFTDSDYQLPYVLGSAHEGCLPPFPADVFMIPQYGYLTLNDGSQAVGRSSFYCLEYFPSQMLRTGNNFQFSYEFENVPFHSSYAHSQSLDRLMNPLIDQYLYYLSKTINGSGQNQQTLKFSVAGPSNMAVQGRNYIPGPSYRQQRVSTTVTQNNNSEFAWPGASSWALNGRNSLMNPGPAMASHKEGEDRFFPLSGSLIFGKQGTGRDNVDADKVMITNEEEIKTTNPVATESYGQVATNHQSAQAQAQTGWVQNQGILPGMVWQDRDVYLQGPIWAKIPHTDGNFHPSPLMGGFGMKHPPPQILIKNTPVPADPPTAFNKDKLNSFITQYSTGQVSVEIEWELQKENSKRWNPEIQYTSNYYKSNNVEFAVNTEGVYSEPRPIGTRYLTRNL

SEQ ID NO: 589 - protein, 736 aa, synthetic construct
  REGION 1..736: note = Description of Artificial Sequence: Synthetic polypeptide
MAADGYLPDWLEDNLSEGIREWWALKPGAPQPKANQQHQDNARGLVLPGYKYLGPGNGLDKGEPVNAADAAALEHDKAYDQQLKAGDNPYLKYNHADAEFQERLKEDTSFGGNLGRAVLQAKKRLLEPLGLVEEAAKTAPGKKRPVEQSPQEPDSSAGIGKSGAQPAKKRLNFGQTGDTESVPDPQPIGEPPAAPSGVGSLTMASGGGAPVADNNEGADGVGSSSGNWHCDSQWLGDRVITTSTRTWALPTYNNHLYKQISNSTSGGSSNDNAYFGYSTPWGYFDFNRFHCHFSPRDWQRLINNNWGFRPKRLNFKLFNIQVKEVTDNNGVKTIANNLTSTVQVFTDSDYQLPYVLGSAHEGCLPPFPADVFMIPQYGYLTLNDGSQAVGRSSFYCLEYFPSQMLRTGNNFQFSYEFENVPFHSSYAHSQSLDRLMNPLIDQYLYYLSKTINGSGQNQQTLKFSVAGSSNMAVQGRNYIPGPSYRQQRVSTTVTQNNNSEFAWPGASSWALNGRNSLMNPGPAMASHKEGEDRFFPLSGSLIFGKQGTGRDNVDADKVMITNEEEIKTTNPVATESYGQVATNHQSAQAQAQTGWVQNQGILPGMVWQDRDVYLQGPIWAKIPHTDGNFHPSPLMGGFGMKHPPPQILIKNTPVPADPPTAFNKDKLNSFITQYSTGQVSVEIEWELQKENSKRWNPEIQYTSNYYKSNNVEFAVNTEGVYSEPRPIGTRYLTRNL

SEQ ID NO: 590 - protein, 736 aa, synthetic construct
  REGION 1..736: note = Description of Artificial Sequence: Synthetic polypeptide
MAADGYLPDWLEDNLSEGIREWWALKPGAPQPKANQQHQDNARGLVLPGYKYLGPGNGLDKGEPVNAADAAALEHDRAYDQQLKAGDNPYLKYNHADAEFQERLKEDTSFGGNLGRAVFQAKKRLLEPLGLVEEAAKTAPGKKRPVEQSPQEPDSSAGIGKSGAQPAKKRLNFGQTGDTESVPDPQPIGEPPAAPSGVGSLTMASGGGAPVADNNEGADGVGSSSGNWHCDSQWLGDRVITTSTRTWALPTYNNHLYKQISNSTSGGSSNDNAYFGYSTPWGYFDFNRFHCHFSPRDWQRLINNNWGFRPKRLNFKLFNIQVKEVTDNNGVKTIANNLTSTVQVFTDSDYQLPYVLGSAHEGCLPPFPADVFMIPQYGYLTLNDGSQAVGRSSFYCLEYFPSQMLRTGNNFQFSYEFENVPFHSSYAHSQSLDRLMNPLIDQYLYYLSKTINGSGQNQQTLKFSVAGPSNMAVQGRNYIPGPSYRQQRVSTTVTQNNNSEFAWPGASSWALNGRNSLMNPGPAMASHKEGEDRFFPLSGSLIFGKQGTGRDNVDADKVMITNEEEIKTTNPVATESYGQVATNHQSAQAQAQTGWVQNQGILPGMVWQDRDVYLQGPIWAKIPHTDGNFHPSPLMGGFGMKHPPPQILIKNTPVPADPPTAFNKDKLNSFITQYSTGQVSVEIEWELQKKNSKRWNPEIQYTSNYYKSNNVEFAVNTEGVYSEPRPIGTRYLTRNL

SEQ ID NO: 591 - protein, 736 aa, synthetic construct
  REGION 1..736: note = Description of Artificial Sequence: Synthetic polypeptide
MAADGYLPDWLEDNLSEGIREWWALKPGAPQPKANQQHQDNARGLVLPGYKYLGPGNGLDKGEPVNAADAAALEHDKAYDQQLKAGDNPYLKYNHADAEFQERLKEDTSFGGNLGRAVFQAKKRLLEPLGLVEEAAKTAPGKKRPVEQSPQEPDSSAGIGKSGAQPAKKRLNFGQTGDTESVPDPQPIGEPPAAPSGVGSLTMASGGGAPVADNNEGADGVGSSSGNWHCDSQWLGDRVITTSTRTWALPTYNNHLYKQISNSTSGGSSNDNAYFGYSTPWGYFDFNRFHCHFSPRDWQRLINNNWGFRPKRLNFKLFNIQVKEVTDNNGVKTIANNLTSTVQVFTDSDYQLPYVLGSAHEGCLPPFPADVFMIPQYGYLTLNDGSQAVGRSSFYCLEYFPSQMLRTGNNFQFSYEFENVPFHSSYAHSQSLDRLMNPLIDQYLYYLSKTINGSGQNQQTLKFSVAGPSNMAVQGRNYIPGPSYRQQRVSTTVTQNNNSEFAWPGASSWALNGRNSLMNPGPAMASHKEGEDRFFPLSGSLIFGKQGTGRDNVDADKVMITNEEEIKTTNPVATESYGQVATNHQSAQARAQTGWVQNQGILPGMVWQDRDVYLQGPIWAKIPHTDGNFHPSPLMGGFGMKHPPPQILIKNTPVPADPPTAFNKDKLNSFITQYSTGQVSVEIEWELQKENSKRWNPEIQYTSNYYKSNNVEFAVNTEGVYSEPRPIGTRYLTRNL

SEQ ID NO: 592 - protein, 736 aa, synthetic construct
  REGION 1..736: note = Description of Artificial Sequence: Synthetic polypeptide
MAADGYLPDWLEDNLSEGIREWWALKPGAPQPKANQQHQDNARGLVLPGYKYLGPGNGLDKGEPVNAVDAAALEHDKAYDQQLKAGDNPYLKYNHADAEFQERLKEDTSFGGNLGRAVFQAKKRLLEPLGLVEEAAKTAPGKKRPVEQSPQEPDSSAGIGKSGAQPAKKRLNFGQTGDTESVPDPQPIGEPPAAPSGVGSLTMASGGGAPVADNNEGADGVGSSSGNWHCDSQWLGDRVITTSTRTWALPTYNNHLYKQISNSTSGGSSNDNAYFGYSTPWGYFDFNRFHCHFSPRDWQRLINNNWGFRPKRLNFKLFNIQVKEVTDNNGVKTIANNLTSTVQVFTDSDYQLPYVLGSAHEGCLPPFPADVFMIPQYGYLTLNDGSQAVGRSSFYCLEYFPSQMLRTGNNFQFSYEFENVPFHSSYAHSQSLDRLMNPLIDQYLYYLSKTINGSGQNQQTLKFSVAGPSNMAVQGRNYIPGPSYRQQRVSTTVTQNNNSEFAWPGASSWALNGRNSLMNPGPAMASHKEGEDRFFPLSGSLIFGKQGTGRDNVDADKVMITNEEEIKTTNPVATESYGQVATNHQSAQAQAQTGWVQNQGILPGMVWQDRDVYLQGPIWAKIPHTDGNFHPSPLMGGFGMKHPPPQILIKNTPVPADPPTAFNKDKLNSFITQYSTGQVSVEIEWELQKENSKRWNPEIQYTSNYYKSNNVEFAVNTEGVYSEPRPIGTRYLTRNL

SEQ ID NO: 593 - protein, 736 aa, synthetic construct
  REGION 1..736: note = Description of Artificial Sequence: Synthetic polypeptide
MAADGYLPDWLEDNLSEGIREWWALKPGAPQPKANQQHQDNARGLVLPGYKYLGPGNGLDKGEPVNAADAAALEHDKAYDQQLKAGDNPYLKYNHADAEFQERLKEDTSFGGNLGRAVFQAKKRLLEPLGLVEEAAKTAPGKKRPVEQSPREPDSSAGIGKSGAQPAKKRLNFGQTGDTESVPDPQPIGEPPAAPSGVGSLTMASGGGAPVADNNEGADGVGSSSGNWHCDSQWLGDRVITTSTRTWALPTYNNHLYKQISNSTSGGSSNDNAYFGYSTPWGYFDFNRFHCHFSPRDWQRLINNNWGFRPKRLNFKLFNIQVKEVTDNNGVKTIANNLTSTVQVFTDSDYQLPYVLGSAHEGCLPPFPADVFMIPQYGYLTLNDGSQAVGRSSFYCLEYFPSQMLRTGNNFQFSYEFENVPFHSSYAHSQSLDRLMNPLIDQYLYYLSKTINGSGQNQQTLKFSVAGPSNMAVQGRNYIPGPSYRQQRVSTTVTQNNNSEFAWPGASSWALNGRNSLMNPGPAMASHKEGEDRFFPLSGSLIFGKQGTGRDNVDADKVMITNEEEIKTTNPVATESYGQVATNHQSAQAQAQTGWVQNQGILPGMVWQDRDVYLQGPIWAKIPHTDGNFHPSPLMGGFGMKHPPPQILIKNTPVPADPPTAFNKDKLNSFITQYSTGQVSVEIEWELQKENSKRWNPEIQYTSNYYKSNNVEFAVNTEGVYSEPRPIGTRYLTRNL

SEQ ID NO: 594 - protein, 736 aa, synthetic construct
  REGION 1..736: note = Description of Artificial Sequence: Synthetic polypeptide
MAADGYLPDWLEDNLSEGIREWWALKPGAPQPKANQQHQDNARGLVLPGYKYLGPGNGLDKGEPVNAADAAALEHDKAYDQQLKAGDNPYLKYNHADAEFQERLKEDTSFGGNLGRAVFQAKKRLLEPLGLVEEAAKTAPGKKRPVEQSPQEPDSSAGIGKSGAQPAKKRLNFGQTGDTESVPDPQPIGEPPAAPSGVGSLTMASCGGAPVADNNEGADGVGSSSGNWHCDSQWLGDRVITTSTRTWALPTYNNHLYKQISNSTSGGSSNDNAYFGYSTPWGYFDFNRFHCHFSPRDWQRLINNNWGFRPKRLNFKLFNIQVKEVTDNNGVKTIANNLTSTVQVFTDSDYQLPYVLGSAHEGCLPPFPADVFMIPQYGYLTLNDGSQAVGRSSFYCLEYFPSQMLRTGNNFQFSYEFENVPFHSSYAHSQSLDRLMNPLIDQYLYYLSKTINGSGQNQQTLKFSVAGPSNMAVQGRNYIPGPSYRQQRVSTTVTQNNNSEFAWPGASSWALNGRNSLMNPGPAMASHKEGEDRFFPLSGSLIFGKQGTGRDNVDADKVMITNEEEIKTTNPVATESYGQVATNHQSAQAQAQTGWVQNQGILPGMVWQDRDVYLQGPIWAKIPHTDGNFHPSPLMGGFGMKHPPPQILIKNTPVPADPPTAFNKDKLNSFITQYSTGQVSVEIEWELQKENSKRWNPEIQYTSNYYKSNNVEFAVNTEGVYSEPRPIGTRYLTRNL

SEQ ID NO: 595 - protein, 736 aa, synthetic construct
  REGION 1..736: note = Description of Artificial Sequence: Synthetic polypeptide
MAADGYLPDWLEDNLSEGIREWWALKPGAPQPKANQQHQDNARGLVLPGYKYLGPGNGLDKGEPINAADAAALEHDKAYDQQLKAGDNPYLKYNHADAEFQERLKEDTSFGGNLGRAVFQAKKRLLEPLGLVEEAAKTAPGKKRPVEQSPQEPDSSAGIGKSGAQPAKKRLNFGQTGDTESVPDPQPIGEPPAAPSGVGSLTMASGGGAPVADNNEGADGVGSSSGNWHCDSQWLGDRVITTSTRTWALPTYNNHLYKQISNSTSGGSSNDNAYFGYSTPWGYFDFNRFHCHFSPRDWQRLINNNWGFRPKRLNFKLFNIQVKEVTDNNGVKTIANNLTSTVQVFTDSDYQLPYVLGSAHEGCLPPFPADVFMIPQYGYLTLNDGSQAVGRSSFYCLEYFPSQMLRTGNNFQFSYEFENVPFHSSYAHSQSLDRLMNPLIDQYLYYLSKTINGSGQNQQTLKFSVAGPSNMAVQGRNYIPGPSYRQQRVSTTVTQNNNSEFAWPGASSWALNGRNSLMNPGPAMASHKEGEDRFFPLSGSLIFGKQGTGRDNVDADKVMITNEEEIKTTNPVATESYGQVATNHQSAQAQAQTGWVQNQGILPGMVWQDRDVYLQGPIWAKIPHTYGNFHPSPLMGGFGMKHPPPQILIKNTPVPADPPTAFNKDKLNSFITQYSTGQVSVEIEWELQKENSKRWNPEIQYTSNYYKSNNVEFAVNTEGVYSEPRPIGTRYLTRNL

SEQ ID NO: 596 - protein, 736 aa, synthetic construct
  REGION 1..736: note = Description of Artificial Sequence: Synthetic polypeptide
MAADGYLPDWLEDNLSEGIREWWALKPGAPQPKANQQHQDNARGLVLPGYKYLGPGNGLDKGEPVNAADAAALEHDKAYDQQLKAGDNPYLKYNHADAEFQERLKEDTSFGGNLGRAVFQAKKRLLEPLGLVEEAAKTAPGKKRPVEQSPQEPDSSAGIGKSGAQPAKKRLNFGQTGDTESVPDPQPIGEPPAAPSGVGSLTMASGGGAPVADNNEGADGVGSSSGNWHCDSQWLGDRVITTSTRTWALPTYNNHLYKQISNSTSGGSSNDNAYFGYSTPWGYFDFNRFHCHFSPHDWQRLINNNWGFRPKRLNFKLFNIQVKEVTDNNGVKTIANNLTSTVQVFTDSDYQLPYVLGSAHEGCLPPFPADVFMIPQYGYLTLNDGSQAVGRSSFYCLEYFPSQMLRTGNNFQFSYEFENVPFHSSYAHSQSLDRLMNPLIDQYLYYLSKTINGSGQNQQTLKFNVAGPSNMAVQGRNYIPGPSYRQQRVSTTVTQNNNSEFAWPRASSWALNGRNSLMNPGPAMASHKEGEDRFFPLSGSLIFGKQGTGRDNVDADKVMITNEEEIKTTNPVATESYGQVATNHQSAQAQAQTGWVQNQGILPGMVWQDRDVYLQGPIWAKIPHTDGNFHPSPLMGGFGMKHPPPQILIKNTPVPADPPTAFNKDKLNSFITQYSTGQVSMEIEWELQKENSKRWNPEIQYTSNYYKSNNVEFAVNTEGVYSEPRPIGTRYLTRNL

SEQ ID NO: 597 - protein, 736 aa, synthetic construct
  REGION 1..736: note = Description of Artificial Sequence: Synthetic polypeptide
MAADGYLPDWLEDNLSEGIREWWALKPGAPQPKANQQHQDNARGLVLPGYKYLGPGNGLDKGEPVNAADAAALEHDKAYDQQLKAGDNPYLKYNHADAEFQERLKEDTSFGGNLGRAVFQAKKRLLEPLGLVEEAAKTAPGKKRPVEQSPQEPDSSAGIGKSGAQPAKKRLNFGQTGDTESVPDPQPIGEPPAAPSGVGSLTMASGGGAPVADNNEGADGVGSSSGNWHCDSQWLGDRVITTSTRTWALPTYNNHLYKQISNSTSGGSSNDNAYFGYSTPWGYFDFNRFHCHFSPRDWQRLINNNWGFRPKRLNFKLFNIQVKEVTDNNGVKTIANNLTSTVQVFTDSDYQLPYVLGSAHEGCLPPFPADVFMIPQYGYLTLNDGSQAVGRSSFYCLEYFPSQMLRTGNNFQFSYEFENVPFHSSYAHSQSLDRLMNPLIDQYLYYLSKTINGSGQNQQTLKFSVAGPSNMAVQGRNYIPGPSYRQQRVSTTVTQNNNSEFAWPRASSWALNGRNSLMNPGPAMASHKEGEDRFFPLSGSLIFGKQGTGRDNVDADKVMITNEEEIKTTNPVATESYGQVATNHQSAQAQAQTGWVQNQGILPGMVWQDRDVYLQGPIWAKIPHTDGNFHPSPLMGGFGMKHPPPQILIKNTPVPADPPTAFNKDKLNSFITQYSTGQVSVEIEWELQKENSKRWNPEIQYTSNYYKSNNVEFAVNTEGVYSEPRPIGTRYLTRNL

SEQ ID NO: 598 - protein, 736 aa, synthetic construct
  REGION 1..736: note = Description of Artificial Sequence: Synthetic polypeptide
MAADGYLPDWLEDNLSEGIREWWALKPGAPQPKANQQHQDNARGLVLPGYKYLGPGNGLDKGEPVNAADAAALEHDKAYDQQLKAGDNPYLKYNHADAEFQERLKEDTSFGGNLGRAVFQAKKRLLEPLGLVEEAAKTAPGKKRPVEQSPQEPDSSAGIGKSGAQPAKKRLNFGQTGDTESVPDPQPIGEPPAAPSGVGSLTMASGGGAPVADNNEGADGVGSSSGNWHCDSQWLGDRVITTSTRTWALPTYNNHLYKQISNSTSGGSSNDNAYFGYSTPWGYFDFNRFHCHFSPRDWQRLINNNWGFRPKRLNFKLFNIQVKEVTDNNGVKTIANNLTSTVQVFTDSDYQLPYVLGSAHEGCLPPFPADVFMIPQYGYLTLNDGSQAVGRSSFYCLEYFPSQMLRTGNNFQFSYEFENVPFHSSYAHSQSLDRLMNPLIDQYLYYLSKTINGSGQNQQTLKFSVAGPSNMAVQGRNYIPGPSYRQQRVSTTVTQNNNSEFAWPRASSWALNGRNSLMNPGPAMASHKEGEDRFFPLSGSLIFGKQGTGRDNVDADKVMITNEEEIKTTNPVATESYGQVATNHQSAQAQAQTGWVQNQGILPGMVWQDRDVYLQGPIWAKIPHTDGNFHPSPLMGGFGMKHPPPQILIKNTPVPADPPTAFNKDKLNSFITQYSTGQVSVEIEWERQKENSKRWNPEIQYTSNYYKSNNVEFAVNTEGVYSEPRPIGTRYLTRNL

SEQ ID NO: 599 - protein, 736 aa, synthetic construct
  REGION 1..736: note = Description of Artificial Sequence: Synthetic polypeptide
MAADGYLPDWLEDNLSEGIREWWALKPGAPQPKANQQHQDNARGLVLPGYKYLGPGNGLDKGEPVNAADAAALEHDKAYDQQLKAGDNPYLKYNHADAEFQERLKEDTSFGGNLGRAVFQAKKRLLEPLGLVEEAAKTAPGKKRPVEQSPQEPDSSAGIGKSGAQPAKKRLNFGQTGDTESVPDPQPIGEPPAAPSGVGSLTMASGGGAPVADNNEGADGVGSSSGNWHCDSQWLGDRVITTSTRTWALPTYNNHLYKQISNSTSGGSSNDNAYFGYSTPWGYFDFNRFHCHFSPRDWQRLINNNWGFRPKRLNFKLFNIQVKEVTDNNGVKTIANNLTSTVQVFADSDYQLPYVLGSAHEGCLPPFPADVFMIPQYGYLTLNDGSQAVGRSSFYCLEYFPSQMLRTGNNFQFSYEFENVPFHSSYAHSQSLDRLMNPLIDQYLYYLSKTINGSGQNQQTLKFSVAGPSNMAVQGRNYIPGPSYRQQRVSTTVTQNNNSEFAWPRASSWALNGRNSLMNPGPAMASHKEGEDRFFPLSGSLIFGKQGTGRDNVDADKVMITNEEEIKTTNPVATESYGQVATNHQSAQAQAQTGWVQNQGILPGMVWQDRDVYLQGPIWAKIPHTDGNFHPSPLMGGFGMKHPPPQILIKNTPVPADPPTAFNKDKLNSFITQYSTGQVSVEIEWELQKENSKRWNPEIQYTSNYYKSNNVEFAVNTEGVYSEPRPIGTRYLTRNL

SEQ ID NO: 600 - protein, 736 aa, synthetic construct
  REGION 1..736: note = Description of Artificial Sequence: Synthetic polypeptide
MAADGYLPDWLEDNLSEGIREWWALKPGAPQPKANQQHQDNARGLVLPGYKYLGPGNGLDKGEPVNAADAAALEHDKAYDQQLKAGDNPYLKYNHADAEFQERLKEDTSFGGNLGRAVFQAKKRLLEPLGLVEEAAKTAPGKKRPVEQSPQEPDSSAGIGKSGAQPAKKRLNFGQTGDTESVPDPQPIGEPPAAPSGVGSLTMASGGGAPVADNNEGADGVGSSSGNWHCDSQWLGDRVITTSTRTWALPTYNNHLYKQISNSTSGGSSNDNAYFGYSTPWGYFDFNRFHCHFSPRDWQRLINNNWGFRPKRLNFKLFNIQVKEVTDNNGVKTIANNLTSTVQVFTDSDYQLPYVLGSAHEGCLPPFPADVFMIPQYGYLTLNDGSQAVGRSSFYCLEYFPSQMLRTGNNFQFSYEFENVPFHSSYAHSQSLDRLMNPLIDQYLYYLSKTINGSGQNQQTLKFSVAGPSNMAVQGRNYIPGPSYRQQRVSTTVTQNNNSEIAWPRASSWALNGRNSLMNPGPAMASHKEGEDRFFPLSGSLIFGKQGTGRDNVDADKVMITNEEEIKTTNPVATESYGQVATNHQSAQAQAQTGWVQNQGILPGMVWQDRDVYLQGPIWAKIPHTDGNFHPSPLMGGFGMKHPPPQILIKNTPVPADPPTAFNKDKLNSFITQYSTGQVSVEIEWELQKENSKRWNPEIQYTSNYCKSNNVEFAVNTEGVYSEPRPIGTRYLTRNL

SEQ ID NO: 601 - protein, 736 aa, synthetic construct; identical to SEQ ID NO: 597
  REGION 1..736: note = Description of Artificial Sequence: Synthetic polypeptide

SEQ ID NO: 602 - DNA, 2208 bp, synthetic construct
  misc_feature 1..2208: note = Description of Artificial Sequence: Synthetic polynucleotide
  source 1..2208: mol_type = other DNA
atggctgccgatggttatcttccagattggctcgaggacaaccttagtgaaggaattcgcgagtggtgggctttgaaacctggagcccctcaacccaaggcaaatcaacaacatcaagacaacgctcgaggtcttgtgcttccgggttacaaataccttggacccggcaacggactcgacaagggggagccggtcaacgcagcagacgcggcggccctcgagcacgacaaggcctacgaccagcagctcaaggccggagacaacccgtacctcaagtacaaccacgccgacgccgagttccaggagcggctcaaagaagatacgtcttttgggggcaacctcgggcgagcagtcttccaggccaaaaagaggcttcttgaacctcttggtctggttgaggaagcggctaagacggctcctggaaagaagaggcctgtagagcagtctcctcaggaaccggactcctccgcgggtattggcaaatcgggtgcacagcccgctaaaaagagactcaatttcggtcagactggcgacacagagtcagtcccagaccctcaaccaatcggagaacctcccgcagccccctcaggtgtgggatctcttacaatggcttcaggtggtggcgcaccagtggcagacaataacgaaggtgccgatggagtgggtagttcctcgggaaattggcattgcgattcccaatggctgggggacagagtcatcaccaccagcacccgaacctgggccctgcccacctacaacaatcacctctacaagcaaatctccaacagcacatctggaggatcttcaaatgacaacgcctacttcggctacagcaccccctgggggtattttgacttcaacagattccactgccacttctcaccacgtgactggcagcgactcatcaacaacaactggggattccggcctaagcgactcaacttcaagctcttcaacattcaggtcaaagaggttacggacaacaatggagtcaagaccatcgccaataaccttaccagcacggtccaggtcttcacggactcagactatcagctcccgtacgtgctcgggtcggctcacgagggctgcctcccgccgttcccagcggacgttttcatgattcctcagtacgggtatctgacgcttaatgatggaagccaggccgtgggtcgttcgtccttttactgcctggaatatttcccgtcgcaaatgctaagaacgggtaacaacttccagttcggctacgagtttgagaacgtacctttccatagcagctacgctcacagccaaagcctggaccgactaatgaatccactcatcgaccaatacttgtactatctctcaaagactattaacggttctggacagaatcaacaaacgctaaaattcagtgtggccggacccagcaacatggctgtccagggaagaaactacatacctggacccagctaccgacaacaacgtgtctcaaccactgtgactcaaaacaacaacagcgaatttgcttggcctggagcttcttcttgggctctcaatggacgtaatagcttgatgaatcctggacctgctatggccagccacaaagaaggagaggaccgtttctttcctttgtctggatctttaatttttggcaaacaaggaactggaagagacaacgtggatgcggacaaagtcatgataaccaacgaagaagaaattaaaactactaacccggtagcaacggagtcctatggacaagtggccacaaaccaccagagtgcccaagcacaggcgcagaccggctgggttcaaaaccaaggaatacttccgggtatggtttggcaggacagagatgtgtacctgcaaggacccatttgggccaaaattcctcacacggacggcaactttcacccttctccgctgatgggagggtttggaatgaagcacccgcctcctcagatcctcatcaaaaacacacctgtacctgcggatcctccaacggccttcaacaaggacaagctgaactctttcatcacccagtattctactggccaagtcagcgtggagatcgagtgggagctgcagaaggaaaacagcaagcgctgggacccggagatccagtacacttccaactattacaagtctaataatgttgaatttgctgttaatactgaaggtgtatatagtgaaccccgccccattggcaccagatacctgactcgtaatctg

SEQ ID NO: 603 - DNA, 2208 bp, synthetic construct
  misc_feature 1..2208: note = Description of Artificial Sequence: Synthetic polynucleotide
  source 1..2208: mol_type = other DNA
atggctgccgatggttatcttccagattggctcgaggacaaccttagtgaaggaattcgcgagtggtgggctttgaaacctggagcccctcaacccaaggcaaatcaacaacatcaagacaacgctcgaggtcttgtgcttccgggttacaaataccttggacccggcaacggactcgacaagggggagccggtcaacgcagcagacgcggcggccctcgagcacgacaaggcctacgaccagcagctcaaggccggagacaacccgtacctcaagtacaaccacgccgacgccgagttccaggagcggctcaaagaagatacgtcttttgggggcaacctcgggcgagcagtcttccaggccaaaaagaggcttcttgaacctcttggtctggttgaggaagcggctaagacggctcctggaaagaagaggcctgtagagcagtctcctcaggaaccggactcctccgcgggtattggcaaatcgggtgcacagcccgctaaaaagagactcaatttcggtcagactggcgacacagagtcagtcccagaccctcaaccaatcggagaacctcccgcagccccctcaggtgtgggatctcttacaatggcttcaggtggtggcgcaccagtggcagacaataacgaaggtgccgatggagtgggtagttcctcgggaaattggcattgcgattcccaatggctgggggacagagtcatcaccaccagcacccgaacctgggccctgcccacctacaacaatcacctctacaagcaaatctccaacagcacatctggaggatcttcaaatgacaacgcctacttcggctacagcaccccctgggggtattttgacttcaacagattccactgccgcttctcaccacgtgactggcagcgactcatcaacaacaactggggattccggcctaagcgactcaacttcaagctcttcaacattcaggtcaaagaggttacggacaacaatggagtcaagaccatcgccaataaccttaccagcacggtccaggtcttcacggactcagactatcagctcccgtacgtgctcgggtcggctcacgagggctgcctcccgccgttcccagcggacgttttcatgattcctcagtacgggtatctgacgcttaatgatggaagccaggccgtgggtcgttcgtccttttactgcctggaatatttcccgtcgcaaatgctaagaacgggtaacaacttccagttcagctacgagtttgagaacgtacctttccatagcagctacgctcacagccaaagcctggaccgactaatgaatccactcatcgaccaatacttgtactatctctcaaagactattaacggttctggacagaatcaacaaacgctaaaattcagtgtggccggacccagcaacatggctgtccagggaagaaactacatacctggacccagctaccgacaacaacgtgtctcaaccactgtgactcaaaacaacaacagcgaatttgcttggcctggagcttcttcttgggctctcaatggacgtaatagcttgatgaatcctggacctgctatggccagccacaaagaaggagaggaccgtttctttcctttgtctggatctttaatttttggcaaacaaggaactggaagagacaacgtggatgcggacaaagtcatgataaccaacgaagaagaaattaaaactactaacccggtagcaacggagtcctatggacaagtggccacaaaccaccagagtgcccaagcacaggcgcagaccggctgggttcaaaaccaaggaatacttccgggtatggtttggcaggacagagatgtgtacctgcaaggacccatttgggccaaaattcctcacacggacggcaactttcacccttctccgctgatgggagggtttggaatgaagcacccgcctcctcagatcctcatcaaaaacgcccctgtacctgcggatcctccaacggccttcaacaaggacaagctgaactctttcatcacccagtattctactggccaagtcagcgtggagatcgagtgggagctgcagaaggaaaacagcaagcgctggaacccggagatccagtacacttccaactattacaagtctaataatgttgaatttgctgttaatactgaaggtgtatatagtgaaccccgccccattggcaccagatacctgactcgtaatctg

SEQ ID NO: 604 - DNA, 2208 bp, synthetic construct
  misc_feature 1..2208: note = Description of Artificial Sequence: Synthetic polynucleotide
  source 1..2208: mol_type = other DNA
atggctgccgatggttatcttccagattggctcgaggacaaccttagtgaaggaattcgcgagtggtgggctttgaaacctggagcccctcaacccaaggcaaatcaacaacatcaagacaacgctcgaggtcttgtgcttccgggttacaaataccttggacccggcaacggactcgacaagggggagccggtcagcgcagcagacgcggcggccctcgagcacgacaaggcctacgaccagcagctcaaggccggagacaacccgtacctcaagtacaaccacgccgacgccgagttccaggagcggctcaaagaagatacgtcttttgggggcaacctcgggcgagcagtcttccaggccaaaaagaggcttcttgaacctcttggtctggttgaggaagcggctaagacggctcctggaaagaagaggcctgtagagcagtctcctcaggaaccggactcctccgcgggtattggcaaatcgggtgcacagcccgctaaaaagagactcaatttcggtcagactggcgacacagagtcagtcccagaccctcaaccaatcggagaacctcccgcagccccctcaggtgtgggatctcttacaatggcttcaggtggtggcgcaccagtggcagacaataacgaaggtgccgatggagtgggtagttcctcgggaaattggcattgcgattcccaatggctgggggacagagtcatcaccaccagcacccgaacctgggccctgcccacctacaacaatcacctctacaagcaaatctccaacagcacatctggaggatcttcaaatgacaacgcctacttcggctacagcaccccctgggggtattttgacttcaacagattccactgccacttctcaccgcgtgactggcagcgactcatcaacaacaactggggattccggcctaagcgactcaacttcaagctcttcaacattcaggtcaaagaggttacggacaacaatggagtcaagaccatcgccaataaccttaccagcacggtccaggtcttcacggactcagactatcagctcccgtacgtgctcgggtcggctcacgagggctgcctcccgccgttcccagcggacgttttcatgattcctcagtacgggtatctgacgcttaatgatggaagccaggccgtgggtcgttcgtccttttactgcctggaatatttcccgtcgcaaatgctaagaacgggtaacaacttccagttcagctacgagtttgagaacgtacctttccatagcagctacgctcacagccaaagcctggaccgactaatgaatccactcatcgaccaatacttgtactatctctcaaagactattaacggttctggacagaatcaacaaacgctaaaattcagtgtggccggacccagcaacatggctgtccagggaagaaactacatacctggacccagctaccgacaacaacgtgtctcaaccactgtgactcaaaacaacaacagcgaatttgcttggcctggagcttcttcttgggctctcaatggacgtaatagcttgatgaatcctggacctgctatggccagccacaaagaaggagaggaccgtttctttcctttgtctggatctttaatttttggcaaacaaggaactggaagagacaacgtggatgcggacaaagtcatgataaccaacgaagaagaaattaaaactactaacccggtagcaacggagtcctatggacaagtggccacaaaccaccagagtgcccaagcacaggcgcagaccggctgggttcaaaaccaaggaatacttccgggtatggtttggcaggacagagatgtgtacctgcaaggacccatttgggccaaaattcctcacacggacggcaactttcacccttctccgctgatgggagggtttggaatgaagcacccgcctcctcagatcctcatcaaaaacacacctgtacctgcggatcctccaacggccttcaacaaggacaagctgaactctttcatcacccagtattctactggccaagtcagcgtggagatcgagtgggagctgcagaaggaaaacagcaagcgctggaacccggagatccagtacacttccaactattacaagtctaataatgttgaatttgctgttaatactgaaggtgtatatagtgaaccccgccccattggcaccagatacctgactcgtaatctg

SEQ ID NO: 605 - DNA, 2208 bp, synthetic construct
  misc_feature 1..2208: note = Description of Artificial Sequence: Synthetic polynucleotide
  source 1..2208: mol_type = other DNA
atggctgccgatggttatcttccagattggctcgaggacaaccttagtgaaggaattcgcgagtggtgggctttgaaacctggagcccctcaacccaaggcaaatcaacaacatcaagacaacgctcgaggtcttgtgcttccgggttacaaataccttggacccggcaacggactcgacaagggggagccggtcaacgcagcagacgcggcggccctcgagcacgacaaggcctacgaccagcagctcaaggccggagacaacccgtacctcaagtacaaccacgccgacgccgagttccaggagcggctcaaagaagatacgtcttttgggggcaacctcgggcgagcagtcttccaggccaaaaagaggcttcttgaacctcttggtctggttgaggaagcggctaagacggctcctggaaagaagaggcctgtagagcagtctcctcaggaaccggactcctccgcgggtattggcaaatcgggtgcacagcccgctaaaaagagactcaatttcggtcagactggcgacacagagtcagtcccagaccctcaaccaatcggagaacctcccgcagccccctcaggtgtgggatctcttacaatggcttcaggtggtggcgcaccagtggcagacaataacgaaggtgccgatggagtgggtagttcctcgggaaattggcattgcgattcccaatggctgggggacagagtcatcaccaccagcacccgaacctgggccctgcccacctacaacaatcacctctacaagcaaatctccaacagcacatctggaggatcttcaaatgacaacgcctacttcggctacagcaccccctgggggtattttgacttcaacagattccactgccacttctcaccacgtgactggcagcgactcatcaacaacaactggggattccggcctaagcgactcaacttcaagctcttcaacattcaggtcaaagaggttacggacaacaatggagtcaagaccatcgccaataaccttaccagcacggtccaggtcttcacggactcagactatcagctcccgtacgtgctcgggtcggctcacgagggctgcctcccgccgttcccagcggacgttttcatgattcctcagtacgggtatctgacgcttaatgatggaagccaggccgtgggtcgttcgtccttttactgcctggaatatttcccgtcgcaaatgctaagaacgggtaacaacttccagttcagctacgagtttgagaacgtacctttccatagcagctacgctcacagccaaagcctggaccgactaatgaatccactcatcgaccaatacttgtactatctctcaaagactattaacggttctggacagaatcaacaaacgctaaaattcagtgtggccggacccagcaacacggctgtccagggaagaaactacatacctggacccagctaccgacaacaacgtgtctcaaccactgtgactcaaaacaacaacagcgaatttgcttggcctggagcttcttcttgggctctcaatggacgtaatagcttgatgaatcctggacctgctatggccagccacaaagaaggagaggaccgtttctttcctttgtctggatctttaatttttggcaaacaaggaactggaagagacaacgtggatgcggacaaagtcatgataaccaacgaagaagaaattaaaactactaacccggtagcaacggagtcctatggacaagtggccacaaaccaccagagtgcccaagcacaggcgcagaccggctgggttcaaaaccaaggaatacttccgggtatggtttggcaggacagagatgtgtacctgcaaggacccatttgggccaaaattcctcacacggacggcaactttcacccttctccgctgatgggagggtttggaatgaagcacccgcctcctcagatcctcatcaaaaacacacctgtacctgcggatcctccaacggccttcaacaaggacaagctgaactctttcatcacccagtattctactggccaagtcagcgtggagatcgagtgggagctgcagaaggaaaacagcaagcgctggaacccggagatccagtacacttccaactattacaagtctaataatgttgaatttgctgttaatactgaaggtgtatatagtgaaccccgccccattggcaccagatacctgactcgtaatctg

SEQ ID NO: 606 - DNA, 2208 bp, synthetic construct
  misc_feature 1..2208: note = Description of Artificial Sequence: Synthetic polynucleotide
  source 1..2208: mol_type = other DNA
atggctgccgatggttatcttccagattggctcgaggacaaccttagtgaaggaattcgcgagtggtgggctttgaaacctggagcccctcaacccaaggcaaatcaacaacatcaagacaacgctcgaggtcttgtgcttccgggttacaaataccttggacccggcaacggactcgacaagggggagccggtcaacgcagcagacgcggcggccctcgagcacgacaaggcctacgaccagcagctcaaggccggagacaacccgtacctcaagtacaaccacgccgacgccgagttccaggagcggctcaaagaagatacgtcttttgggggcaacctcgggcgagcagtcttccaggccaaaaagaggcttcttgaacctcttggtctggttgaggaagcggctaagacggctcctggaaagaagaggcctgtagagcagtctcctcaggaaccggactcctccgcgggtattggcaaatcgggtgcacagcccgctaaaaagagactcaatttcggtcagactggcgacacagagtcagtcccagaccctcaaccaatcggagaacctcccgcagccccctcaggtgtgggatctcttacaatggcttcaggtggtggcgcaccagtggcagacaataacgaaggtgccgatggagtgggtagttcctcgggaaattggcattgcgattcccaatggctgggggacagagtcatcaccaccagcacccgaacctgggccctgcccacctacaacaatcacctctacaagcaaatctccaacagcacatctggaggatcttcaaatgacaacgcctacttcggctacagcaccccctgggggtattttgacttcaacagattccactgccacttctcaccacgtgactggcagcgactcatcaacaacaactggggattccggcctaagcggctcaacttcaagctcttcaacattcaggtcaaagaggttacggacaacaatggagtcaagaccatcgccaataaccttaccagcacggtccaggtcttcacggactcagactatcagctcccgtacgtgctcgggtcggctcacgagggctgcctcccgccgttcccagcggacgttttcatgattcctcagtacgggtatctgacgcttaatgatggaagccaggccgtgggtcgttcgtccttttactgcctggaatatttcccgtcgcaaatgctaagaacgggtagcaacttccagttcagctacgagtttgagaacgtacctttccatagcagctacgctcacagccaaagcctggaccgactaatgaatccactcatcgaccaatacttgtactatctctcaaagactattaacggttctggacagaatcaacaaacgctaaaattcagtgtggccggacccagcaacatggctgtccagggaagaaactacatacctggacccagctaccgacaacaacgtgtctcaaccactgtgactcaaaacaacaacagcgaatttgcttggcctggagcttcttcttgggctctcaatggacgtaatagcttgatgaatcctggacctgctatggccagccacaaagaaggagaggaccgtttctttcctttgtctggatctttaatttttggcaaacaaggaactggaagagacaacgtggatgcggacaaagtcatgataaccaacgaagaagaaattaaaactactaacccggcagcaacggagtcctatggacaagtggccacaaaccaccagagtgcccaagcacaggcgcagaccggctgggttcaaaaccaaggaatacttccgggtatggtttggcaggacagagatgtgtacctgcaaggacccatttgggccaaaattcctcacacggacggcaactttcacccttctccgctgatgggagggtttggaatgaagcacccgcctcctcagatcctcatcaaaaacacacctgtacctgcggatcctccaacggccttcaacaaggacaagctgaactctttcatcacccagtattctactggccaagtcagcgtggagatcgagtgggagctgcagaaggaaaacagcaagcgctggaacccggagatccagcacacttccaactattacaagtctaataatgttgaatttgctgttaatactgaaggtgtatatagtgaaccccgccccattggcaccagatacctgactcgtaatctg

SEQ ID NO: 607 - DNA, 2208 bp, synthetic construct
  misc_feature 1..2208: note = Description of Artificial Sequence: Synthetic polynucleotide
  source 1..2208: mol_type = other DNA
atggctgccgatggttatcttccagattggctcgaggacaaccttagtgaaggaattcgcgagtggtgggctttgaaacctggagcccctcaacccaaggcaaatcaacaacatcaagacaacgctcgaggtcttgtgcttccgggttacaaataccttggacccggcaacggactcgacaagggggagccggtcaacgcagcagacgcggcggccctcgagcacgacaaggcctacgaccagcagctcaaggccggagacaacccgtacctcaagtacaaccacgccgacgccgagttccaggagcggctcaaagaagatacgtcttttgggggcaacctcgggcgagcagtcttccaggccaaaaagaggcttcttgaacctcttggtctggttgaggaagcggctaagacggctcctggaaagaagaggcctgtagagcagtctcctcaggaaccggactcctccgcgggtattggcaaatcgggtgcacagcccgctaaaaagagactcaatttcggtcagactggcgacacagagtcagtcccagaccctcaaccaatcggagaacctcccgcagccccctcaggtgtgggatctcttacaatggcttcaggtggtggcgcaccagtggcagacaataacgaaggtgccgatggagtgggtagttcctcgggaaattggcattgcgattcccaatggctgggggacagagtcatcaccaccagcacccgaacctgggccctgcccacctacaacaatcacctctacaagcaaatctccaacagcacatctggaggatcttcaaatgacaacgcctacttcggctacagcaccccctgggggtattttgacttcaacagattccactgccacttctcaccacgtgactggcagcgactcatcaacaacaactggggattccggcctaagcgactcaacttcaggctcttcaacattcaggtcaaagaggttacggacaacaatggagtcaagaccatcgccaataaccttaccagcacggtccaggtcttcacggactcagactatcagctcccgtacgtgctcgggtcggctcacgagggctgcctcccgccgttcccagcggacgttttcatgattcctcagtacgggtatctgacgcttaatgatggaagccaggccgtgggtcgttcgtccttttactgcctggaatatttcccgtcgcaaatgctaagaacgggtaacaacttccagttcagctacgagtttgagaacgtacctttccatagcagctacgctcacagccaaagcctggaccgactaatgaatccactcatcgaccaatacttgtactatctctcaaagactattaacggttctggacagaatcaacaaacgctaaaattcagtgtggccggacccagcaacatggctgtccagggaagaaactacatacctggacccagctaccgacaacaacgtgtctcaaccactgtgactcaaaacaacaacagcgaatttgcttggcctggagcttcttcttgggctctcaatggacgtaatagcttgatgaatcctggacctgctatggccagccacaaagaaggagaggaccgtttctttcctttgtctggatctttaatttttggcaaacaaggaactggaagagacaacgtggatgcggacaaagtcatgataaccaacgaagaagaaattaaaactactaacccggtagcaacggagtcctatggacaagtggccacaaaccaccagagtgcccaagcacaggcgcagaccggctgggttcaaagccaaggaatacttccgggtatggtttggcaggacagagatgtgtacctgcaaggacccatttgggccaaaattcctcacacggacggcaactttcacccttctccgctgatgggagggtttggaatgaagcacccgcctccccagatcctcatcaaaaacacacctgtacctgcggatcctccaacggccttcaacaaggacaagctgaactctttcatcacccagtattctactggccaagtcagcgtggagatcgagtgggagctgcagaaggaaaacagcaagcgctggaacccggagatccagtacacttccaactattacaagtctaataatgttgaatttgctgttaatactgaaggtgtatatagtgaaccccgccccattggcaccagatacctgactcgtaatctg

SEQ ID NO: 608 - DNA, 2205 bp, synthetic construct
  misc_feature 1..2205: note = Description of Artificial Sequence: Synthetic polynucleotide
  source 1..2205: mol_type = other DNA
atggctgccgatggttatcttccagattggctcgaggacaaccttagtgaaggaattcgcgagtggtgggctttgaaacctggagcccctcaacccaaggcaaatcaacaacatcaagacaacgcccgaggtcttgtgcttccgggttacaaataccttggacccggcaacggactcgacaagggggagccggtcaacgcagcagacgcggcggccctcgagcacgacaaggcctacgaccagcagctcaaggccggagacaacccgtacctcaagtacaaccacgccgacgccgagttccaggagcggctcaaagaagatacgtcttttgggggcaacctcgggcgagcagtcttccaggccaaaaagaggcttcttgaacctcttggtctggttgaggaagcggctaagacggctcctggaaagaagaggcctgtagagcagtctcctcaggaaccggactcctccgcgggtattggcaaatcgggtgcacagcccgctaaaaagagactcaatttcggtcagactggcgacacagagtcagtcccagaccctcaaccaatcggagaacctcccgcagccccctcaggtgtgggatctcttacaatggcttcaggtggtggcgcaccagtggcagacaataacgaaggtgccgatggagtgggtagttcctcgggaaattggcattgcgattcccaatggctgggggacagagtcatcaccaccagcacccgaacctgggccctgcccacctacaacaatcacctctacaagcaaatctccaacagcacatctggaggatcttcaaatgacaacgcctacttcggctacagcaccccctggaggtattttgacttcaacagattccactgccacttctcaccacgtgactggcagcgactcatcaacaactggggattccggcctaagcgactcaacttcaagctcttcaacattcaggtcaaagaggttacggacaacaatggagtcaagaccatcgccaataaccttaccagcacggtccaggccttcacggactcagactatcagctcccgtacgtgctcgggtcggctcacgagggctgcctcccgccgttcccagcggacgttttcatgattcctcagtacgggtatctgacgcttaatgatggaagccaggccgtgggtcgttcgtccttttactgcctggaatatttcccgtcgcaaatgctaagaacgggtaacaacttccagttcagctacgagtttgagaacgtacctttccatagcagctacgctcacagccaaagcctggaccgactaatgaatccactcatcgaccaatacttgtactatctctcaaagactattaacggttctggacagaatcaacaaacgctaaaattcagtgtggccggacccagcaacatggctgtccagggaagaaactacatacctggacccagctaccgacaacaacgtgtctcaaccactgtgactcaaaacaacaacagcgaatttgcttggcctggagcttcttcttgggctctcaatggacgtaatagcttgatgaatcctggacctgctatggccagccacaaagaaggagaggaccgtttctttcctttgtctggatctttaatttttggcaaacaaggaactggaagagacaacgtggatgcggacaaagtcatgataaccaacgaagaagaaattaaaactactaacccggtagcaacggagtcctatggacaagtggccacaaaccaccagagtgcccaagcacaggcgcagaccggctgggttcaaaaccaaggaatacttccgggtatggtttggcaggacagagatgtgtacctgcaaggacccatttgggccaaaattcctcacacggacggcaactttcacccttctccgctgatgggagggtttggaatgaagcacccgcctcctcagatcctcatcaaaaacacacctgtacctgcggatcctccaacggccttcaacaaggacgagctgaactctttcatcacccagtattctactggccaagtcagcgtggagatcgagtgggagctgcagaaggaaaacagcaagcgctggaacccggagatccagtacacttccaactattacaagtctaataatgttgaatttgctgttaatactgaaggtgtatatagtgaaccccgccccattggcaccagatacctgactcgtaatctg

SEQ ID NO: 609 - DNA, 2205 bp, synthetic construct
  misc_feature 1..2205: note = Description of Artificial Sequence: Synthetic polynucleotide
  source 1..2205: mol_type = other DNA
atggctgccgatggttatcttccagattggctcgaggacaaccttagtgaaggaattcgcgagtggtgggctttgaaacctggagcccctcaacccaaggcaaatcaacaacatcaagacaacgctcgaggtcttgtgcttccgggttacaaataccttggacccggcaacggactcgacaagggggagccggtcaacgcagcagacgcggcggccctcgagcacgacaaggcctacgaccagcagctcaaggccggagacaacccgtacctcaagtacaaccacgccgacgccgagttccaggagcggctcaaagaagatacgtcttttgggggcaacctcgggcgagcagtcttccaggacaaaaagaggcttcttgaacctcttggtctggttgaggaagcggctaagacggctcctggaaagaagaggcctgtagagcagtctcctcaggaaccggactcctccgcgggtattggcaaatcgggtgcacagcccgctaaaaagagactcaatttcggtcagactggcgacacagagtcagtcccagaccctcaaccaatcggagaacctcccgcagccccctcaggtgtgggatctcttacaatggcttcaggtggtggcgcaccagtggcagacaataacgaaggtgccgatggagtgggtagttcctcgggaaattggcattgcgattcccaatggctgggggacagagtcatcaccaccagcacccgaacctgggccctgcccacctacaacaatcacctctacaagcaaatctccaacagcacatctggaggatcttcaaatgacaacgcctacttcggctacagcaccccctgggggtattttgacttcaacagattccactgccacttctcaccacgtgactggcagcgactcatcaacaactggggattccggcctaagcgactcaacttcaagctcttcaacattcaggtcaaagaggttacggacaacaatggagtcaagaccatcgccaataaccttaccagcacggtccaggtcttcacggactcagactatcagctcccgtacgtgctcgggtcggctcacgagggctgcctcccgccgttcccagcggacgttttcatgattcctcagtacgggtatctgacgcttaatgatggaagccaggccgtgggtcgttcgtccttttactgcctggaatatttcccgtcgcaaatgctaagaacgggtaacaacttccaattcagctacgagtttgagaacgtacctttccatagcagctacgctcacagccaaagcctggaccgactaatgaatccactcatcgaccaatacttgtactatctctcaaagactattaacggttctggacagaatcaacaaacgctaaaattcagtgtggccggacccagcaacatggctgtccagggaagaaactacatacctggacccagctaccgacaacaacgtgtctcaaccactgtgactcaaaacaacaacagcgaatttgcttggcctggagcttcttcttgggctctcaatggacgtaatagcttgatgaatcctggacctgctatggccagccacaaagaaggagaggaccgtttctttcctttgtctggatctttaatttttggcaaacaaggaactggaagagacaacgtggatgcggacaaagtcatgataaccaacgaagaagaaattaaaactactaacccggtagcaacggagtcctatggacaagtggccacaaaccaccagagtgcccaagcacaggcgcagaccggctgggttcaaaaccaaggaatacttccgggtatggtttggcaggacagagatgtgtacctgcaaggacccatttgggccaaaattcctcacacggacggcaactttcacccttctccgctgatgggagggtttggaatgaagcacccgcctcctcagatcctcatcaaaaacacacctgtacctgcggatcctccaacggccttcaacaaggacaagctgaactctttcatcacccagtattctactggccaagtcagcgtggagatcgagtgggagctgcagaaggaaaacagcaagcgctggaacccggagatccagtacacttccaactattacaagtctaataatgttgaatttgctgttaatactgaaggtgtatatagtgaaccccgccccattggcaccagatacctgactcgtaatctg

SEQ ID NO: 610 - DNA, 2208 bp, synthetic construct
  misc_feature 1..2208: note = Description of Artificial Sequence: Synthetic polynucleotide
  source 1..2208: mol_type = other DNA
atggctgccgatggttatcttccagattggctcgaggacaaccttagtgaaggaattcgcgagtggtgggctttgaaacctggagcccctcaacccaaggcaaatcaacaacatcaagacaacgctcgaggtcttgtgcttccgggttacaaataccttggacccggcaacggactcgacaagggggagccggtcaacgcagcagacgcggcggccctcgagcacgacaaggcctacgaccagcagctcaaggccggagacaacccgtacctcaagtacaaccacgccgacgccgagttccaggagcggctcaaagaagatacgtcttttgggggcaacctcgggcgagcagtcttccaggccaaaaagaggcttcttgaacctcttggtctggttgaggaagcggctaagacggctcctggaaagaagaggcctgtagagcagtctcctcaggaaccggactcctccgcgggtattggcaaatcgggtgcacagcccgctaaaaagagactcaatttcggtcagactggcgacacagagtcagtcccagaccctcaaccaatcggagaacctcccgcagccccctcaggtgtgggatctcttacaatggcttcaggtggtggcgcaccagtggcagacaataacgaaggtgccgatggagtgggtagttcctcgggaaattggcattgcgattcccaatggctgggggacagagccatcaccaccagcacccgaacctgggccctgcccacctacaacaatcacctctacaagcaaatctccaacagcacatctggaggatcttcaaatgacaacgcctacttcggctacagcaccccctgggggtattttgacttcaacagattccactgccacttctcaccacgtgactggcagcggctcatcaacaacaactggggattccggcctaagcgactcaacttcaagctcttcaacattcaggtcaaagaggttacggacaacaatggagtcaagaccatcgccaataaccttaccagcacggtccaggtcttcacggactcagactatcagctcccgtacgtgctcgggtcggctcacgagggctgcctcccgccgttcccagcggacgttttcatgattcctcagtacgggtatctgacgcttaatgatggaagccaggccgtgggtcgttcgtccttttactgcctggaatatttcccgtcgcaaatgctaagaacgggtaacaacttccagttcagctacgagtttgagaacgtacctttccatagcagctacgctcacagccaaagcctggaccgactaatgaatccactcatcgaccaatacttgtactatctctcaaagactattaacggttctggacagaatcaacaaacgctaaaattcagtgtggccggacccagcaacatggctgtccagggaagaaactacatacctggacccagctaccgacaacaacgtgtctcaaccactgtgactcaaaacaacaacagcgaatttgcttggcctggagcttcttcttgggctctcaatggacgtaatagcttgatgaatcctggacctgctatggccagccacaaagaaggagaggaccgtttctttcctttgtctggatctttaatttttggcaaacaaggaactggaagagacaacgtggatgcggacaaagtcatgacaaccaacgaagaagaaattaaaactactaacccggtagcaacggagtcctatggacaagtggccacaaaccaccagagtgcccaagcacaggcgcagaccggctgggttcaaaaccaaggaatacttccgggtatggtttggcaggacagagatgtgtacctgcaaggacccatttgggccaaaattcctcacacggacggcaactttcacccttctccgctgatgggagggtttggaatgaagcacccgcctcctcagatcctcatcaaaaacacacctgtacctgcggatcctccaacggccttcaacaaggacaagctgaactctttcatcacccagtattctactggccaagtcagcgtggagatcgagtgggagctgcagaaggaaaacagcaagcgctggaacccggagatccagtacacttccaactattacaagtctaataatgttgaatttgctgttaatactgaaggtgtatatagtgaaccccgccccattggcaccagatacctgactcgtaatctg

SEQ ID NO: 611 - DNA, 2208 bp, synthetic construct
  misc_feature 1..2208: note = Description of Artificial Sequence: Synthetic polynucleotide
  source 1..2208: mol_type = other DNA
atggctgccgatggttatcttccagattggctcgaggacaaccttagtgaaggaattcgcgagtggtgggctttgaaacctggagcccctcaacccaaggcaaatcaacaacatcaagacaacgctcgaggtcttgtgcttccgggttacaaataccttggacccggcaacggactcgacaagggggagccggtcaatgcagcagacgcggcggccctcgagcacgacaaggcctacgaccagcagctcaaggccggagacaacccgtacctcaagtacaaccacgccgacgccgagttccaggagcggctcaaagaagatacgtcttttgggggcaacctcgggcgagcagtcttccagaccaaaaagaggcttcttgaacctcttggtctggttgaggaagcggctaagacggctcctggaaagaagaggcctgtagagcagtctcctcaggaaccgggctcctccgcgggtattggcaaatcgggtgcacagcccgctaaaaagagactcaatttcggtcagactggcgacacagagtcagtcccagaccctcaaccaatcggagaacctcccgcagccccctcaggtgtgggatctcttacaatggcttcaggtggtggcgcaccagtggcagacaataacgaaggtgccgatggagtgggtagttcctcgggaaattggcattgcgattcccaatggctgggggacagagtcatcaccaccagcacccgaacctgggccctgcccacctacaacaatcacctctacaagcaaatctccaacagcacatctggaggatcttcaaatgacaacgcctacttcggctacagcaccccctgggggtattttgacttcaacagattccactgccacttctcaccacgtgactggcagcgactcatcaacaacaactggggattccggcctaagcgactcaacttcaagctcttcaacattcaggtcaaagaggttacggacaacaatggagtcaagaccatcgccaataaccttaccagcacggtccaggtcttcacggactcagactatcagctcccgtacgtgctcgggtcggctcacgagggctgcctcccgccgttcccagcggacgttttcatgattcctcagtacgggtatctgacgcttaatgatggaagccaggccgtgggtcgttcgtccttttactgcctggaatatttcccgtcgcaaatgctaagaacgggtaacaacttccagttcagctacgagtttgagaacgtacctttccatagcagctacgctcacagccaaagcctggaccgactaatgaatccactcatcgaccaatacttgcactatctctcaaagactattaacggttctggacagaatcaacaaacgctaaaattcagtgtggccggacccagcaacatggctgtccagggaagaaactacatacctggacccagctaccgacaacaacgtgtctcaaccactgtgactcaaaacaacaacagcgaatttgcttggcctggagcttcttcttgggctctcaatggacgtaatagcttgatgaatcctggacctgctatggccagccacaaagaaggagaggaccgtttctttcctttgtctggatctttaatttttggcaaacaaggaactggaagagacaacgtggatgcggacaaagtcatgataaccaacgaagaagaaattaaaactactaacccggtagcaacggagtcctatggacaagtggccacaaaccaccagagtgcccaagcacaggcgcagaccggctgggttcaaaaccaaggaatacttccgggtatggtttggcaggacagagatgtgtacctgcaaggacccatttgggccaaaattcctcacacggacggcaactttcacccttctccgctgatgggagggtttggaatgaagcacccgcctcctcagatcctcatcaaaaacacacctgtacctgcggatcctccaacggccttcaacaaggacaagctgaactctttcatcacccagtattctactggccaagtcagcgtggagatcgagtgggagctgcagaaggaaaacagcaagcgctggaacccggagatccagtacacttccaactattacaagtctaataatgttgaatttgctgttaatactgaaggtgtatatagtgaaccccgccccattggcaccagatacctgactcgtaatctg

SEQ ID NO: 612 - DNA, 2208 bp, synthetic construct
  misc_feature 1..2208: note = Description of Artificial Sequence: Synthetic polynucleotide
  source 1..2208: mol_type = other DNA
atggctgccgatggttattttccagattggctcgaggacaaccttagtgaaggaattcgcgagtggtgggctttgaaacctggagcccctcaacccaaggcaaatcaacaacatcaagacaacgctcgaggtcttgtgcttccgggttacaaataccttggacccggcaacggactcgacaagggggagccggtcaacgcagcagacgcggcggccctcgagcacgacaaggcctacgaccagcagctcaaggccggagacaacccgtacctcaagtacaaccacgccgacgccgagttccaggagcggctcaaagaagatacgtcttttgggggcaacctcgggcgagcagtcttccaggccaaaaagaggcttcttgaacctcttggtctggttgaggaagcggctaagacggctcctggaaagaagaggcctgtagagcagtctcctcaggaaccggactcctccgcgggtattggcaaatcgggtgcacagcccgctaaaaagagactcaatttcggtcagactggcgacacagagtcagtcccagaccctcaaccaatcggagaatctcccgcagccccctcaggtgtgggatctcttacaatggcttcaggtggtggcgcaccagtggcagacaataacgaaggtgccgatggagtgggtagttcctcgggaaattggcattgcgattcccaatggctgggggacagagtcatcaccaccagcacccgaacctgggccctgcccacctacaacaatcacctctacaagcaaatctccaacagcacatctggaggatcttcaaatgacaacgcctacttcggctacagcaccccctgggggtattttgacttcaacagattccactgccacttctcaccacgtgactggcagcgactcatcaacaacaactggggattccggcctaagcgactcaacttcaagctcttcaacattcaggtcaaagaggttacggacaacaatggagtcaagaccatcgccaataaccttaccagcacggtccaggtcttcacggactcagactatcagctcccgtacgtgctcgggtcggctcacgagggctgcctcccgccgttcccagcggacgttttcatgattcctcagtacgggtatctgacgcttaatgatggaagccaggccgtgggtcgttcgtccttttactgcctggaatatctcccgtcgcaaatgctaagaacgggtaacaacttccagttcagctacgagtttgagaacgtacctttccatagcagctacgctcacagccaaagcctggaccgactaatgaatccactcatcgaccaatacttgcactatctctcaaagactattaacggttctggacagaatcaacaaacgctaaaattcagtgtggccggacccagcaacatggctgtccagggaagaaactacatacctggacccagctaccgacaacaacgtgtctcaaccactgtgactcaaaacaacaacagcgaatttgcttggcctggagcttcttcttgggctctcaatggacgtaatagcttgatgaatcctggacctgctgtggccagccacaaagaaggagaggaccgtttctttcctttgtctggatctttaatttttggcaaacaaggaactggaagagacaacgtggatgcggacaaagtcatgataaccaacgaagaagaaattaaaactactaacccggtagcaacggagtcctatggacaagtggccacaaaccaccagagtgcccaagcacaggcgcagaccggctgggttcaaaaccaaggaatacttccgggtatggtttggcaggacagagatgtgtacctgcaaggacccatttgggccaaaattcctcacacggacggcaactttcacccttctccgctgatgggagggtttggaatgaagcacccgcctcctcagatcctcatcaaaaacacacctgtacctgcggatcctccaacggccttcaacaaggacaagctgaactctttcatcacccagtattctactggccaagtcagcgtggagatcgagtgggagctgcagaaggaaaacagcaagcgctggaacccggagatccagtacacttccaactattacaagtctaataatgttgaatttgctgttaatactgaaggtgtatatagtgaaccccgccccattggcaccagatacctgactcgtaatctg

SEQ ID NO: 613 - DNA, 2208 bp, synthetic construct
  misc_feature 1..2208: note = Description of Artificial Sequence: Synthetic polynucleotide
  source 1..2208: mol_type = other DNA
atggctgccgatggttatcttccagattggctcgaggacaaccttagtgaaggaattcgcgagtggtgggctttgaaacctggagcccctcaacccaaggcaaatcaacaacatcaagacaacgctcgaggtcttgtgcttccgggttacaaataccttggacccggcaacggactcgacaagggggagccggtcaacgcagcagacgcggcggccctcgagcacgacaaggcctacgaccagcagctcaaggccggagacaacccgtacctcaagtacaaccacgccgacgccgagttccaggagcggctcaaagaagatacgtcttttgggggcaacctcgggcgagcagtcttccaggccaaaaagaggcttcttgaacctcttggtccggttgaggaagcggctaagacggctcctggaaagaagaggcctgtagagcagtctcctcaggaaccggactcctccgcgggtattggcaaatcgggtgcacagcccgctaaaaagagactcaatttcggtcagactggcgacacagagtcagtcccagaccctcaaccaatcggagaacctcccgcagccccctcaggtgtgggatctcttacaatggcttcaggtggtggcgcaccagtggcagacaataacgaaggtgccgatggagtgggtagttcctcgggaaattggcattgcgattcccaatggctgggggacagagtcatcaccaccagcacccgaacctgggccctgcccacctacaacaatcacctctacaagcaaatctccaacagcacatctggaggatcttcaaatgacaacgcctacttcggctacagcaccccctgggggtattttgacttcaacagattccactgccacttctcaccacgtgactggcagcgactcatcaacaacaactggggattccggcctaagcgactcaacttcaagctcttcaacattcaggtcaaagaggttacggacaacaatggagtcaagaccatcgccaataaccttaccagcacggtccaggtcttcacggactcagactatcagctcccgtacgtgctcgggtcggctcacgagggctgcctcccgccgttcccagcggacgttttcatgattcctcagtacgggtatctgacgcttaatgatggaagccaggccgtgggtcgttcgtccttttactgcctggaatatttcccgtcgcaaatgctaagaacgggtaacaacttccagttcagctacgagtttgagaacgtacctttccatagcagctacgctcacagccaaagcctggaccgactaatgaatccactcatcgaccaatacttgtactatctctcaaagactattaacggttctggacagaatcaacaaacgctaaaattcagtgtggccggacccagcaacatggctgtccagggaagaaactacatacctggacccagctaccgacaacaacgtgtctcaaccactgtgactcaaaacaacaacagcgaatttgcttggcctggagcttcttcttgggctctcaatggacgtaatagcttgatgaatcctggacctgctatggccagccacaaagaaggagaggaccgtttctttcctttgtctggatctttaatttttggcaaacaaggaactggaagagacaacgtggatgcggacaaagtcatgataaccaacgaagaagaaattaaaactactaacccggtagcaacggagtcctatggacaagcggccacaaaccaccagagtgcccaagcacaggcgcagaccggctgggttcaaaaccaaggaatacttccgggtatggtttggcaggacagagatgtgtacctgcaaggacccatttgggccaaaattcctcacacggacggcaactttcacccttctccgctgatgggagggtttggaatgaagcacccgcctcctcagatcctcatcaaaaacacacctgtacctgcggatcctccaacggccttcaacaaggacaagctgaactctttcatcacccagtattctactggccaagtcagcgtggagatcgagtgggagctgcagaaggaaaacagcaagcgctggaacccggagatccagtacacttccaactattacaagtctaataatgttgaatttgctgttaatactgaaggtgtatatagtgaaccccgccccattggcaccagatacctgactcgtaatctg

SEQ ID NO: 614 - DNA, 2208 bp, synthetic construct
  misc_feature 1..2208: note = Description of Artificial Sequence: Synthetic polynucleotide
  source 1..2208: mol_type = other DNA
atggctgccgatggttatcttccagattggctcgaggacaaccttagtgaaggaattcgcgagtggtgggctttgaaacctggagcccctcaacccaaggcaaatcaacaacatcaagacaacgctcggggtcttgtgcttccgggttacaaataccttggacccggcaacggactcgacaagggggagccggtcaacgcagcagacgcggcggccctcgagcacgacaaggcctacgaccagcagctcaaggccggagacaacccgtacctcaagtacaaccacgccgacgccgagttccaggagcggctcaaagaagatacgtcttttgggggcaacctcgggcgagcagtcttccaggccaaaaagaggcttcttgaacctcttggtccggttgaggaagcggctaagacggctcctggaaagaagaggcctgtagagcagtctcctcaggaaccggactcctccgcgggtattggcaaatcgggtgcacagcccgctaaaaagagactcaatttcggtcagactggcgacacagagtcagtcccagaccctcaaccaatcggagaacctcccgcagccccctcaggtgtgggatctcttacaatggcttcaggtggtggcgcaccagtggcagacaataacgaaggtgccgatggagtgggtagttcctcgggaaattggcattgcgattcccaatggctgggggacagagtcatcaccaccagcacccgaacctgggccctgcccacctacaacaatcacctctacaagcaaatctccaacagcacatctggaggatcttcaaatgacaacgcctacttcggctacagcaccccctgggggtattttgacttcaacagattccactgccacttctcaccacgtgactggcggcgactcatcaacaacaactggggattccggcctaagcgactcaacttcaagctcttcaacattcaggtcaaagaggttacggacaacaatggagtcaagaccatcgccaataaccttaccagcacggtccaggtcttcacggactcagactatcagctcccgtacgtgctcgggtcggctcacgagggctgcctcccgccgttcccagcggacgttttcatgattcctcagtacgggtatctgacgcttaatgatggaagccaggccgtgggtcgttcgtccttttactgcctggaatatttcccgtcgcaaatgctaagaacgggtaacaacttccagttcagctacgagtttgagaacgtacctttccatagcagctacgctcacagccaaagcctggaccgactaatgaatccactcatcgaccaatacttgtactatctctcaaagactattaacggttctggacagaatcaacaaacgctaaaattcagtgtggccggacccagcaacatggctgtccagggaagaaactacatacctggacccagctaccgacaacaacgtgtctcaaccactgtgactcaaaacaacaacagcgaatttgcttggcctggagcttcttcttgggctctcaatggacgtaatagcttgatgaatcctggacctgctatggccagccacaaagaaggagaggaccgtttctttcctttgtctggatctttaatttttggcaaacaaggaactggaagagacaacgtggatgcggacaaagtcatgataaccaacgaagaagaaattaaaactactaacccggtagcaacggagtcctatggacaagtggccacaaaccaccagagtgcccaagcacaggcgcagaccggctgggttcaaaaccaaggaatacttccgggtatggtttggcaggacagagatgtgtacctgcaaggacccatttgggccaaaattcctcacacggacggcaactttcacccttctccgctgatgggagggtttggaatgaagcacccgcctcctcagatcctcatcaaaaacacacctgtacctgcggatcctccaacggccttcaacaaggacaagctgaactctttcatcacccagtattctactggccaagtcagcgtggagatcgagtgggagctgcagaaggaaaacagcaagcgctggaacccggagatccagtacacttccaactattacaagtctaataatgttgaatttgctgttaatactgaaggtgtatatagtgaaccccgccccattggcaccagatacctgactcgtaatctg

SEQ ID NO: 615 - DNA, 2208 bp, synthetic construct
  misc_feature 1..2208: note = Description of Artificial Sequence: Synthetic polynucleotide
  source 1..2208: mol_type = other DNA
atggctgccgatggttatcttccagattggctcgaggacaaccttagtgaaggaattcgcgagtggtgggctttgaaacctggagcccctcaacccaaggcaaatcaacaacatcaagacaacgctcgaggtcttgtgcttccgggttacaaataccttggacccggcaacggactcgacaagggggagccggtcaacgcagcagacgcggcggccctcgagcacgacaaggcctacgaccagcagctcaaggccggagacaacctgtacctcaagtacaaccacgccgacgccgagttccaggagcggctcaaagaagatacgtcttttgggggcaacctcgggcgagcagtcttccaggccaaaaagaggcttcttgaacctcttggtctggttgaggaagcggctaagacggctcctggaaagaagaggcctgtagagcagtctcctcaggaaccggactcctccgcgggtattggcaaatcgggtgcacagcccgctaaaaagagactcaatttcggtcagactggcgacacagagtcagtcccagaccctcaaccaatcggagaacctcccgcagccccctcaggtgtgggatctcttacaatggcttcaggtggtggcgcaccagtggcagacaataacgaaggtgccgatggagtgggtagttcctcgggaaattggcattgcgattcccaatggctgggggacagagtcatcaccaccagcacccgaacctgggccctgcccacctacaacaatcacctctacaagcaaatctccaacagcacatctggaggatcttcaaatgacaacgcctacttcggctacagcaccccctgggggtattttgacttcaacagattccactgccacttctcaccacgtgactggcagcgactcatcaacaacaactggggattccggcctaagcgactcaacttcaagctcttcaacattcaggtcaaagaggttacggacaacaatggagtcaagaccatcgccaataaccttaccagcacggtccaggtcttcacggactcagactatcagctcccgtacgtgctcgggtcggctcacgagggctgcctcccgccgttcccagcggacgttttcatgattcctcagtacgggtatctgacgcttaatgatggaagccaggccgtgggtcgttcgtccttttactgcctggaatatttcccgtcgcaaatgctaagaacgggtaacaacttccagttcagctacgagtttgagaacgtacctttccatagcagctacgctcacagccaaagcctggaccgactaatgaatccactcatcgaccaatacttgcactatctctcaaagactattaacggttctggacagaatcaacaaacgctaaaattcagtgtggccggacccagcaacatggctgtccagggaagaaactacatacctggacccagctaccgacaacaacgtgtctcaaccactgtgactcaaaacaacaacagcgaatttgcttggcctggagcttcttcttgggctctcaatggacgtaatagcttgatgaatcctggacctgctatggccagccacaaagaaggagaggaccgtttctttcctttgtctggatctttaatttttggcaaacaaggaactggaagagacaacgtggatgcggacaaagtcatgataaccaacgaagaagaaattaaaactactaacccggtagcaacggagtcctatggacaagtggccacaaaccaccagagtgcccaagcacaggcgcagaccggctgggttcaaaaccaaggaatacttccgggtatggtttggcaggacagagatgtgtacctgcaaggacccatttgggccaaaattcctcacacggacggcaactttcacccttctccgctgatgggagggtttggaatgaagcacccgcctcctcagatcctcatcaaaaacacacctgtacctgcggatcctccaacggccttcaacaaggacaagctgaactctttcatcacccagtattctactggccaagtcagcgtggagatcgagtgggagctgcagaaggaaaacagcaagcgctggaacccggagatccagtacacttccaactattacaagtctaataatgttgaatttgctgttaatactgaaggtgtatatagtgaaccccgccccattggcaccagatacctgactcgtaatctg

SEQ ID NO: 616 - DNA, 2208 bp, synthetic construct
  misc_feature 1..2208: note = Description of Artificial Sequence: Synthetic polynucleotide
  source 1..2208: mol_type = other DNA
atggctgccgatggttatcttccagattggctcgaggacaaccttagtgaaggaattcgcgagtggtgggctttgaaacctggagcccctcaacccaaggcaaatcaacaacatcaagacaacgctcgaggtcttgtgcttccgggttacaaataccttggacccggcaacggactcgacaagggggagccggtcaacgcagcagacgcggcggccctcgagcacgacaaggcctacgaccagcagctcaaggccggagacaacccgtacctcaagtacaaccacgccgacgccgagttccaggagcggctcaaagaagatacgtcttttgggggcaacctcgggcgagcagtcttccaggccaaaaagaggcttcttgaacctcttggtctggttgaggaagcggctaagacggctcctggaaagaagaggcctgtagagcagtctcctcaagaaccggactcctccgcgggtattggcaaatcgggtgcacagcccgctaaaaagagactcaatttcggtcagactggcgacacagagtcagtcccagaccctcaaccaatcggagaacctcccgcagccccctcaggtgtgggatctcttacaatggcttcaggtggtggcgcaccagtggcagacaataacgaaggtgccgatggagtgggtagttcctcgggaaattggcattgcgattcccaatggctgggggacagagtcatcaccaccagcacccgaacctgggccctgcccacctacaacaatcacctctacaagcaaatctccaacagcacatctggaggatcttcaaatgacaacgcctacttcggctacagcaccccctgggggtattttgacttcaacagattccactgccacttctcaccacgtgactggcagcgactcatcaacaacaactggggattccggcctaagcgactcaacttcaagctcttcaacattcaggtcaaagaggttacggacaacaatggagtcaagaccatcgccaataaccttaccagcacggtccaggtcttcacggactcagactatcagctcccgtacgtgctcgggtcggctcacgagggctgcctcccgccgttcccagcggacgttttcatgattcctcagtacgggtatctgacgcttaatgatggaagccaggccgtgggtcgttcgtccttttactgcctggaatatttcccgtcgcaaatgctaagaacgggtaacaacttccagttcagctacgagtttgagaacgtacctttccatagcagctacgctcacagccaaagcctggaccgactaatgaatccactcatcgaccaatacttgcactatctctcaaagactattaacggttctggacagaatcaacaaacgctaaaattcagtgtggccggacccagcaacatggctgtccagggaagaaactacatacctggacccagctaccgacaacaacgtgtctcaaccactgtgactcaaaacaacaacagcgaatttgcttggcctggagcttcttcttgggctctcaatggacgtaatagcttgatgaatcctggacctgctatggccagccacaaagaaggagaggaccgtttctttcctttgtctggatctttaatttttggcaaacaaggaactggaagagacaacgtggatgcggacaaagtcatgataaccaacgaagaagaaattaaaactactaacccggtagcaacggagtcctatggacaagtggccacaaaccaccagagtgcccaagcacaggcgcagaccggctgggttcaaaaccaaggaatacttccgggtatggtttggcaggacagagatgtgtacctgcaaggacccatttgggccaaaattcctcacacggacggcaactttcacccttctccgctgatgggagggtttggaatgaagcacccgcctcctcagatcctcatcaaaaacacacctgtacctgcggatcctccaacggccttcaacaaggacaagctgaactctttcatcacccagtattctactggccaagtcagcgtggagatcgagtgggagctgcagaaggaaaacagcaagcgctggaacccggagatccagtacacttccaactattacaagtctaataatgttgaatttgctgttaatactgaaggtgtatatagtgaaccccgccccattggcaccagatacctgactcgtaatctg

SEQ ID NO: 617 - DNA, 2208 bp, synthetic construct
  misc_feature 1..2208: note = Description of Artificial Sequence: Synthetic polynucleotide
  variation 1325: note = n is a, c, t, or g
  source 1..2208: mol_type = other DNA
atggctgccgatggttatcttccagattggctcgaggacaaccttagtgaaggaattcgcgagtggtgggctttgaaacctggagcccctcaacccaaggcaaatcaacaacatcaagacaacgctcgaggtcttgtgcttccgggttacaaataccttggacccggcaacggactcgacaagggggagccggtcaacgcagcagacgcggcggccctcgagcacgacaaggcctacgaccagcagctcaaggccggagacaacccgtacctcaagtacaaccacgccgacgccgagttccaggagcggctcaaagaagatacgtcttttgggggcaacctcgggcgagcagtcttccaggccaaaaagaggcttcttgaacctcttggtctggttgaggaagcggctaagacggctcctggaaagaagaggcctgtagagcagtctcctcaggaaccggactcctccgcgggtattggcaaatcgggtgcacagcccgctaaaaagagactcaatttcggtcagactggcgacacagagtcagtcccagaccctcaaccaatcggagaacctcccgcagccccctcaggtgtgggatctcttacaatggcttcaggtggtggcgcaccagtggcagacaataacgaaggtgccgatggagtgggtagttcctcgggaaattggcattgcgattcccaatggctgggggacagagtcatcaccaccagcacccgaacctgggccctgcccacctacaacaatcacctctacaagcaaatctccaccagcacatctggaggatcttcaaatgacaacgcctacttcggctacagcaccccctgggggtattttgacttcaacagattccactgccacttctcaccacgtgactggcagcgactcatcaacaacaactggggattccggcctaagcgactcaacttcaagctcttcaacattcaggtcaaagaggttacggacaacaatggagtcaagaccatcgccaataaccttaccagcacggtccaggtcttcacggactcagactatcagctcccgtacgtgctcgggtcggctcacgagggctgcctcccgccgttcccagcggacgttttcatgattcctcagtacgggtatctgacgcttaatgatggaagccaggccgtgggtcgttcgtccttttactgcctggaatatttcccgtcgcaaatgctaagaacgggtaacaacttccagttcagctacgagtttgagaacgtacctttccatagcagctacgctcacagccaaagcctggaccgactaatgaatccactcatcgaccnatacttgcactatctctcaaagactattaacggttctggacagaatcaacaaacgctaaaattcagtgtggccggacccagcaacatggctgtccagggaagaaactacatacctggacccagctaccgacaacaacgtgtctcaaccactgtgactcaaaacaacaacagcgaatttgcttggcctggagcttcttcttgggctctcaatggacgtaatagcttgatgaatcctggacctgctatggccagccacaaagaaggagaggaccgtttctttcctttgtctggatctttaatttttggcaaacaaggaactggaagagacaacgtggatgcggacaaagtcatgataaccaacgaagaagaaattaaaactactaacccggtagcaacggagtcctatggacaagtggccacaaaccaccagagtgcccaagcacaggcgcagaccggctgggttcaaaaccaaggaatacttccggatatggtttggcaggacagagatgtgtacctgcaaggacccatttgggccaaaattcctcacacggacggcaactttcacccttctccgctgatgggagggtttggaatgaagcacccgcctcctcagatcctcatcaaaaacacacctgtacctgcggatcctccaacggccttcaacaaggacaagctgaactctttcatcacccagtattctactggccaagtcagcgtggagatcgagtgggagctgcagaaggaaaacagcaagcgctggaacccggagatccagtacacttccaactattacaagtctaataatgttgaatttgctgttaatactgaaggtgtatatagtgaaccccgccccattggcaccagatacctgactcgtaatctg

SEQ ID NO: 618 - DNA, 2208 bp, synthetic construct
  misc_feature 1..2208: note = Description of Artificial Sequence: Synthetic polynucleotide
  source 1..2208: mol_type = other DNA
atggctgccgatggttatcttccagattggctcgaggacaaccttagtgaaggaattcgcgagtggtgggctttgaaacctggagcccctcaacccaaggcaaatcaacaacatcaagacaacgctcgaggtcttgtgcttccgggttacaaataccttggacccggcaacggactcgacaagggggagccggtcaacgcagcagacgcggcggccctcgagcacgacaaggcctacgaccagcagctcaaggccggagacaacccgtacctcaagtacaaccacgccgacgccgagttccaggagcggctcaaagaagatacgtcttttgggggcaacctcgggcgagcagtcttccaggccaaaaagaggcttcttgaacctcttggtctggttgaggaagcggctaagacggctcctggaaagaagaggcctgtagagcagtctcctcaggaaccggactcctccgcgggtattggcaaatcgggtgcacagcccgctaaaaagagactcaatttcggtcagactggcgacacagagtcagtcccagaccctcaaccaatcggagaacctcccgcagccccctcaggtgtgggatctcttacaatggcttcaggtggtggcgcaccagtggcagacaataacgaaggtgccgatggagtgggtagttcctcgggaaattggcattgcgattcccaatggctgggggacagagtcatcaccaccagcacccgaacctgggccctgcccacctacaacaatcacctctacaagcaaatctccaacagcacatctggaggatcttcaaatgacaacgcctacttcggctacagcaccccctgggggtattttgacttcaacagattccactgccacttctcaccacgtgactggcagcgactcatcaacaacaactggggattccggcctaagcgactcaacttcaagctcttcaacattcaggtcaaagaggttacggacaacaatggagtcaagaccatcgccaataaccttaccagcacggtccaggtcttcacggactcagactatcagctcccgtacgtgctcgggtcggctcacgagggctgcctcccgccgttcccagcggacgttttcatgattcctcagtacgggtatctgacgcttaatgatggaagccaggccgtgggtcgttcgtccttttactgcctggaatatttcccgtcgcaaatgctaagaacgggtaacaacttccagttcagctacgagtttgagaacgtacctttccatagcagctacgctcacagccaaagcctggaccgactaatgaatccactcatcgaccaatacttgcactatctctcaaagactattaacggttctggacagaatcaacaaacgctaaaattcagtgtggccggacccagcaacatggctgtccagggaagaaactacatacctggacccagctaccgacaacaacgtgtctcaaccactgtgactcaaaacaacaacagcgaatttgcttggcctggagcttcttcttgggctctcaatggacgtaatagcttgatgaatcctggacctgctatggccagctacaaagaaggagaggacagtttctttcctttgtctggatctttaatttttggcaaacaaggaactggaagagacaacgtggatgcggacaaagtcatgataaccaacgaagaagaaattaaaactactaacccggtagcaacggagtcctatggacaagtggccacaaaccaccagagtgcccaagcacaggcgcagaccggctgggttcaaaaccaaggaatacttccgggtatggtttggcaggacagagatgtgtacctgcaaggacccatttgggccaaaattcctcacacggacggcaactttcacccttctccgctgatgggagggtttggaatgaagcacccgcctcctcagaccctcatcaaaaacacacctgtacctgcggatcctccaacggccttcaacaaggacaagctgaactctttcatcacccagtattctactggccaagtcagcgtggagatcgagtgggagctgcagaaggaaaacagcaagcgctggaacccggagatccagtacacttccaactattacaagtctaataatgttgaatttgctgttaatactgaaggtgtatatagtgaaccccgccccattggcaccagatacctgactcgtaatctg

SEQ ID NO: 619 - DNA, 2208 bp, synthetic construct; identical to SEQ ID NO: 602
  misc_feature 1..2208: note = Description of Artificial Sequence: Synthetic polynucleotide
  source 1..2208: mol_type = other DNA

SEQ ID NO: 620 - DNA, 2208 bp, synthetic construct
  misc_feature 1..2208: note = Description of Artificial Sequence: Synthetic polynucleotide
  source 1..2208: mol_type = other DNA
atggctgccgatggttatcttccagattggctcgaggacaaccttagtgaaggaattcgcgagtggtgggctttgaaacctggagcccctcaacccagggcaaatcaacaacatcaagacaacgctcgaggtcttgtgcttccgggttacaaataccttggacccggcaacggactcgacaagggggagccggtcaacgcagccgacgcggcggccctcgagcacgacaaggcctacgaccagcagctcaaggccggagacaacccgtacctcaagtacaaccacgccgacgccgagttccaggagcggctcaaagaagatacgtcttttgggggcaacctcgggcgagcagtcttccaggccaaaaagaggcttcttgaacctcttggtctggttgaggaagcggctaagacggctcctggaaagaagaggcctgtagagcagtctcctcaggaaccggactcctccgcgggtattggcaaatcgggtgcacagcccgctaaaaagagactcaatttcggtcagactggcgacacagagtcagtcccagaccctcaaccaatcggagaacctcccgcagccccctcaggtgtgggatctcttacaatggcttcaggtggtggcgcaccagtggcagacaataacgaaggtgccgatggagtgggtagttcctcgggaaattggcattgcgattcccaatggctgggggacagagtcatcaccaccagcacccgaacctgggccctgcccacctacaacaatcacctctacaagcaaatctccaacagcacatctggaggatcttcaaatgacaacgcctacttcggctacagcaccccctgggggtattttgacttcaacagattccactgccacttctcaccacgtgactggcagcgactcatcaacaacaactggggattccggcctaagcgactcaacttcaagctcttcaacattcaggtcaaagaggttacggacaacaatggagtcaagaccatcgccaataaccttaccagcacggtccaggtcttcacggactcagactgtcagctcccgtacgtgctcgggtcggctcacgagggctgcctcccgccgttcccagcggacgttttcatgattcctcagtacgggtatctgacgcttaatgatggaagccaggccgtgggtcgttcgtccttttactgcctggaatatttcccgtcgcaaatgctaagaacgggtaacaacttccagttcagctacgagtttgagaacgtacctttccatagcagctacgctcacagccaaagcctggaccgactaacgaatccactcatcgaccaatacttgtactatctctcaaagactattaacggttctggacagaatcaacaaacgctaaaattcagtgtggccggacccagcaacatggctgtccagggaagaaactacatacctggacccagctaccgacaacaacgtgtctcaaccactgtgactcaaaacaacaacagcgaatttgcttggcctggagcttcttcttgggctctcaatggacgtaatagcttgatgaatcctggacctgctatggccagccacaaagaaggagaggaccgtttctttcctttgtctggatctttaatttttggcaaacaaggaactggaagagacaacgtggatgcggacaaagtcatgataaccaacgaagaagaaattaaaactactaacccggtagcaacggagtcccatggacaagtggccacaaaccaccagagtgcccaagcacaggcgcagaccggctgggttcaaaaccaaggaatacttccgggtatggtttggcaggacagagatgtgtacctgcaaggacccatttgggccaaaattcctcacacggacggcaactttcacccttctccgctgatgggagggtttggaatgaagcacccgcctcctcagatcctcatcaaaaacacacctgtacctgcggatcctccaacggccttcaacaaggacaagctgaactctttcatcacccagtattctactggccaagtcagcgtggagatcgagtgggagctgcagaaggaaaacagcaagcgctggaacccggagatccagtacacttccaactattacaagtctaataatgttgaatttgctgttaatactgaaggtgtatatagtgaaccccgccccattggcaccagatacctgactcgtaatctg

SEQ ID NO: 621 - DNA, 2208 bp, synthetic construct
  misc_feature 1..2208: note = Description of Artificial Sequence: Synthetic polynucleotide
  source 1..2208: mol_type = other DNA
atggctgccgatggttatcttccagattggctcgaggacaaccttagtgaaggaattcgcgagtggtgggctttgaaacctggagcccctcaacccaaggcaaatcaacaacatcaagacaacgctcgaggtcttgtgcttccgggttacaaataccttggacccggcaacggactcgacaagggggagccggtcaacgcagcagacgcggcggccctcgagcacgacaaggcctacgaccagcagctcaaggccggagacaacccgtacctcaagtacaaccacgccgacgccgagttccaggagcggctcaaagaagatacgtcttttgggggcaacctcgggcgagcagtcttccaggccaaaaagaggcttcttgaacctcttggtctggttgaggaagcggctaagacggctcctggaaagaagaggcctgtagagcagtctcctcaggaaccggactcctccgcgggtattggcaaatcgggtgcacagcccgctaagaagagactcaatttcggtcagactggcgacacagagtcagtcccagaccctcaaccaatcggagaacctcccgcagccccctcaggtgtgggatctcttacaatggcttcaggtggtggcgcaccagtggcagacaataacgaaggtgccgatggagtgggtagttcctcgggaaattggcattgcgattcccaatggctgggggacagagtcatcaccaccagcacccgaacctgggccctgcccacctacaacaatcacctctacaagcaaatctccaacagcacatctggaggatcttcaaatgacaacgcctacttcggctacagcaccccctgggggtattttgacttcaacagattccactgccacttctcaccacgtgactggcagcgactcatcaacaacaactggggattccggcctaagcgactcaacttcaagctcttcaacattcaggtcaaagaggttacggacaacaatggagtcaagaccatcgccaataaccttaccagcacggtccaggtcttcacggactcagactatcagctcccgtacgtgctcgggtcggctcacgagggctgcctcccgccgttcccagcggacgttttcatgattcctcagtacgggtatctgacgcttaatgatggaagccaggccgtgggtcgttcgtccttttactgcctggaatatttcccgtcgcaaatgctaagaacgggtaacaacttccagttcagctacgagtttgagaacgtacctttccatagcagctacgctcacagccaaagcctggaccgactaatgaatccacccatcgaccaatacttgtactatctctcaaagactattaacggttctggacagaatcaacaaacgctaaaattcagtgtggccggacccagcaacatggctgtccagggaagaaactacatacctggacccagctaccgacaacaacgtgtctcaaccactgtgactcaaaacaacaacagcgaatttgcttggcctggagcttcttcttgggctctcaatggacgtaatagcttgatgaatcctggacctgctatggccagccacaaagaaggagaggaccgtttctttcctttgtctggatctttaatttttggcaaacaaggaactggaagagacaacgtggatgcggacaaagtcatgataaccaacgaagaagaaattaaaactactaacccggtagcaacggagtcctatggacaagtggccacaaaccaccagagtgcccaagcacaggcgcagaccggctgggttcaaaaccaaggaatacttccgggtatggtttggcaggacagagatgtgtacctgcaaggacccatttgggccaaaattcctcacacggacggcaactttcacccttctccgctgatgggagggtttggaatgaagcacccgcctcctcagatcctcatcaaaaacacacctgtacctgcggatcctccaacggccttcaacaaggacaagctgaactctttcatcacccagtattctactggccaagtcagcgtggagatcgagtgggagctgcagaaggaaaacagcaagcgctggaacccggagatccagtacacttccaactattacaagtctaataatgttgaatttgctgttaatactgaaggtgtatatggtgaaccccgccccattggcaccagatacctgactcgtaatctg

SEQ ID NO: 622 - DNA, 2208 bp, synthetic construct
  misc_feature 1..2208: note = Description of Artificial Sequence: Synthetic oligonucleotide
  source 1..2208: mol_type = other DNA
atggctgccgatggttatcttccagattggctcgaggacaaccttagtgaaggaattcgcgagtggtgggctttgaaacctggagcccctcaacccaaggcaaatcaacaacatcaagacaacgctcgaggtcttgtgcttccgggttacaaataccttggacccggcaacggactcgacaagggggagccggtcaacgcagcagacgcggcggccctcgagcacgacaaggcctacgaccagcagctcaaggccggagacaacccgtacctcaagtacaaccacgccgacgccgagttccaggagcggctcaaagaagatacgtcttttgggggcaacctcgggcgagcagtcttccaggccaaaaagaggcttcttgaacctcttggtctggttgaggaagcggctaagacggctcctggaaagaagaggcctgtagagcagtctcctcaggaaccggactcctccgcgggtattggcaaatcgggtgcacagcccgctaaaaagagactcaatttcggtcagactggcgacacagagtcagtcccagaccctcaaccaatcggagaacctcccgcagccccctcaggtgtgggatctcttacaatggcttcaggtggtggcgcaccagtggcagacaataacgaaggtgccgatggagtgggtagttcctcgggaaattggcattgcgattcccaatggctgggggacagagtcatcaccaccagcacccgaacctgggccctgcccacctacaacaatcacctctacaagcaaatctccaacagcacatctggaggatcttcaaatgacaacgcctacttcggctacagcaccccctgggggtattttgacttcaacagattccactgccacttctcaccacgtgaccggcagcgactcatcaacaacaactggggattccggcctaagcgactcaacttcaagctcttcaacattcaggtcaaagaggttacggacaacaatggagtcaagaccatcgccaataaccttaccagcacggtccaggtcttcacggactcagactatcagctcccgtacgtgctcgggtcggctcacgagggctgcctcccgccgttcccagcggacgttttcatgattcctcagtacgggtatctgacgcttaatgatggaagccaggccgtgggtcgttcgtccttttactgcctggaatatttcccgtcgcaaatgctaagaacgggtaacaacttccagttcagctacgagtttgagaacgtacctttccatagcagctacgctcacagccaaagcctggaccgactaatgaatccactcatcgaccaatacttgtactatctctcaaagactattaacggttctggacagaatcaacaaacgctaaaattcagtgtggccggacccagcaacatggctgtccagggaagaaactacatacctggacccagctaccgacaacaacgtgtctcaaccactgtgactcaaaacaacaacagcgaatttgcttggcctggagcttcttcttgggctctcaatggacgtaatagcttgatgaatcctggacctgctatggccagccacaaagaaggagaggaccgtttctttcctttgtctggatctttaatttttggcaaacaaggaactggaagagacaacgtggatgcggacaaagtcatgataaccaacgaagaagaaattaaaactactaacccggtagcaacggagtcctatggacaagtggccacaaaccaccagagtgcccaagcacaggcgcagaccggctgggttcaaaaccaaggaatacttccgggtatggtttggcaggacagagatgtgtacctgcaaggacccatttgggccaaaattcctcacacggacggcaactttcacccttctccgctgatgggagggtttggaatgaagcacccgcctcctcagatcctcatcaaaaacacacctgtacctgcggatcctccaacggccttcaacaaggacaagctgaactctttcatcacccagtattctactggccaagtcagcgtggagatcgagtgggagctgcagaaggaaaacagcaagcgctggaacccggagatccagtacacttccaactattacaagtctaataatgttgaatttgctgttaatactgaaggtgtatatagtgaaccccgccccattggcaccagatacctgactcgtaatctg

SEQ ID NO: 623 - DNA, 2208 bp, synthetic construct
  misc_feature 1..2208: note = Description of Artificial Sequence: Synthetic polynucleotide
  source 1..2208: mol_type = other DNA
atggctgccgatggttatcttccagattggctcgaggacaaccttagtgaaggaattcgcgagtggtgggctttgaaacctggagcccctcaacccaaggcaaatcaacaacatcaagacaacgctcgaggtcttgtgcttccgggttacaaataccttggacccggcaacggactcgacaagggggagccggtcaacgcagcagacgcggcagccctcgagcacgacaaggcctacgaccagcagctcaaggccggagacaacccgtacctcaagtacaaccacgccgacgccgagttccaggagcggctcaaagaagatacgtcttttgggggcaacctcgggcgagcagtcttccaggccaaaaagaggcttcttgaacctcttggtctggttgaggaagcggctaagacggctcctggaaagaagaggcctgtagagcagtctcctcaggaaccggactcctccgcgggtattggcaaatcgggtgcacagcccgctaaaaagagactcaatttcggtcagactggcgacacagagtcagtcccagaccctcaaccaatcggagaacctcccgcagccccctcaggtgtgggatctcttacaatggcttcaggtggtggcgcaccagtggcagacaataacgaaggtgccgatggagtgggtagttcctcgggaaattggcattgcaattcccaatggctgggggacagagtcatcaccaccagcacccgaacctgggccctgcccacctacaacaatcacctctacaagcaaatctccaacagcacatctggaggatcttcaaatgacaacgcctacttcggctacagcaccccctgggggtattttgacttcaacagattccactgccacttctcaccacgtgactggcagcgactcatcaacaacaactggggattccggcctaagcgactcaacttcaagctcttcaacattcaggtcaaagaggttacggacaacaatggagtcaagaccatcgccaataaccttaccagcacggtccaggtcttcacggactcagactatcagctcccgtacgtgctcgggtcggctcacgagggctgcctcccgccgttcccagcggacgttttcatgattcctcagtacgggtatctgacgcttaatgatggaagccaggccgtgggtcgttcgtccttttactgcctggaatatttcccgtcgcaaatgctaagaacgggtaacaacttccagttcagctacgagtttgagaacgtacctttccatagcagctacgctcacagccaaagcctggaccgactaatgaatccactcatcgaccaatacttgtactatctctcaaagactattaacggttctggacagaatcaacaaacgctaaaattcagtgtggccggacccggcaacatggctgtccagggaagaaactacatacctggacccagctaccgacaacaacgtgtctcaaccactgtgactcaaaacaacaacagcgaatttgcttggcctggagcttcttcttgggctctcaatggacgtaatagcttgatgaatcctggacctgctatggccagccacaaagaaggagaggaccgtttctttcctttgtctggatctttaatttttggcaaacaaggaactggaagagacaacgtggatgcggacaaagtcatgataaccaacgaagaagaaattaaaactactaacccggtagcaacggagtcctatggacaagtggccacaaaccaccagagtgcccaagcacaggcgcagaccggctgggttcaaaaccaaggaatacttccgggtatggtttggcaggacagagatgtgtacctgcaaggacccatttgggccaaaattcctcacacggacggcaactttcacccttctccgctgatgggagggtttggaatgaagcacccgcctcctcagatcctcatcaagaacacacctgtacctgcggatcctccaacggccttcaacaaggacaagctgaactctttcatcacccagtattctactggccaagtcagcgtggagatcgagtgggagctgcagaaggaaaacagcaagcgctggaacccggagatccagtacacttccaactattacaagtctaataatgttgaatttgctgttaatactgaaggtgtatatagtgaaccccgccccattggcaccagatacctgactcgtaatctg

SEQ ID NO: 624 - DNA, 2208 bp, synthetic construct
  misc_feature 1..2208: note = Description of Artificial Sequence: Synthetic polynucleotide
  source 1..2208: mol_type = other DNA
atggctgccgatggttatcttccagattggctcgaggacaaccttagtgaaggaattcgcgagtggtgggctttgaaacctggagcccctcaacccaaggcaaatcaacaacatcaagacaacgctcgaggtcttgtgcttccgggttacagataccttggacccggcaacggactcgacaagggggagccggtcaacgcagcagacgcggcggccctcgagcacgacaaggcctacgaccagcagctcaaggccggagacaacccgtacctcaagtacaaccacgccgacgccgagttccaggagcggctcaaagaagatacgtcttttgggggtaacctcgggcgagcagtcttccaggccaaaaagaggcttcttgaacctcttggtctggttgaggaagcggctaagacggctcctggaaagaagaggcctgtagagcagtctcctcaggaaccggactcctccgcgggtatcggcaaatcgggtgcacagcccgctaaaaagagactcaatttcggtcagactggcgacacagagtcagtcccagaccctcaaccaatcggagaacctcccgcagccccctcaggtgtgggatctcttacaatggcttcaggtggtggcgcaccagtggcagacaataacgaaggtgccgatggagtgggtagttcctcgggaaattggcattgcgattcccaatggctgggggacagagtcatcaccaccagcacccgaacctgggccctgcccacctacaacaatcacctctacaagcaaatctccaacagcacatctggaggatcttcaaatgacaacgcctacttcggctacagcaccccctgggggtattttgacttcaacagattccactgccacttctcaccacgtgactggcagcgactcatcaacaacaactggggattccggcctaagcgactcaacttcaagctcttcaacattcaggtcaaagaggttacggacaacaatggagtcaagaccgtcgccaataaccttaccagcacggtccaggtcttcacggactcagactatcagctcccgtacgtgctcgggtcggctcacgagggctgcctcccgccgttcccagcggacgttttcatgattcctcagtacgggtatctgacgcttaatgatggaagccaggccgtgggtcgttcgtccttttactgcctggaatatttcccgtcgcaaatgctaagaacgggtaacaacttccagttcagctacgagtttgagaacgtacctttccatagcagctacgctcacagccaaagcctggaccgactaatgaatccactcatcgaccaatacttgtactatctctcaaagactattaacggttctggacagaatcaacaaacgctaaaattcagtgtggccggacccagcaacatggctgtccagggaagaaactacatacctggacccagctaccgacaacaacgtgtctcaaccactgtgactcaaaacaacaacagcgaatttgcttggcctggagcttcttcttgggctctcaatggacgtaatagcttgatgaatcctggacctgctatggccagccacaaagaaggagaggaccgtttctttcctttgtctggatctttaatttttggcaaacaaggaactggaagagacaacgtggatgcggacaaagtcatgataaccaacgaagaagaaattaaaactactaacccggtagcaacggagtcctatggacaagtggccacaaaccaccagagtgcccaagcacaggcgcagaccggctgggttcaaaaccaaggaatacttccgggtatggtttggcaggacagagatgtgtacctgcaaggacccatttgggccaaaattcctcacacggacggcaactttcacccttctccgctgatgggagggtttggaatgaagcacccgcctcctcagatcctcatcaaaaacacacctgtacctgcggatcctccaacggccttcaacaaggacaagctgaactctttcatcacccagtattctactggccaagtcagcgtggagatcgagtgggagctgcagaaggaaaacagcaagcgctggaacccggagatccagtacacttccaactattacaagtctaataatgttgaatttgctgttaatactgaaggtgtatatagtggaccccgccccattggcaccagatacctgactcgtaatctg

SEQ ID NO: 625 - DNA, 2208 bp, synthetic construct
  misc_feature 1..2208: note = Description of Artificial Sequence: Synthetic polynucleotide
  source 1..2208: mol_type = other DNA
atggctgccgatggttatcttccagattggctcgaggacaaccttagtgaaggaattcgcgagtggtgggctttgaaacctggagcccctcaacccaaggcaaatcaacaacatcaagacaacgctcgaggtcttgtgcttccgggttacaaataccttggacccggcaacggactcgacaagggggagccggtcaacgcagcagacgcggcggccctcgagcacgacaaggcctacgaccagcagctcaaggccggagacaacccgtacctcaagtacaaccacgccgacgccgagttccaggagcggctcaaagaagatacgtcttttgggggcaacctcgggcgagcagtcttccaggccaaaaagaggcttcttgaacctcttggtctggttgaggaagcggctaagacggctcctggaaagaagaggcctgtagagcagtctcctcaggaaccggactcctccgcgggtattggcaaatcgggtgcacagcccgctaaaaagagactcaatttcggtcagactggcgacacagagtcagtcccagaccctcaaccaatcggagaacctcccgcagccccctcaggtgtgggatctcttacaatggcttcaggtggtggcgcaccagtggcagacaataacgaaggtgccgatggagtgggtagttcctcgggaaattggcattgcgattcccaatggctgggggacagagtcatcaccaccagcacccgaacctgggccctgcccacctacaacaatcacctctacaagcaaatctccaacagcacatctggaggatcttcaaatgacaacgcctacttcggctacagcaccccctgggggtattttgacttcaacagattccactgccacttctcaccacgtgactggcagcgactcatcaacaacaactggggattccggcctaagcgactcaacttcaagctcttcaacattcaggtcaaagaggttacggacaacaatggagtcaagaccatcgccaataaccttaccagcacggtccaggtcttcacggactcagactatcagctcccgtacgtgctcgggtcggctcacgagggctgcctcccgccgttcccagcggacgttttcatgattcctcagtacgggtatctgacgcttaatgatggaagccaggccgtgggtcgttcgtccttttactgcctggaatatttcccgtcgcaaatgctaagaacgggtaacaacttccagttcagctacgagtttgagaacgtacctttccatagcagctacgctcacagccaaagcctggaccgactaatgaatccactcatcgaccaatacttgtactatctctcaaagactattaacggttctggacagaatcaacaaacgctaaaattcagtgtggccggacccagcaacatggctgtccagggaagaaactacatacctggacccagctaccgacaacaacgtgtctcaaccactgtgactcaaaacaacaacagcgaatttgcttggcctggagcttcttcttgggctctcaatggacgtaatagcttgatgaatcctggacctgctatggccagccacaaagaaggagaggaccgtttctttcctttgtctggatctttaatttttggcaaacaaggaactggaagagacaacgtggatgcggacaaagtcatgataaccaacgaagaagaaattaaaactactaacccggtagcaacggagtcctatggacaagtggccacaaaccaccagagtgcccaagcacaggcgcagaccggctgggttcaaaaccaaggaatacttccgggtatggtttggcaggacagagatgtgtacctgcaaggacccatttgggccaaaattcctcacacggacggcaactttcacccttctccgctgatgggagggtttggaatgaagcacccgcctcctcagatcctcatcaaaaacacacctgtacctgcggatcctccaacggccttcaacaaggacaagctgaactctttcatcacccagtattctactggccaagtcagcgtggagatcgagtgggagctgcagaaggaaaacagcaagcgctggaacccggagatccagtacacttccaactattacaagtctaataatgttgaatttgctgttaatactgaaggtgtatatagtgaaccccgccccattggcaccagatacctgactcgtaatctg

SEQ ID NO: 626 - DNA, 2208 bp, synthetic construct
  misc_feature 1..2208: note = Description of Artificial Sequence: Synthetic polynucleotide
  source 1..2208: mol_type = other DNA
atggctgccgatggttatcttccagattggctcgaggacaaccttagtgaaggaattcgcgagtggtgggctttgaaacctggagcccctcaacccaaggcaaatcaacaacgtcaagacaacgctcgaggtcttgtgcttccgggttacaaataccttggacccggcaacggactcgacaagggggagccggtcaacgcagcagacgcggcggccctcgagcacgacaaggcctacgaccagcagctcaaggccggaggcaacccgtgcctcaagtacaaccacgccgacgccgagttccaggagcggctcaaagaagatacgtcttttgggggcaacctcgggcgagcagtcttccaggccaaaaagaggcttcttgaacctcttggtctggttgaggaagcggctaagacggctcctggaaagaagaggcctgtagagcagtctcctcaggaaccggactcctccgcgggtattggcagatcgggtgcacagcccgctaaaaagagactcaatttcggtcagactggcgacacagagtcagtcccagaccctcaaccaatcggagaacctcccgcagccccctcaggtgtgggatctcttacaatggcttcaggtggtggcgcaccagtggcagacaataacgaaggtgccgatggagtgggtagttcctcgggaaattggcattgcgattcccaatggctgggggacagagtcatcaccaccagcacccgaacctgggccctgcccacctacaacaatcacctctacaagcaaatctccaacagcacatctggaggatcttcaaatgacaacgcctacttcggctacagcaccccctgggggtattttgacttcaacagattccactgccacttctcaccacgtgactggcagcgactcatcaacaacaactggggattccggcctaagcgactcaacttcaagctcttcaacattcaggtcaaagaggttacggacaacaatggagtcaaggccatcgccaataaccttaccagcacggtccaggtcttcacggactcagactatcagctcccgtacgtgctcgggtcggctcacgagggctgcctcccgccgttcccagcggacgttttcatgattcctcagtacgggtatctgacgcttaatgatggaagccaggccgtgggtcgttcgtccttttactgcctggaatatttcccgtcgcaaatgctaagaacgggtaacaacttccagttcagctacgagtttgagaacgtacctttccatagcagctacgctcacagccaaagcctggaccgactaatgaatccactcatcgaccaatacttgtactatctctcaaagactattgacggttctggacagaatcaacaaacgctaaaattcagtgtggccggacccagcaacatggctgtccagggaagaaactacatacctggacccagctaccgacaacaacgtgtctcaaccactgtgactcaaaacaacaacagcgaatttgcttggcctggagcttcttcttgggctctcaatggacgtaatagcttgatggatcctggacctgctatggccagccacaaagaaggagaggaccgtttctttcctttgtctggatctttaatttttggcaaacaaggaactggaagagacaacgtggatgcggacaaagtcatgataaccaacgaagaagaaattaaaactactaacccggtagcaacggagtcctatggacaagtggccacaaaccaccagagtgcccaagcacaggcgcagaccggctgggttcaaaaccaaggaatacttccgggtatggtttggcaggacagagatgtgtacctgcaaggacccatttgggccaaaattcctcacacgggcggcaactttcacccttctccgctgatgggagggtttggaatgaagcacccgcctcctcagatcctcatcaaaaacacacctgtacctgcggatcctccaacggccttcaacaaggacaagctgaactctttcatcacccagtattctactggccaagtcagcgtggagatcgagtgggagctgcagaaggaaaacagcaagcgctggaacccggagatccagtacacttccaactattacaagtctaataatgttgaatttgctgttaatactgaaggtgtatatagtgaaccccgccccattggcaccagatacctgactcgtaatctg

SEQ ID NO: 627 - DNA, 2208 bp, synthetic construct
  misc_feature 1..2208: note = Description of Artificial Sequence: Synthetic polynucleotide
  source 1..2208: mol_type = other DNA
atggctgccgatggttatcttccagattggctcgaggacaaccttagtgaaggaattcgcgagtggtgggctttgaaacctggagcccctcaacccaaggcaaatcaacaacatcaagacaacgctcgaggtcttgtgcttccgggttacaaataccttggacccggcaacggactcgacaagggggagccggtcaacgcagcagacgcggcggccctcgagcacgacaaggcctacgaccagcagctcaaggccggagacaacccgtacctcaagtacaaccacgccgacgccgagttccaggagcggctcaaagaagatacgtcttttgggggcaacctcgggcgagcagtcttccaggccaaaaagaggcttcttgaacctcttggtctggttgaggaagcggctaagacggctcctggaaagaagaggcctgtagagcagtctcctcaggaaccggactcctccgcgggtattggcaaatcgggtgcacagcccgctaaaaagagactcaatttcggtcagactggcgacacagagtcagtcccagaccctcaaccaatcggagaacctcccgcagccccctcaggtgtgggatctcttacaatggcttcaggtggtggcgcaccagtggcagacaataacgaaggtgccgatggagtgggtagttcctcgggaaattggcattgcgattcccaatggctgggggacagagtcatcaccaccagcacccgaacctgggccctgcccacctacaacaatcacctctacaagcaaatctccaacagcacatctggaggatcttcaaatgacaacgcctacttcggctacagcaccccctgggggtattttgacttcaacagattccactgccacttctcaccacgtgactggcagcgactcatcaacaacaactggggattccggcctaagcgactcaacttcaagctcttcaacattcaggtcaaagaggttacggacaacaatggagtcaagaccatcgccaataaccttaccagcacggtccaggtcttcacggactcagactatcagctcccgtacgtgctcgggtcggctcacgagggctgcctcccgccgttcccagcggacgttttcatgattcctcagtacgggtatctgacgcttaatgatggaagccaggccgtgggtcgttcgtccttttactgcctggaatatttcccgtcgcaaatgctaagaacgggtaacaacttccagttcagctacgagtttgagaacgtacctttccatagcagctacgctcacagccaaagcctggaccgactaatgaatccactcatcgaccaatacttgtactatctctcaaagactattaacggttctggacagaatcaacaaacgctaaaattcagtgtggccggacccagcaacatggctgtccagggaagaaactacatacctggacccagctaccgacaacaacgtgtctcaaccactgtgactcaaaacaacaacagcgaatttgcttggcctggagcttcttcttgggctctcaatggacgtaatagcttgatgaatcctggacctgctatggccagccacaaagaaggagaggaccgtttctttcctttgtctggatctttaatttttggcaaacaaggaactggaagagacaacgtggatgcggacaaagtcatgataaccaacgaagaagaaattaaaactactaacccggtagcaacggagtcctatggacaagtggccacaaaccaccagagtgcccaagcacaggcgcagaccggctgggttcaaaaccaaggaatacttccgggtatggtttggcaggacagagatgtgtacctgcaaggacccatttgggccaaaattcctcacacggacggcaactttcacccttctccgctgatgggagggtttggaatgaagcacccgcctcctcagatcctcatcaaaaacacacctgtacctgcggatcctccaacggccttcaacaaggacaagctgaactctttcatcacccagtattctactggccaagtcagcgtggagatcgagtgggagctgcagaaggaaaacagcaagcgctggaacccggagatccagtacacttccaactattacaagcctaataatgttgaatttgctgttaatactgaaggtgtatatagtgaaccccgccccattggcaccagatacctgactcgtaatctg

SEQ ID NO: 628 - DNA, 2208 bp, synthetic construct
  misc_feature 1..2208: note = Description of Artificial Sequence: Synthetic polynucleotide
  source 1..2208: mol_type = other DNA
atggctgccgatggttatcttccagattggctcgaggacaaccttagtgaaggaattcgcgagtggtgggctttgaaacctggagcccctcaacccaaggcaaatcaacaacatcaagacaacgctcgaggtcttgtgcttccgggttacaaataccttggacccggcaacggactcgacaagggggagccggtcaacgcagcagacgcggcggccctcgagcacaacaaggcctacgaccagcagctcaaggccggagacaacccgtacctcaagtgcaaccacgccgacgccgagttccaggagcggctcaaagaagatacgtcttttgggggcaacctcgggcgagcagtcttccaggccaaaaagaggcctcttgaacctcttggtctggttgaggaagcggctaagacggctcctggaaagaagaggcctgtagagcagtctcctcaggaaccggactcctccgcgggtattggcaaatcgggtgcacagcccgctaaaaagagactcaatttcggtcagactggcgacacagagtcagtcccagaccctcaaccaatcggagaacctcccgcagccccctcaggtgtgagatctcttacaatggcttcaggtggtggcgcaccagtggcagacaataacgaaggtgccgatggagtgggtagttcctcgggaaattggcattgcgattcccaatggctgggggacagagtcatcaccaccagcacccgaacctgggccctgcccacctacaacaatcacctctacaagcaaatctccaacagcacatctggaggatcttcaaatgacaacgcctacctcggctacagcaccccctgggggtattttgacttcaacagattccactgccacttctcaccacgtgactggcagcgactcatcaacaacaactggggattccggcctaagcgactcaacttcaagctcttcaacattcaggtcaaagaggttacggacaacaatggagtcaagaccatcgccaataaccttaccagcacggtccaggtcttcacggactcagactatcagctcccgtacgtgctcgggtcggctcacgagggctgcctcccgccgttcccagcggacgttttcatgattcctcagtacgggtatctgacgcttaatgatggaagccaggccgtgggtcgttcgtccttttactgcctggaatatttcccgtcgcaaatgctaagaacgggtaacaacttccagttcagctacgagtttgagaacgtacctttccatagcagctacgctcacagccaaagcctggaccgactaatgaatccactcatcgaccaatacttgtactatctctcaaagactattaacggttctggacagaatcaacaaacgctaaaattcagtgtggccggacccagcaacatggctgtccagggaagaaactacatacctggacccagctaccgacaacaacgtgtctcaaccactgtgactcaaaacaacaacagcgaatttgcttggcctggagcttcttcttgggctctcaatggacgtaatagcttgatgaatcctggacctactatggccagccacaaagaaggagaggaccgtttctttcctttgtctggatctttaatttttggcaaacaaggaactggaagagacaacgtggatgcggacaaagtcatgataaccaacgaagaagaaattaaaactactaacccggtagcaacggagtcctatggacaagtggccacaaaccaccagagtgcccaagcacaggcgcagaccggctgggttcaaaaccaaggaatacttccgggtatggtttggcaggacagagatgtgtacctgcaaggacccatttgggccaaaattcctcacacggacggcaactttcacccttctccgctgatgggagggtttggaatgaagcacccgcctcctcagatcctcatcaaaaacacacctgtacctgcggatcctccaacggccttcaacaaggacaagctgaactctttcatcacccagtattctactggccaagtcagcgtggagatcgagtgggagctgcagaaggaaaacagcaagcgctggaacccggagatccagtacacttccaactattacaagtctaataatgttgaatttgctgttaatactgaaggtgtatatagtgaaccccgccccattggcaccagatacctgactcgtaatctg

SEQ ID NO: 629 - DNA, 2208 bp, synthetic construct
  misc_feature 1..2208: note = Description of Artificial Sequence: Synthetic polynucleotide
  source 1..2208: mol_type = other DNA
atggctgccgatggttatcttccagattggctcgaggacaaccttagtgaaggaattcgcgagtggtgggctttgaaacctggagcccctcaacccaaggcaaatcaacaacatcaagacaacgctcgaggtcttgtgcttccgggttacaaataccttggacccggcaacggactcgacaagggggagccggtcaacgcagcagacgcggcggccctcgtgcacgacaaggcctacgaccagcagctcaaggccggagacaacccgtacctcaagtgcaaccacgccgacgccgagttccaggagcggctcaaagaagatacgtcttttgggggcaacctcgggcgagcagtcttccaggccaaaaagaggcttcttgaacctcttggtctggttgaggaagcggctaagacggctcctggaaagaagaggcctgtagagcagtctcctcaggaaccggactcctccgcgggtattggcaaatcgggtgcacagcccgctaaaaagagactcaatttcggtcagactggcgacacagagtcagtcccagaccctcaaccaatcggagaacctcccgcagccccctcaggtgtgggatctcttacaatggcttcaggtggtggcgcaccagtggcagacaataacgaaggtgccgatggagtgggtagttcctcgggaaattggcattgcgattcccaatggctgggggacagagtcatcaccaccagcacccgaacctgggccctgcccacctacaacaatcacctctacaagcaaatctccaacagcacatctggaggatcttcaaatgacaacgcctacctcggctacagcaccccctgggggtattttgacttcaacagattccactgccacttctcaccacgtgactggcagcgactcatcaacaacaactggggattccggcctaagcgactcaacttcaagctcttcaacattcaggtcaaagaggttacggacaacaatggagtcaagaccatcgccaataaccttaccagcacggtccaggtcttcacggactcagactatcagctcccgtacgtgctcgggtcggctcacgagggctgcctcccgccgttcccagcggacgttttcacgattcctcagtacgggtatctgacgcttaatgatggaagccaggccgtgggtcgttcgtccttttactgcctggaatatttcccgtcgcaaatgctaagaacgggtaacaacttccagttcagctacgagtttgagaacgtacctttccatagcagctacgctcacagccaaagcctggaccgactaatgaatccactcatcgaccaatacttgtactatctctcaaagactattaacggttctggacagaatcaacaaacgctaaaattcagtgtggccggacccagcaacatggctgtccagggaagaaactacatacctggacccagctaccgacaacaacgtgtctcaaccactgtgactcaaaacaacaacagcgaatttgcttggcctggagcttcttcttgggctctcaatggacgtaatagcttgatgaatcctggacctgctatggccagccacaaagaaggagaggaccgtttctttcctttgtctggatctttaatttttggcaaacaaggaactggaagagacaacgtggatgcggacaaagtcatgataaccaacgaagaagaaattaaaactactaacccggtagcaacggagtcctatggacaagtggccacaaaccaccagagtgcccaagcacaggcgcagaccggctgggttcaaaaccaaggaatacttccgggtatggtttggcaggacagagatgtgtacctgcaaggacccatttgggccaaaattcctcacacggacggcaactttcacccttctccgctgatgggagggtttggaatgaagcacccgcctcctcagatcctcatcaaaaacacacctgtacctgcggatcctccaacggccttcaacaaggacaagctgaactctttcatcacccagtattctactggccaagtcagcgtggagatcgagtgggagctgcagaaggaaaacagcaagcgctggaacccggagatccagtacacttccaactattacaagtctaataatgttgaatttgctgttaatactgaaggtgtatatagtgaaccccgccccattgggccccgatacctgactcgtaatttt

SEQ ID NO: 630 - DNA, 2208 bp, synthetic construct
  misc_feature 1..2208: note = Description of Artificial Sequence: Synthetic polynucleotide
  source 1..2208: mol_type = other DNA
atggctgccgatggttatcttccagattggctcgaggacaaccttagtgaaggaattcgcgagtggtgggctttgaaacctggagcccctcaacccaaggcaaatcaacaacatcaagacaacgctcgaggtcttgtgcttccgggttacaaataccttggacccggcaacggactcgacaagggggagccggtcaacgcagcagacgcggcggccctcgagcacaacaaggcctacgaccagcagctcaaggccggagacaacccgtacctcaagtgcaaccacgccgacgccgagttccaggagcggctcaaagaagatacgtcttttgggggcaacctcgggcgagcagtcttccaggccaaaaagaggcttcttgaacctcttggtctggttgaggaagcggctaagacggctcctggaaagaagaggcctgtagagcagtctcctcaggaaccggactcctccgcgggtattggcaaatcgggtgcacagcccgctaaaaagagactcaatttcggtcagactggcgacacagagtcagtcccagaccctcaaccaatcggagaacctcccgcagccccctcaggtgtgagatctcttacaatggcttcaggtggtggcgcaccagtggcagacaataacgaaggtgccgatggagtgggtagttcctcgggaaattggcattgcgattcccaatggctgggggacagagtcatcaccaccagcacccgaacctgggccctgcccacctacaacaatcacctctacaagcaaatctccaacagcacatctggaggatcttcaaatgacaacgcctacctcggctacagcaccccctgggggtattttgacttcaacagattccactgccacttctcaccacgtgactggcagcgactcatcaacaacaactggggattccggcctaagcgactcaacttcaagctcttcaacattcaggtcaaagaggttacggacaacaatggagtcaagaccatcgccaataaccttaccagcacggtccaggtcttcacggactcagactatcagctcccgtacgtgctcgggtcggctcacgagggctgcctcccgccgttcccagcggacgttttcatgattcctcagtacgggtatctgacgcttaatgatggaagccaggccgtgggtcgttcgtccttttactgcctggaatatttcccgtcgcaaatgctaagaacgggtaacaacttccagttcagctacgagtttgagaacgtacctttccatagcagctacgctcacagccaaagcctggaccgactaatgaatccactcatcgaccaatacttgtactatctctcaaagactattaacggttctggacagaatcaacaaacgctaaaattcagtgtggccggacccagcaacatggctgtccagggaagaaactacatacctggacccagctaccgacaacaacgtgtctcaaccactgtgactcaaaacaacaacagcgaatttgcttggcctggagcttcttcttgggctctcaatggacgtaatagcttgatgaatcctggacctgctatggccagccacaaagaaggagaggaccgtttctttcctttgtctggatctttaatttttggcaaacaaggaactggaagagacaacgtggatgcggacaaagtcatgataaccaacgaagaagaaattaaaactactaacccggtagcaacggagtcctatggacaagtggccacaaaccaccagagtgcccaagcacaggcgcagaccggctgggttcaaaaccaaggaatacttccgggtatggtttggcaggacagagatgtgtacctgcaaggacccatttgggccaaaattcctcacacggacggcaactttcacccttctccgctgatgggagggtttggaatgaagcacccgcctcctcagatcctcatcaaaaacacacctgtacctgcggatcctccaacggccttcaacaaggacaagctgaactctttcatcacccagtattctactggccaagtcagcgtggagatcgagtgggagctgcagaaggaaaacagcaagcgctggaacccggagatccagtacacttccaactattacaagtctaataatgttgaatttgctgttaatactgaaggtgtatatagtgaaccccgccccattggcaccagatacctgactcgtaatctg

SEQ ID NO: 631 - DNA, 2208 bp, synthetic construct
  misc_feature 1..2208: note = Description of Artificial Sequence: Synthetic polynucleotide
  source 1..2208: mol_type = other DNA
atggctgccgatggttatcttccagattggctcgaggacaaccttagtgaaggaattcgcgagtggtgggctttgaaacctggagcccctcaacccaaggcaaatcaacaacatcaagacaacgctcgaggtcttgtgcttccgggttacaaataccttggacccggcaacggactcgacaagggggagccggtcaacgcagcagacgcggcggccctcgagcacgacaaggcctacgaccagcagctcaaggccggagacaacccgtacctcaagtgcaaccacgccgacgccgagttccaggagcggctcaaagaagatacgtcttttgggggcaacctcgggcgagcagtcttccaggccaaaaagaggcttcttgaacctcttggtctggttgaggaagcggctaagacggctcctggaaagaagaggcctgtagagcagtctcctcaggaaccggactcctccgcgggtattggcaaatcgggtgcacagcccgctaaaaagagactcaatttcggtcagactggcgacacagagtcagtcccagaccctcaaccaatcggagaacctcccgcagccccctcaggtgtgggatctcttacaatggcttcaggcggtggcgcaccagtggcagacaataacgaaggtgccgatggagtgggtagttcctcgggaaattggcattgcgattcccaatggctgggggacagagtcatcaccaccagcacccgaacctgggccctgcccacctacaacaatcacctctacaagcaaatctccaacagcacatctggaggatcttcaaatgacaacgcctacctcggctacagcaccccctgggggtattttgacttcaacagattccactgccacttctcaccacgtgactggcagcgactcatcaacaacaactggggattccggcctaagcgactcaacttcgagctcttcaacattcaggtcaaagaggttacggacaacaatggagtcaagaccatcgccaataaccttaccagcacggtccaggtcttcacggactcagactatcagctcccgtacgtgctcgggtcggctcacgagggctgcctcccgccgttcccagcggacgttttcatgattcctcagtacgggtatctgacgcttaatgatggaagccaggccgtgggtcgttcgtccttttactgcctggaatatttcccgtcgcaaatgctaagaacgggtaacaacttccagtccagctacgagtttgagaacgtacctttccatagcagctacgctcacagccaaagcctggaccgactaatgaatccactcatcgaccaatacttgtactatctctcaaagactattaacggttctggacagaatcaacaaacgctaaaattcagtgtggccggacccagcaacatggctgtccagggaagaaactacatacctggacccagctaccgacaacaacgtgcctcaaccactgtgactcaaaacaacaacagcgaatttgcttggcctggagcttcttcttgggctctcaatggacgtaatagcttgatgaatcctggacctgctatggccagccacaaagaaggggaggaccgtttctttcctttgtctggatctttaatttttggcaaacaaggaactggaagagacaacgtggatgcggacaaagtcatgataaccaacgaagaagaaattaaaactactaacccggtagcaacggagtcctatggacaagtggccacaaaccaccagagtgcccaagcacaggcgcagaccggctgggttcaaaaccaaggaatacttccgggtatggtttggcaggacagagatgtgtacctgcaaggacccatttgggccaaaattcctcacacggacggcaactttcacccttctccgctgatgggagggtttggaatgaagcacccgcctcctcagatcctcatcaaaaacacacctgtacctgcggatcctccaacggccttcaacaaggacaagctgaactctttcatcacccagtattctactggccaagtcagcgtggagatcgagtgggagctgcagaaggaaaacagcaagcgctggaacccggagatccagtacacttccaactattacaagtctaataatgttgaatttgctgttaatactgaaggtgtatatagtgaaccccgccccattggcaccagatacctgactcgtaatctg

SEQ ID NO: 632 - DNA, 2208 bp, synthetic construct
  misc_feature 1..2208: note = Description of Artificial Sequence: Synthetic polynucleotide
  source 1..2208: mol_type = other DNA
atggctgccgatggttatcttccagattggctcgaggacaaccttagtgaaggaattcgcgagtggtgggctttgaaacctggagcccctcaacccaaggcaaatcaacaacatcaagacaacgctcgaggtcttgtgcttccgggttacaaataccttggacccggcaacggactcgacaagggggagccggtcaacgcagcagacgcggcggccctcgagcacgacaaggcctacgaccagcagctcaaggccggagacaacccgtacctcaagtgcaaccacgccgacgccgagttccaggagcggctcaaagaagatacgtcttttgggggcaacctcgggcgagcagtcttccaggccaaaaagaggcttcttgaacctcttggtctggttgaggaagcggctaagacggctcctggaaagaagaggcctgtagagcagtctcctcaggaaccggactcctccgcgggtattggcaaatcgggtgcacagcccgctaaaaagagactcaatttcggtcagactggcgacacagagtcagtcccagaccctcaaccaatcggagaacctcccgcagcccccccaggtgtgggatctcttacaatggcttcaggtggtggcgcaccagtggcggacaataacgaaggtgccgatggagtgggtagttcctcgggaaattggcattgcgattcccaatggctgggggacagagtcatcaccaccagcacccgaacctgggccctgcccacctacaacaatcacctctacaagcaaatctccaacagcacatctggaggatcttcaaatgacaacgcctacctcggctacagcaccccctgggggtattttgacttcaacagattccactgccacttctcaccacgtgactggcagcgactcatcaacaacaactggggattccggcctaagcgactcaacttcaagctcttcaacattcaggtcaaagaggttacggacaacaatggagtcaagaccatcgccaataaccttaccagcacggtccaggtcttcacggactcagactatcagctcccgtacgtgctcgggtcggctcacgagggctgcctcccgccgttcccagcggacgttttcatgattcctcagtacgggtatctgacgcttaatgatggaagccaggccgtgggtcgttcgtccttttactgcctggaatatttcccgtcgcaaatgctaagaacgggtaacaacttccagttcagctacgagtttgagaacgtacctttccatagcagctacgctcacagccaaagcctggaccgactaatgaatccactcatcgaccaatacttgtactatctctcaaagactattagcggttctggacagaatcaacaaacgctaaaattcagtgtggccggacccagcaacatggctgtccagggaagaaactacatacctggacccagctaccgacaacaacgtgtctcaaccactgtgactcaaaacaacagcagcgaatttgcttggcctggagcttcttcttgggctctcaatggacgtaatagcttgatgaatcctggacctgctatggccagccacaaagaaggagaggaccgtttctttcctttgtctggatctttaatttttggcaaacaaggaactggaagagacaacgtggatgcggacaaagtcatgataaccaacgaagaagaaattaaaactactaacccggtagcaacggagtcctatggacaagtggccacaaaccaccagagtgcccaagcacaggcgcagaccggctgggttcaaaaccaaggaatactttcgggtatggtttggcaggacagagatgtgtacctgcaaggacccatttgggccaaaattcctcacacggacggcaactttcacccttctccgctgatgggagggtttggaatgaagcacccgcctcctcagatcctcatcaaaaacacacctgtacctgcggatcctccaacggccttcaacaaggacaagctgaactctttcatcacccagtattctactggccaagtcagcgtggagatcgagtgggagctgcagaaggaaaacagcaagcgctggaacccggagatccagtacacttccaactattacaagtctaataatgttgaatttgctgttaatactgaaggtgtatatagtgaaccccgccccattggcaccagatacctgactcgtaatctg

SEQ ID NO: 633 - DNA, 2208 bp, synthetic construct
  misc_feature 1..2208: note = Description of Artificial Sequence: Synthetic polynucleotide
  source 1..2208: mol_type = other DNA
atggctgccgatggttatcttccagattggctcgaggacaaccttagtgaaggaattcgcgagtggtgggctttgaaacctggagcccctcaacccaaggcaaatcaacaacatcaagacaacgctcgaggtcttgtgcttccgggttacaaataccttggacccggcaacggactcgacaagggggagccggtcaacgcagcagacgcggcggccctcgagcacgacaaggcctacgaccagcagctcaaggccggagacaacccgtacctcaagtgcaaccacgccgacgccgagttccaggagcggctcaaagaagatacgtcttttgggggcaacctcgggcgagcagtcttccaggccaaaaagaggcttcttgaacctcttggtctggttgaggaagcggctaagacggctcctggaaagaagaggcctgtagagcagtctcctcaggaaccggactcctccgcgggtattggcaaatcgggtgcacagcccgctaaaaagagactcaatttcggtcagactggcgacacagagtcagtcccagaccctcaaccaatcggagaacctcccgcagccccctcaggtgtgggatctcttacaatggcttcaggtggtggcgcaccagtggcagacaataacgaaggtgccgatggagtgggtagttcctcgggaaattggcattgcgattcccaatggctgggggacagagtcatcaccaccagcacccgaacctgggccctgcccacctacaacaatcacctctacaagcaaatctccaacagcacatctggaggatcttcaaatgacaacgcctacctcggctacagcaccccctgggggtattttgacttcaacagattccactgccacttctcaccacgtgactggcagcgactcatcaacaacaactggggattccggcctaagcgactcaacttcaagctcttcaacattcaggtcaaagaggttacggacaacaatggagtcaagaccatcgccaataaccttaccagcacggtccaggtcttcacggactcagactatcagctcccgtacgtgctcgggtcggctcacgagggctgcctcccgccgttcccagcggacgttttcatgattcctcagtacgggtatctgacgcttaatgatggaagccaggccgtgggtcgttcgtccttttactgcctggaatatttcccgtcgcaaatgctaagaacgggtaacaacttccagttcagctacgagtttgagaacgtacctttccatagcagctacgctcacagccaaagcctggaccgactaatgaatccactcatcgaccaatacttgtactatctctcaaagactattaacggttctggacagaatcaacaaacgctaaaattcagtgtggccggacccagcaacatggctgtccagggaagaaactacatacctggacccagctaccgacaacaacgtgtctcaaccactgtgactcaaaacaacaacagcgaatttgcttggcctggagcttcttcttgggctctcaatggacgtaatagcttgatgaatcctggacctgctatggccagccacaaagaaggagaggaccgtttctttcctttgtctggatctttaatttttggcaaacaaggaactggaagagacaacgtggatgcggacaaagtcatgataaccaacgaagaagaaattaaaactactaacccggtagcaacggagtcctatggacaagtggccacaaaccaccagagtgcccaagcacaggcgcagaccggctgggttcaaaaccaaggaatacttccgggtatggtttggcaggacagagatgtgtacctgcaaggacccatttgggccaaaattcctcacacggacggcaactttcacccttctccgctgatgggagggtttggaatgaagcacccgcctcctcagatcctcatcaaaaacacacctgtacctgcggatcctccaacggccttcaacaaggacaagctgaactctttcatcacccagtattctactggccaagtcagcgtggagatcgagtgggagctgcagaaggaaaacagcaagcgctggaacccggagatccagtacacttccaactattacaagtctaataatgttgaatttgctgttaatactgaaggtgtatatagtgaaccccgccccattggcaccagatacctgactcgtaatctg

SEQ ID NO: 634 - DNA, 2208 bp, synthetic construct; identical to SEQ ID NO: 633
  misc_feature 1..2208: note = Description of Artificial Sequence: Synthetic polynucleotide
  source 1..2208: mol_type = other DNA

SEQ ID NO: 635 - DNA, 2208 bp, synthetic construct
  misc_feature 1..2208: note = Description of Artificial Sequence: Synthetic polynucleotide
  source 1..2208: mol_type = other DNA
atggctgccgatggttatcttccagattggctcgaggacaaccttagtgaaggaattcgcgagtggtgggctttgaaacctggagcccctcaacccaaggcaaatcaacaacatcaagacaacgctcgaggtcttgtgcttccgggttacaaataccttggacccggcaacggactcgacaagggggagccggtcaacgcagcagacgcggcggccctcgagcacgacaaggcctacgaccagcagctcaaggccggagacaacccgtacctcaagtgcaaccacgccgacgccgagttccaggagcggctcaaagaagatacgtcttttgggggcaacctcgggcgagcagtcttccaggccaaaaagaggcttcttgaacctcttggtctggttgaggaagcggctaagacggctcctggaaagaagaggcctgtagagcagtctcctcaggaaccggactcctccgcgggtattggcaaatcgggtgcacagcccgctaaaaagagactcaatttcggtcagactggcgacacagagtcagtcccagaccctcaaccaatcggagaacctcccgcagccccctcaggtgtgggatctcttacaatggcttcaggtggtggcgcaccagtggcagacaataacgaaggtgccgatggagtgggtagttcctcgggaaattggcattgcgattcccaatggctgggggacagagtcatcaccaccagcacccgaacctgggccctgcccacctacaacaatcacctctacaagcaaatctccaacagcacatctggaggatcttcaaatgacaacgcctacctcgactacagcaccccctgggggtattttgacttcaacagattccactgccacttctcaccacgtgactggcagcggctcatcaacaacaactggggattccggcctaagcgactcaacttcaagctcttcaacattcaggtcaaagaggttacggacaacaatggagtcaagaccatcgccaataaccttaccagcacggtccaggtcttcacggactcagactatcagctcccgtacgtgctcgggtcggctcacgagggctgcctcccgccgttcccagcggacgttttcatgattcctcagtacgggtatctgacgcttaatgatggaagccaggccgtgggtcgttcgtccttttactgcctggaatatttcccgtcgcaaatgctaagaacgggtaacaacttccagttcagctacgagtttgagaacgtacctttccatagcagctacgctcacagccaaagcctggaccgactaatgaatccactcatcgaccaatacttgtactatctctcaaagactattaacggttctggacagaatcaacaaacgctaaaattcagtgtggccggacccagcaacatggctgtccagggaagaaactacatacctggacccagctaccgacaacaacgtgtctcaaccactgtgactcaaaacaacaacagcgaatttgcttggcctggagcttcttcttgggctctcaatggacgtaatagcttgatgaatcctggacctgctatggccagccacaaagaaggagaggaccgtttctttcctttgtctggatctttaatttttggcaaacaaggaactggaagagacaacgtggatgcggacaaagtcatgataaccaacgaagaagaaattaaaactactaacccggtagcaacggagtcctatggacaagtggccacaaaccaccagagtgcccaagcacaggcgcagaccggctgggttcaaaaccaaggaatacttccgggtatggtttggcagggcagagatgtgtacctgcaaggacccatttgggccaaaattcctcacacggacggcaactttcacccttctccgctgatgggagggtttggaatgaagcacccgcctcctcagatcctcatcaaaaacacacctgtacctgcggatcctccaacggccttcaacaaggacaagctgaactctttcatcacccagtattctactggccaagtcagcgtggagatcgagtgggagctgcagaaggaaaacagcaagcgctggaacccggagatccagtacacttccaactattacaagtctaataatgttgaatttgctgttaatactgaaggtgtatatagtgaaccccgccccattggcaccagatacctgactcgtaatctg

SEQ ID NO: 636 - DNA, 2208 bp, synthetic construct; identical to SEQ ID NO: 633
  misc_feature 1..2208: note = Description of Artificial Sequence: Synthetic polynucleotide
  source 1..2208: mol_type = other DNA

SEQ ID NO: 637 - DNA, 2208 bp, synthetic construct
  misc_feature 1..2208: note = Description of Artificial Sequence: Synthetic polynucleotide
  source 1..2208: mol_type = other DNA
atggctgccgatggttatcctccagattggctcgaggacaaccttagtgaaggaattcgcgagtggtgggctttgaaacctggagcccctcaacccaaggcaaatcaacaacatcaagacaacgctcgaggtcttgtgcttccgggttacaaataccttggacccggcaacggactcgacaagggggagccggtcaacgcagcagacgcggcggccctcgagcacgacaaggcctacgaccagcagctcaaggccggggacaacccgcacctcaagtacaaccacgccgacgccgagttccaggagcggctcaaagaagatacgtcttttgggggcaacctcgggcgagcagtcttccaggccaaaaagaggcttcttgaacctcttggtctggttgaggaagcggctaagacggctcctggaaagaagaggcccgtagagcagtctcctcaggaaccggactcctccgcgggtattggcaaatcgggtgcacagcccgctaagaagagactcaatttcggtcagactggcgacactgagtcagtcccagaccctcaaccaatcggagaacctcccgcagccccctcaggtgtgggatctcttacaatggcttcaggtggtggcgcaccagtggcagacaataacgaaggtgccgatggagtgggtagttcctcgggaaattggcattgcgattcccaatggctgggggacagagtcatcaccaccagcacccgaacctgggccctgcccacctacaacaatcacctctacaagcaaatctccaacagcacatctggaggatcttcaaatgacaacgcctacttcggctacagcaccccctgggggtattttgacttcaacagattccactgccacttctcaccacgtgactggcagcgactcatcaacaacaactggggattccggcctaagcgactcaacttcaagctcttcaacattcaggtcaaagaggttacggacaacaatggagtcaagaccatcgccaataaccttaccagcacggtccaggtcttcacggactcagactatcagctcccgtacgtgctcgggtcggctcacgagggctgcctcccgccgttcccagcggacgttttcatgattcctcagtacgggtatctgacgcttaatgatggaagccaggccgtgggtcgttcgtccttttactgcctggaatatttcccgtcgcaaatgctaagaacgggtaacaacttccagttcagctacgagtttgagaacgtacctttccatagcagctacgctcacagccaaagcctggaccgactaatgaatccactcatcgaccaatacttgtactatctctcaaagactattaacggttctggacagaatcaacaaacgctaaaattcagtgtggccggacccagcaacatggctgtccagggaagaaactacatacctggacccagctaccgacaacaacgtgtctcaaccactgtgactcaaaacaacaacagcgaatttgcttggcctggagcttcttcttgggctctcaatggacgtaatagcttgatgaatcctggacctgctatggccagccacaaagaaggagaggaccgtttctttcctttgtctggatctttaatttttggcaaacaaggaactggaagagacaacgtggatgcggacaaagtcatgataaccaacgaagaagaaattaaaactactaacccggtagcaacggagtcctatggacaagtggccacaaaccaccagagtgcccaagcacaggcgcagaccggctgggttcaaaaccaaggaatacttccgggtatggtttggcaggacagagatgtgtacctgcaaggacccatttgggccaaaattcctcacacggacggcaactttcacccttctccgctgatgggagggtttggagtgaagcacccgcctcctcagatcctcatcaaaaacacacctgtacctgcggatcctccaacggccttcaacaaggacaggctgaactctttcatcacccagtattctactggccaagtcagcgtggagatcgagtgggagctgcagaaggaaaacagcaagcgctggaacccggagatccagtacacttccaactattacaagtctaataatgttgaatttgctgttaatactgaaggtgtatatagtgaaccccgccccattggcaccagatacctgactcgtaatctg

SEQ ID NO: 638 - DNA, 2208 bp, synthetic construct
  misc_feature 1..2208: note = Description of Artificial Sequence: Synthetic polynucleotide
  source 1..2208: mol_type = other DNA
atggctgccgatggttatcttccagattggctcgaggacaaccttagtgaaggaattcgcgagtggtgggctttgaaacctggagcccctcaacccaaggcaaatcaacaacatcaagacaacgctcgaggtcttgtgcttccgggttacaaataccttggacccggcaacggactcgacaagggggagccggtcaacgcagcagacgcggcggccctcgagcacgacaaggcctacgaccagcagctcaaggccggagacaacccgtacctcaagtacaaccacgccgacgccgagttccaggagcggctcaaagaagatacgtcttttgggggcaacctcgggcgagcagtcttccaggccaaaaagaggcttcttgaacctcttggtctggttgaggaagcggctaagacggctcctggaaagaagaggcctgtagagcagtctcctcaggaaccggactcctccgcgggtattggcaaatcgggtgcacagcccgctaaaaagagactcaatttcggtcagactggcgacacagagtcagtcccagaccctcaaccaatcggagaacctcccgcagccccctcaggtgtgggatctcttacaatggcttcaggtggtggcgcaccagtggcggacaataacgaaggtgccgatggagtgggtagttcctcgggaaattggcattgcgattcccaatggctgggggacagagtcatcaccaccagcacccgaacctgggccctgcccacctacaacaatcacctctacaagcaaatctccaacagcacatctggaggatcttcaaatgacaacgcctacttcggctacagcaccccctgggggtattttgacttcaacagattccactgccacttctcaccacgtgactggcagcgactcatcaacaacaactggggattccggcctaagcgactcaacttcaagctcttcaacattcaggtcaaagaggttacggacaacaatggagtcaagaccatcgccaataaccttaccagcacggtccaggtcttcacggactcagactatcagctcccgtacgtgctcgggtcggctcacgagggctgcctcccgccgttcccagcggacgttttcatgattcctcagtacgggtatctgacgcttaatgatggaagccaggccgtgggtcgttcgtccttttactgcctggaatatttcccgtcgcaaatgctaagaacgggtaacaacttccagttcagctacgagtttgagaacgtacctttccatagcagctacgctcacagccaaagcctggaccgactaatgaatccactcatcgaccaatacttgtactatctctcaaagactattaacggttctggacagaatcaacaaacgctaaaattcagtgtggccggacccagcaacatggctgtccagggaagaaactacatacctggacccagctaccgacaacaacgtgtctcaaccactgtgactcaaaacaacaacagcgaatttgcttggcctggagcttcttcttgggctctcaatggacgtaatagtttgatgaatcctggacctgctatggccagccacaaagaaggagaggaccgtttctttcctttgtctggatctttaatttttggcaaacaaggaactggaagagacaacgtggatgcggacaaagtcatgataaccaacgaagaagaaattaaaactactaacccggtagcaacggagtcctatggacaagtggccacaaaccaccagagtgcccaagcacaggcgcagaccggctgggttcaaaaccaaggaatacttccgggtatggtttggcaggacagagatgtgtacctgcaaggacccatttgggccaaaattcctcacacggacggcaactttcacccttctccgctgatgggagggtttggagtgaagcacccgcctcctcagatcctcatcaaaaacacacctgtacctgcggatcctccaacggccttcaacaaggacaagctgaactctttcatcacccagtattctactggccaagtcagcgtggagatcgagtgggagctgcagaaggaaaacagcaagcgctggaacccggagatccagtacacttccaactattacaagtctaataatgttgaatttgctgttaatactgaaggtgtatatagtgaaccccgccccattggcaccagatacctgactcgtaatctg

SEQ ID NO: 639 - DNA, 2208 bp, synthetic construct
  misc_feature 1..2208: note = Description of Artificial Sequence: Synthetic polynucleotide
  source 1..2208: mol_type = other DNA
atggctgccgatggttatcttccagattggctcgaggacaaccttagtgaaggaattcgcgagtggtgggctttgaaacctggagcccctcaacccaaggcaaatcaacaacatcaagacaacgctcgaggtcttgtgcttccgggttacaaataccttggacccggcaacggactcgacaagggggagccggtcaacgcagcagacgcggcggccctcgagcacgacaaggcctacgaccagcagctcaaggccggagacaacccgtacctcaagtacaaccacgccgacgccgagttccaggagcggctcaaagaagatacgtcttttgggggcaacctcgggcgagcagtcttccaggccaaaaagaggcttcttgaacctcttggtctggttgaggaagcggctaagacggctcctggaaagaagaggcctgtagagcagtctcctcaggaaccggactcctccgcgggtattggcaaatcgggtgcacagcccgctaaaaagagactcaatttcggtcagactggcgacacagagtcagtcccagaccctcaaccaatcggagaacctcccgcagccccctcaggtgtgggatctcttacaatggcttcaggtggtggcgcaccagtggcagacaataacgaaggtgccgatggagtgggtagttcctcgggaaattggcattgcgattcccaatggctgggggacagagtcatcaccaccagcacccgaacctgggccctgcccacttacaacaatcacctctacaagcaaatctccaacagcacatctggaggatcttcaaatgacaacgcctacttcggctacagcaccccctgggggtattttgacttcaacagattccactgccacttctcaccacgtgactggcagcgactcaccaacaacaactggggattccggcctaagcgactcaacttcaagctcttcaacattcaggtcaaagaggttacggacaacaatggagtcaagaccatcgccaataaccttaccagcacggtccaggtcttcacggactcagactatcagctcccgtacgtgctcgggtcggctcacgagggctgcctcccgccgttcccagcggacgttttcatgattcctcagtacgggtatctgacgcttaatgatggaagccaggccgtgggtcgttcgtccttttactgcctggaatatatcccgtcgcaaatgctaagaacgggtaacaacttccagttcagctacgagtttgagaacgtacctttccatagcagctacgctcacagccaaagcctggaccgactaatgaatccactcatcgaccaatacttgtactatctctcaaagactattaacggttctggacagaatcaacaaacgctaaaattcagtgtggccggacccagcaacatggctgtccagggaagaaactacatacctggacccagctaccgacaacaacgtgtctcaaccactgtgactcaaaacaacaacagcgaatttgcttggcctggagcttcttcttgggctctcaatggacgtaatagcttgatgaatcctggacctgctatggccagccacaaagaaggagaggaccgtttctttcctttgtctggatctttaatttttggcaaacaaggaactggaagagacaacgtggatgcggacaaagtcatgataaccaacgaagaagaaattaaaactactaacccggtagcaacggagtcctatggacaagtggccacaaaccaccagagtgcccaagcacaggcgcagaccggctgggttcaaaaccaaggaatacttccgggtatggtttggcaggacagagatgtgtacctgcaaggacccatttgggccaaaattcctcacacggacggcaactttcacccttctccgctgatgggagggtttggagtgaagcacccgcctcctcagatcctcatcaaaaacacacctgtacctgcggatcctccaacggccttcaacaaggacaagctgaactctttcatcacccagtattctactggccaagtcagcgtggagatcgagtgggagctgcagaaggaaaacagcaagcgctggaacccggagatccagtacacttccaactattacaagtctaataatgttgaatttgctgttaatactgaaggtgtatatagtgaaccccgccccattggcaccagatacctgactcgtaatctg

SEQ ID NO: 640 - DNA, 2208 bp, synthetic construct
  misc_feature 1..2208: note = Description of Artificial Sequence: Synthetic polynucleotide
  source 1..2208: mol_type = other DNA
atggctgccgatggttatcttccagattggctcgaggacaaccttagtgaaggaattcgcgagtggtgggctttgaaacctggagcccctcaacccaaggcaaatcaacaacatcaagacaacgctcgaggtcttgtgcttccgggttacaaataccttggacccggcaacggactcgacaagggggagccggtcaacgcagcagacgcggcggccctcgagcacgacaaggcctacgaccagcagctcaaggccggagacaacccgtacctcaagtacaaccacgccgacgccgagttccaggagcggctcaaagaagatacgtcttttgggggcaacctcgggcgagcagtcttccaggccaaaaagaggcttcttgaacctcttggtctggttgaggaagcggctaagacggctcctggaaagaagaggcctgtagagcagtctcctcaggaaccggactcctccgcgggtattggcaaatcgggtgcacagcccgctaaaaagagactcaatttcggtcagactggcgacacagagtcagtcccagaccctcaaccaatcggagaacctcccgcagccccctcaggtgtgggatctcttacaatggcttcaggtggtggcgcaccagtggcagacaataacgaaggtgccgatggagtgggtagttcctcgggaaattggcattgcgattcccaatggctgggggacagagtcatcaccaccagcacccgaacctgggccctgcccacctacaacaatcacctctacaagcaaatctccaacagcacatctggaggatcttcaaatgacaacgcctacttcggctacagcaccccctgggggtattttgacttcaacagattccactgccacttctcaccacgtgactggcagcgactcatcaacaacaactggggattccggcctaagcgactcaacttcaagctcttcaacattcaggtcaaagaggttacggacaacaatggagtcaagaccatcgccaataaccttaccagcacggtccaggtcttcacggactcagactatcagctcccgtacgtgctcgggtcggctcacgagggctgcctcccgccgttcccagcggacgttttcatgattcctcagtacgggtatctgacgcttaatgatggaagccaggccgtgggtcgttcgtccttttactgcctggaatatttcccgtcgcaaatgctaagaacgggtaacaacttccagtttagctacgagtttgagaacgtacctttccatagcagctacgctcacagccaaagcctggaccgactaatgaatccactcatcgaccaatacttgtactatctctcaaagactattaacggttctggacagaatcaacaaacgctaaaattcagtgtggccggacccagcaacatggctgtccagggaagaaactacatacctggacccagctaccgacaacaacgtgtctcaaccactgtgactcaaaacaacaacagcgaatttgcttggcctggagcttcttcttgggctctcaatggacgtaatagcttgatgaatcctggacctgctatggccagccacaaagaaggagaggaccgtttctttcctttgtctggatctttaatttctggcaaacaaggaactggaagagacaacgtggatgcgaacaaagtcatgataaccaacgaagaagaaattaaaactactaacccggtagcaacggagtcctatggacaagtggccacaaaccaccagagtgcccaagcacaggcgcagaccggctgggttcaaaaccaaggaatacttccgggtatggtttggcaggacagagatgtgtacctgcaaggacccatttgggccaaaattcctcacacggacggcaactttcacccttctccgctgatgggagggtttgaaatgaagcacccgcctcctcagatcctcatcaaaaacacacctgtacctgcggatcctccaacggccttcaacaaggacaagctgaactctttcatcacccagtattctactggccaagtcagcgtggagatcgagtgggagctgcagaaggaaaacagcaagcgctggaacccggagatccagtacacttccaactattacaagtctaataatgttgaatttgctgttaatactgaaggtgtatatagtgaaccccgccccattggcaccagatacctgactcgtaatctg

SEQ ID NO: 641 - DNA, 2208 bp, synthetic construct
  misc_feature 1..2208: note = Description of Artificial Sequence: Synthetic polynucleotide
  source 1..2208: mol_type = other DNA
atggctgccgatggttatcttccagattggctcgaggacaaccttagtgaaggaattcgcgagtggtgggctttgaaacctggagcccctcaacccaaggcaaatcaacaacatcaagacaacgctcgaggtcttgtgcttccgggttacaaataccttggacccggcaacggactcgacaagggggagccggtcaacgcagcagacgcggcggccctcgagcacgacaaggcctacgaccagcagctcaaggccggagacaacccgtacctcaagtacaaccacgccgacgccgagttccaggagcggctcaaagaagatacgtcttttgggggcaacctcgggcgagcagtcttccaggccaaaaagaggcttcttgaacctcttggtctggttgaggaagcggctaagacggctcctggaaagaagaggcctgtagagcagtctcctcaggaaccggactcctccgcgggtattggcaaatcgggtgcacagcccgctaaaaagagactcaatttcggtcagactggcgacacagagtcagtcccagaccctcaaccaatcggagaacctcccgcagccccctcaggtgtgggatctcttacaatagcttcaggtggtggcgcaccagtggcagacaataacgaaggtgccgatggagtgggtagttcctcgggaaattggcattgcgattcccaatggctgggggacagagtcatcaccaccagcacccgaacctgggccctgcccacctacaacaatcacctctacaagcgaatctccaacagcacatctggaggatcttcaaatgacaacgcctacttcggctacagcaccccctgggggtattttgacttcaacagattccactgccacttctcaccacgtgactggcagcgactcatcaacaacaactggggattccggcctaagcgactcaacttcaagcttttcaacattcgggtcaaagaggttacggacaacaatggagtcaagaccatcaccaataaccttaccagcacggtccaggtcttcacggactcagactatcagctcccgtacgtgcttgggtcggctcacgagggctgcctcccgccgttcccagcggacgttttcatgattcctcagtacgggtatctgacgcttaatgatggaagccaggccgtgggtcgttcgtccttttactgcctggaatatttcccgtcgcaaatgctaagaacgggtaacaacttccagttcagctacgagtttgagaacgtacctttccatagcagctacgctcacagccaaagcctggaccgactaatgaatccactcatcgaccaatacttgtactatctctcaaagactattaacggttctggacagaatcaacaaacgctaaaattcagtgtggccggacccagcaacatggctgtccagggaagaaactacatacctggacccagctaccgacaacaacgtgtctcaaccactgtgactcgaaacaacaacagcgaatttgcttggcctggagcttcttcttgggctctcaatggacgtaatagcttgatgaatcctggacctgctatggccagccacaaagaaggagaggaccgtttctttcctttgtctggatctttaatttttggcaaacaaggaactggaagagacaacgtggatgcggacaaagtcatgataaccaacgaagaagaaattaaaactactaacccggtagcaacggagtcctatggacaagtggccacaaaccaccagagtgcccaagcacaggcgcagaccggctgggttcaaaaccaaggaatacttccgggtatggtttggcaggacagagatgtgtacctgcaaggacccatttgggccaaaattcctcacacggacggcaactttcacccttctccgctgatgggagggtttggagtgaagcacccgcctcctcagatcctcatcaaaaacacacctgtacctgcggatcctccaacggccttcaacaaggacaagctgaactctttcatcacccagtattctactggccaagtcagcgtggagatcgagtgggagctgcagaaggaaaacagcaagcgctggaacccggagatccagtacacttccaactattacaagtctaataatgttgaatttgctgttaatactgaaggtgtatatagtgaaccccgccccattggcaccagatacctgactcgtaatctg

SEQ ID NO: 642 - DNA, 2208 bp, synthetic construct
  misc_feature 1..2208: note = Description of Artificial Sequence: Synthetic polynucleotide
  source 1..2208: mol_type = other DNA
atggctgccgatggttatcttccagattggctcgaggacaaccttagtgaaggaattcgcgagtggtgggctttgaaacctggagcccctcaacccaaggcaaatcaacaacatcaagacaacgctcgaggtcttgtgcttccgggttacaaataccttggacccggcaacggactcgacaagggggagccggtcaacgcagcagacgcggcggccctcgagcacgacaaggcctacgaccagcagctcaaggccggagacaacccgtacctcaagtacaaccacgccgacgccgagttccaggagcggctcaaagaagatacgtcttttgggggcaacctcgggcgagcagtcttccaggccaaaaagaggcttcttgaacctcttggtctggttgaggaagcggctaagacggctcctggaaagaagaggcctgtagagcagtctcctcaggaaccggactcctccgcgggtattggcaaatcgggcgcacagcccgctaaaaagagactcaatttcggtcagactggcgacacagagccagtcccagaccctcaaccaatcggagaacctcccgcagccccctcaggtgtgggatctcttacaatggcttcaggtggtggcgcaccagtggcagacaataacgaaggtgccgatggagtgggtagttcctcgggaaattggcattgcgattcccaatggctgggggacagagtcatcaccaccagcacccgaacctgggccctgcccacctacaacaatcacctctacaagcaaatctccaacagcacatctggaggatcttcaaatgacaacgcctacttcggctacagcaccccctgggggtattttgacttcaacagattccactgccacttctcaccacgtgactggcagcgactcatcaacaacaactggggattccggcctaagcgactcaacttcaagctcttcaacattcaggtcaaagaggttacggacaacaatggagtcaagaccatcgccaataaccttaccagcacggtccaggtcttcacggactcagactatcagctcccgtacgtgctcgggtcggctcacgagggctgcctcccgccgttcccagcgggcgttttcatgattcctcagtacgggtatctgacgcttaatgatggaagccaggccgtgggtcgttcgtccttttactgcctggaatatttcccgtcgcaaatgctaagaacgggtaacaacttccagttcagctacgagtttgagaacgtacctttccatagcagctacgctcacagccaaagcctggaccgactaatgaatccactcatcgaccaatacttgtactatctctcaaagactattaacggttctggacagaatcaacaaacgctaaaattcagtgtggccggacccagcaacatggctgtccagggaagaaactacatacctggacccagctaccgacaacaacgtgtctcaaccactgcgactcaaaacaacaacagcgaatttgcttggcctggagcttcttcttgggctctcaatggacgtaatagcttgatgaatcctggacctgctatggccagccacaaagaaggagaggaccgtttctttcctttgtctggatctttaatttttggcaaacaaggaactggaagagacaacgtggatgcggacaaagtcatgataaccaacgaagaagaaattaaaactactaacccggtagcaacggagtcctatggacaagtggccacaaaccaccagagtgcccaagcacaggcgcagaccggctgggttcaaaaccaaggaatacttccgggtatggtttggcaggacagagatgtgtacctgcaaggacccatttgggccaaaattcctcacacggacggcaactttcacccttctccgctgatgggagggtttggaatgaagcacccgcctcctcagatcctcatcaaaaacacacctgtacctgcggatcctccaacggccttcaacaaggacaagctgaactctttcatcacccagtattctactggccaagtcagcgtggagatcgagtgggagctgcagaaggaaaacagcaagcgctggaacccggagatccagtacacttccaactattacaagtctaataatgttgaatttgctgttaatactgaaggtgtatatagtgaaccccgccccattggcaccagatacctgactcgtaatctg

SEQ ID NO: 643 - DNA, 2208 bp, synthetic construct
  misc_feature 1..2208: note = Description of Artificial Sequence: Synthetic polynucleotide
  source 1..2208: mol_type = other DNA
atggctgccgatggttatcttccagattggctcgaggacaaccttagtgaaggaattcgcgagtggtgggctttgaaacctggagcccctcaacccaaggcaaatcaacaacatcaagacaacgctcgaggtcttgtgcttccgggttacaaataccttggacccggcaacggactcgacaagggggagccggtcaacgcagcagacgcggcggccctcgagcacgacaaggcctacgaccagcagctcaaggccggagacaacccgtacctcaagtacaaccacgccgacgccgggttccaggagcggctcaaagaagatacgtcttttgggggcaacctcgggcgagcagtcttccaggccaaaaagaggcttcttgaacctcttggtctggttgaggaagcggctaagacggctcctggaaagaagaggcctgtagagcagtctcctcaggaaccggactcctccgcgggtattggcaaatcgggtgcacagcccgctaaaaagagactcaatttcggtcagactggcgacacagagtcagtcccagtccctcaaccaatcggagaacctcccgcagccccctcaggtgtgggatctcttacaatggcttcaggtggtggcgcaccagtggcagacaataacgaaggtgccgatggagtgggtagttcctcgggaaattggcattgcgattcccaatggctgggggacagagtcatcaccaccagcacccgaacctgggccctgcccacctacaacaatcacctctacaagcaaatctccaacagcacatctggaggatcttcaaatgacaacgcctacttcggctacagcaccccctgggggtattttgacttcaacagattccactgccacttctcaccacgtgactggcagcgactcatcaacaacaactggggattccggcctaagcgactcaacttcaagctcttcaacattcaggtcaaagaggttacggacaacaatggagtcaagaccatcgccaataaccttaccagcacggtccaggtcttcacggactcagactatcagctcccgtacgtgctcgggtcggctcacgagggctgcctcccgccgttcccagcggacgttttcatgattcctcagtacgggtatctgacgcttaatgatggaagccaggccgtgggtcgttcgtccttttactgcctggaatatttcccgtcgcaaatgctaagaacgggtaacaacttccagttcagctacgagtttgagaacgtacctttccatagcagctacgctcacagccaaagcctggaccgactaatgaatccactcatcgaccaatacttgtactatctctcaaagactattaacggttctggacagaatcaacaaacgctaaaattcagtgtggccggacccagcaacatggctgtccagggaagaaactacatacctggacccagctaccgacaacaacgtgtctcaaccactgtgactcaaaacaacaacagcgaatttgcttggcctggagcttcttcttgggctctcaatggacgtaatagcttgatgaatcctggacctgctatggccagccacaaagaaggagaggaccgtttctttcctttgtctggatctttaatttttggcaaacaaggagctggaagagacaacgtggatgcggacaaagtcatgataaccaacgaagaagaaattaaaactactaacccggtagcaacggagtcctatggacaagtggccacaaaccaccagagtgcccaagcacaggcgcagaccggctgggttcaaaaccaaggaatacttccgggtatggtttggcaggacagagatgtgtacctgcaaggacccatttgggccaaaattcctcacacggacggcaactttcacccttctccgctgatgggagggtttggaatgaagcacccgcctcctcagatcctcatcaaaaacacacctgtacctgcggatcctccaacggccttcaacaaggacaagctgaactctttcatcacccagtattctactggccaagtcagcgtggagatcgagtgggagctgcagaaggaaaacagcaagcgctggaacccggagatccagtacacttccaactattacaagtctaataatgttgaatttgctgttaatactgaaggtgtatatagtgaaccccgccccattggcaccagatacctgactcgtaatctg

SEQ ID NO: 644 - DNA, 2208 bp, synthetic construct
  misc_feature 1..2208: note = Description of Artificial Sequence: Synthetic polynucleotide
  variation 377: note = n is a, c, t, or g
  source 1..2208: mol_type = other DNA
atggctgccgatggttatcttccagattggctcgaggacaaccttagtgaaggaattcgcgagaggtgggctttgaaacctggagcccctcaacccaaggcaaatcaacaacatcaagacaacgctcgaggtcttgtgcttccgggttacaaataccttggacccggcaacggactcgacaagggggagccggtcaacgcagcagacgcggcggccctcgagcacgacaaggcctacgaccagcagctcaaggccggagacaacccgtacctcaagtacaaccacgccgacgccgagttccaggagcggctcaaagaagatacgtcttttgggggcaacctcgggcgagcagtcttccaggccaaaaagaggcttcntgaacctcttggtctggttgaggaagcggctaagacggctcctggaaagaagaggcctgtagagcagtctcctcaggaaccggactcctccgcgggtattggcaaatcgggtgcacagcccgctaaaaagagactcaatttcggtcagactggcgacacagagtcagtcccagaccctcaaccaatcggagaacctcccgcagccccctcaggtgtgggatctcttacaatggcttcaggtggtggcgcaccagtggcagacaataacgaaggtgccgatggagtgggtagttcctcggggaattggcattgcgattcccaatggctgggggacagagtcatcaccaccagcacccgaacctgggccctgcccacctacaacaatcacctctacaagcaaatctccaacagcacatctggaggatcttcaaatgacaacgcctacttcggctacagcaccccctgggggtattttgacttcaacagattccactgccacttctcaccacgtgactggcagcgactcatcaacaacaactggggattccggcctaagcgactcaacttcaagctcttcaacattcaggtcaaagaggttacggacaacaatggagtcaagaccatcgccaataaccttaccagcacggtccaggtcttcacggactcagactatcagctcccgtacgtgctcgggtcggctcacgagggctgcctcccgccgttcccagcggacgttttcatgattcctcagtacgggtatctgacgcttaatgatggaagccaggccgtgggtcgttcgtccttttactgcctggaatatttcccgtcgcaaatgctaagaacgggtaacaacttccagttcagctacgagtttgagaacgtacctttccatagcagctacgctcacagccaaagcccggaccgactaatgaatccactcatcgaccaatacttgtactatctctcaaagactattaacggttctggacagaatcaacaaacgctaaaattcagtgtggccggacccagcaacatggctgtccagggaagaaactacatacctggacccagctaccgacaacaacgtgtctcaaccactgtgactcaaaacaacaacagcgaatttgcttggcctggagcttcttcttgggctctcaatggacgtaatagcttgatgaatcctggacctgctatggccagccacaaagaaggagaggaccgtttctttcctttgtctggatctttaatttttggcaaacaaggaactggaagagacaacgtggatgcggacaaagtcatgataaccaacgaagaagaaattaaaactactaacccggtagcaacggagtcctatggacaagtggccacaaaccaccagagtgcccaagcacaggcgcagaccggctgggttcaaaaccaaggaatacttccgggtatggtttggcaggacagagatgtgtacctgcaaggacccatttgggccaaaattcctcacacggacggcaactttcacccttctccgctgatgggagggtttggagtgaagcacccgcctcctcagatcctcatcaaaaacacacctgtacctgcggatcctccaacggccttcaacaaggacaagctgaactctttcatcacccagtattctactggccaagtcagcgtggagatcgagtgggagctgcagaaggaaaacagcaagcgctggaacccggagatccagtacacttccaactattacaagtctaataatgttgaatttgctgttaatactgaaggtgtatatagtgaaccccgccccattggcaccagatacctgactcgtaatctg

SEQ ID NO: 645 - DNA, 2208 bp, synthetic construct
  misc_feature 1..2208: note = Description of Artificial Sequence: Synthetic polynucleotide
  source 1..2208: mol_type = other DNA
atggctgccgatggttatcttccagattggctcgaggacaaccttagtgaaggaattcgcgagtggtgggctttgaaacctggagcccctcaacccaaggcaaatcaacaacatcaagacaacgctcgaggtcttgtgcttccgggttacaaataccttggacccggcaacggactcgacaagggggagccggtcaacgcagcagacgcggcggccctcgagcacgacaaggcctacgaccagcagctcaaggccggagacaacccgtacctcaagtacaaccacgccgacgccgagttccaggagcggctcaaagaagatacgtcttttgggggcaacctcgggcgagcagtcttccaggccaaaaagaggcttcttgaacctcttggtctggttgaggaagcggctaagacggctcctggaaagaagaggcctgtagagcagtctcctcaggaaccggactcctccgcgggtattggcaaatcgggtgcacagcccgctaaaaagagactcaatttcggtcagactggcgacacagagtcagtcccagaccctcaaccaatcggagaacctcccgcagccccctcaggtgtgggatctcttacaatggcttcaggtggtggcgcaccagtggcagacaataacgaaggtgccgatggagtgggtagttcctcgggaaattggcattgcgattcccaatggctgggggacagagtcatcaccaccagcacccgaacctgggccctgcccacctacaacaatcacctctacaagcaaatctccaacagcacatctggaggatcttcaaatgacaacgcctacctcggctacagcaccccctgggggtattttgacttcaacagattccactgccacttctcaccacgtgactggcagcgactcatcaacaacaactggggattccggcctaagcgactcaacttcaagctcttcaacattcaggtcaaagaggttacggacaacaatggagtcaagaccatcgccaataaccttaccagcacggtccaggtcttcacggactcagactatcagctcccgtacgtgctcgggtcggctcacgagggctgcctcccgccgttcccagcggacgttttcatgattcctcagtacgggtatctgacgcttaatgatggaagccaggccgtgggtcgttcgtccttttactgcctggaatatttcccgtcgcaaatgctaagaacgggtaacaacttccagttcagctacgagtttgagaacgtacctttccatagcagctacgctcacagccaaagcctggaccgactaatgaatccactcatcgaccaatacttgtactatctctcaaagactattaacggttctggacagaatcaacaaacgctaaaattcagtgtggccggacccagcaacatggctgtccagggaagaaactacatacctggacccagctaccgacaacaacgtgtctcaaccactgtgactcaaaacaacaacagcgaatttgcttggcctggagcttcttcttgggctctcaatggacgtaatagcttgatgaatcctggacctgctatggccagccacaaagaaggagaggaccgtttctttcctttgtctggatctttaatttttggcaaacaaggaactggaagagacaacgtggatgcggacaaagtcatgataaccaacgaagaagaaattaaaactactaacccggtagcaacggagtcctatggacaagtggccacaaaccaccagagtgcccaagcacaggcgcagaccggctgggttcaaaaccaaggaatacttccgggtatggtttggcaggacagagatgtgtacctgcaaggacccatttgggccaaaattcctcacacggacggcaactttcacccttctccgctgatgggagggtttggaatgaagcacccgcctcctcagatcctcatcaaaaacacacctgtacctgcggatcctccaacggccttcaacaaggacaagctgaactctttcatcacccagtattctactggccaagtcagcgtggagatcgagtgggagctgcagaaggaaaacagcaagcgctggaacccggagatccagtacacttccaactattacaagtctaataatgttgaatttgctgttaatactgaaggtgtatatagtgaaccccgccccattggcaccagatacctgactcgtaatctg

SEQ ID NO: 646 - DNA, 2208 bp, synthetic construct
  misc_feature 1..2208: note = Description of Artificial Sequence: Synthetic polynucleotide
  source 1..2208: mol_type = other DNA
atggctgccgatggttatcttccagattggctcgaggacaaccttagtgaaggaattcgcgagtggtgggctttgaaacctggagcccctcaacccaaggcaaatcaacaacatcaagacaacgctcgaggtcttgtgcttccgggttacaaataccttggacccggcaacggactcgacaagggggagccggtcaacgcagcagacgcggcggccctcgagcacgacaaggcctacgaccagcagctcaaggccggagacaacccgtacctcaagtacaaccacgccgacgccgagttccaggagcggctcaaagaagatacgtcttttgggggcaacctcgggcgagcagtcttccaggccaaaaagaggcttcttgaacctcttggtctggttgaggaagcggctaagacggctcctggaaagaagaggcctgtagagcagtctcctcaggaaccggactcctccgcgggtattggcaaatcgggtgcacagcccgctaaaaagagactcaatttcggtcagactggcgacacagagtcagtcccagaccctcaaccaatcggagaacctcccgcagccccctcaggtgtgggatctcttacaatggcttcaggtggtggcgcaccagtggcagacaataacgaaggtgccgatggagtgggtagttcctcgggaaattggcattgcgattcccaatggctgggggacagagtcatcaccaccagcacccgaacctgggccctgcccacctacaacaatcacctctacaagcaaatctccaacagcacatctggaggatcttcaaatgacaacgcctacttcggctacagcaccccctgggggtattttgacttcaacagattccactgccacttctcaccacgtgactggcagcgactcatcaacaacaactggggattccggcctaagcgactcaacttcaagctcttcaacattcaggtcaaagaggttacggacaacaatggagtcaagaccatcgccaataaccttaccagcacggtccaggtcttcacggactcagactatcagctcccgtacgtgctcgggtcggctcacgagggctgcctcccgccgttcccagcggacgttttcatgattcctcagtacgggtatctgacgcttaatgatggaagccaggccgtgggtcgttcgtccttttactgcctggaatatttcccgtcgcaaatgctaagaacgggtaacaacttccagttcagctacgagtttgagaacgtacctttccatagcagctacgctcacagccagagcctggaccgactaatgaatccactcatcgaccaatacttgtactatctctcaaagactattaacggttctggacagaatcaacaaacgctaaaattcagtgtggccggacccagcaacatggctgtccagggaagaaactacatacctggacccagctaccgacaacaacgtgtctcaaccactgtgactcaaaacaacaacagcgaatttgcttggcctggagcttcttcttgggctctcaatggacgtaatagcttgatgaatcctggacctgctatggccagccacaaagaaggagaggaccgtttctttcctttgtctggatctttaatttttggcaaacaaggaactggaagagacaacgtggatgcggacaaagtcatgataaccaacgaagaagaaattaaaactactaacccggtagcaacggagtcctatggacaagtggccacaaaccaccagagtgcccaagcacaggcgcagaccggctgggttcaaaaccaaggaatacttccgggtatggtttggcaggacagagatgtgtacctgcaaggacccatttgggccaaaattcctcacacggacggcaactttcacccttctccgctgatgggagggtttggaatgaagcacccgcctcctcagatcctcatcaaaaacacacctgtacctgcggatcctccaacggccttcaacaaggacaagctggactctttcatcacccagtattctactggccaagtcagcgtggagatcgagtgggagctgcagaaggaaaacagcaagcgctggaacccggtgatccagtacacttccaactattacaagtctaataatgttgaatttgctgttaatactgaaggtgtatatagtgaaccccgccccattggcaccagatacctgactcgtaatctg

SEQ ID NO: 647 - DNA, 2208 bp, synthetic construct
  misc_feature 1..2208: note = Description of Artificial Sequence: Synthetic polynucleotide
  source 1..2208: mol_type = other DNA
atggctgccgatggttatcttccagattggctcgaggacaacctctctgagggcattcgcgagtggtgggacttgaaacctggagccccgaagcccaaagccaaccagcaaaagcaggacgacggccggggtctggtgcttcctggctacaagtacctcggacccttcaacggactcgacaagggggagcccgtcaacgcggcggacgcagcggccctcgagcacgacaaggcctacgaccagcagctcaaagcgggtgacaatccgtacctgcggtataaccacgccgacgccgagtttcaggagcgtctgcaagaagatacgtcttttgggggcaacctcgggcgagcagtcttccaggccaagaagcgggttctcgaacctctcggtctggttgaggaaggcgctaagacggctcctggaaagaaacgtccggtagagcagtcgccacaagagccagactcctcctcgggcatcggcaagacaggccagcagcccgctaaaaagagactcaattttggtcagactggcgactcagagtcagtccccgatccacaacctctcggagaacctccagcaacccccgctgctgtggggcctactacaatggcttcaggcggtggcgcaccaatggcagacaataacgaaggcgtcgacggagtgggtaatgcctcaggaaattggcattgcgattccacatggctgggcgacagagtcatcaccaccagcacccgcacctgggccttgcccacctacaataaccacctctacaagcaaatctccagtgcttcaacgggggccagcaacgacaaccactacttcggctacagcaccccctgggggtattttgatttcaacagattccactgccacttttcaccacgtgactggcagcgactcatcaacaacaattggggattccggcccaagagactcaacttcaaactcttcaacatccaagtcaaggaggtcacgacgaatgatggcgttacaaccatcgctaataaccttaccagcacggttcaagtcttctcggactcggagtaccagcttccgtacgtcctcggctctgcgcaccagggctgcctccctccgttcccggcggacgtgttcatgattccgcaatacggctacctgacgctcaacaatggcagccaagccgtgggacgttcatccttttactgcctggaatatttcccttctcagatgctgagaacgggcaacaactttaccttcagctacacctttgaggaagtgcctttccacagcagctacgcgcacagccagagcctggaccggctgatgaatcctctcatcgaccaatacctgtattacctgaacagaactcaaaatcagtccggaagtgcccaaaacaaggacttgctgtttagccgtgggtctccagctggcatgtctgttcagcccaaaaactggctacctggaccctgttatcggcagcagcgcgtttctaaaacaaaaacagacaacaacaacagcaattttacctggactggtgcttcaaaatataacctcaatgggcgtgaatccatcatcaaccctggcactgctatggcctcacacaaagacgacgaagacaagttctttcccatgagcggtgtcatgatttttggaaaagagagcgccggagcttcaaacactgcattggacaatgtcatgattacagacgaagaggaaattaaagccactaaccctgtggccaccgaaagatttgggaccgtggcagtcaatttccagagcagcagcacagaccctgcgaccggagatgtgcatgctatgggagcattacctggcatggtgtggcaagatagagacgtgtacctgcagggtcccatttgggccaaaattcctcacacagatggacactttcacccgtctcctcttatgggcggctttggactcaagaacccgcctcctcagatcctcatcaaaaacacgcctgttcctgcgaatcctccggcggagttttcagccacaaagcttgcttcattcatcacccaatactccacaggacaagtgagtgtggaaattgaatgggagctgcagaaagaaaacagcaagcgctggaatcccgaagtgcagtacacatccaattatgcaaaatctgccaacgttgattttactgtggacaacaatggactttatactgagcctcgccccattggcacccgttaccttacccgtcccctg

SEQ ID NO: 648 - DNA, 2208 bp, synthetic construct
  misc_feature 1..2208: note = Description of Artificial Sequence: Synthetic polynucleotide
  source 1..2208: mol_type = other DNA
atggctgccgatggttatcttccagattggctcgaggacaacctctctgagggcattcgcgagtggtgggacttgaaacctggagccccgaagcccaaagccaaccagcaaaagcaggacgacggccggggtctggtgcttcctggctacaagtacctcggacccttcaacggactcgacaagggggagcccgtcaacgcggcggacgcagcggccctcgagcacgacaaggcctacgaccagcagctcaaagcgggtgacaatccgtacctgcggtataaccacgccgacgccgagtttcaggagcgtctgcaagaagatacgtcttttgggggcaacctcgggcgagcagtcttccaggccaagaagcgggttctcgaacctctcggtctggttgaggaaggcgctaagacggctcctggaaagagacgtccggtagagcagtcgccacaagagccagactcctcctcgggcatcggcaagacaggccagcagcccgctaaaaagagactcaattttggtcagactggcgactcagagtcagtccccgatccacaacctctcggagaacctccagcaacccccgctgctgtgggacctactacaatggcttcaggcggtggcgcaccaatggcagacaataacgaaggcgccgacggagtgggtaatgcctcaggaaattggcattgcgattccacatggctgggcgacagagtcatcaccaccagcacccgcacctgggccttgcccacctacaataaccacctctacaagcaaatctccagtgcttcaacgggggccagcaacgacaaccactacttcggctacagcaccccctgggggtattttgatttcaacagattccactgccacttttcaccacgtgactggcagcgactcatcaacaacaattggggattccggcccaagagactcaacttcaaactcttcaacatccaagtcaaggaggtcacgacgaatgatggcgtcacaaccatcgctaataaccttaccagcacggttcaagtcttctcggactcggagtaccagcttccgtacgtcctcggctctgcgcaccagggctgcctccctccgttcccggcggacgtgttcatgattccgcaatacggctacctgacgctcaacaatggcagccaagccgtgggacgttcatccttttactgcctggaatatttcccttctcagatgctgagaacgggcaacaactttaccttcagctacacctttgaggaagtgcctttccacagcagctacgcgcacagccagagcctggaccggctgatgaatcctctcatcgaccaatacctgtattacctgaacagaactcaaaatcagtccggaagtgcccaaaacaaggacttgctgtttagccgtgggtctccagctggcatgtctgttcagcccaaaaactggctacctggaccctgttatcggcagcagcgcgtttctaaaacaaaaacagacaacaacaacagcaattttacctggactggtgcttcaaaatataacctcaatgggcgtgaatccatcatcaaccctggcactgctatggcctcacacaaagacgacgaagacaagttctttcccatgagcggtgtcatgatttttggaaaagagagcgccggagcttcaaacactgcattggacaatgtcatgattacagacgaagaggaaattaaagccactaaccctgtggccaccgaaagatttgggaccgtggcagtcaatttccagagcagcagcacagaccctgcgaccggagatgtgcatgctatgggagcattacctggcatggtgtggcaagatagagacgtgtacctgcagggtcccatttgggccaaaattcctcacacagatggacactttcacccgtctcctcttatgggcggctttggactcaagaacccgcctcctcagatcctcatcaaaaacacgcctgttcctgcgaatcctccggcggagttttcagctacaaagtttgcttcgttcatcacccaatactccacaggacaagtgagtgtggaaattgaatgggagctgcagaaagaaaacagcaagcgctggaatcccgaagtgcagtacacatccaattatgcaaaatctgccaacgttgattttactgtggacaacaatggactttatactgagcctcgccccattggcacccgttaccttacccgtcccctg

SEQ ID NO: 649 - DNA, 2208 bp, synthetic construct
  misc_feature 1..2208: note = Description of Artificial Sequence: Synthetic polynucleotide
  source 1..2208: mol_type = other DNA
atggctgccgatggttatcttccagattggctcgaggacaacctctctgagggcattcgcgagtggtgggacttgaaacctggagccccgaagcccaaagccaaccagcaaaagcaggacgacggccggggtctggtgcttcctggctacaagtacctcggacccttcaacggactcgacaagggggagcccgtcaacgcggcggacgcagcggccctcgagcacgacaaggcctacgaccagcagctcaaagcgggtgacaatccgtacccgcggtataaccacgccgacgccgagtttcaggagcgtctgcaagaagatacgtcttttgggggcaacctcgggcgagcagtcttccaggccaagaagcgggttctcgaacctctcggtctggttggggaaggcgctaagacggctcctggaaagaaacgtccggtagagcagtcgccacaagagccagactcctcctcgggcatcggcaagacaggccagcagcccgctaaaaagagactcaattttggtcagactggcgactcagagtcagtccccgatccacaacctctcggagaacctccagcaacccccgctgctgtgggacctactacaatggcttcaggcggtggcgcaccaatggcagacaataacgaaggcgccgacggagtgggtaatgcctcaggaaattggcattgcgattccacatggctgggcgacagagtcatcaccaccagcacccgcacctgggccttgcccacctacaataaccacctctacaagcaaatctccagtgcttcaacgggggccagcaacgacaaccactacttcggctacagcaccccctgggggtattttgatttcaacagattccactgccacttttcaccacgtgactggcagcgactcatcaacaacaattggggattccggcccaagagactcaacttcaaactcttcaacatccaagtcaaggaggtcacgacgaatgatggcgtcacaaccatcgctaataaccttaccagcacggttcaagtcttctcggactcggagtaccagcttccgtacgtcctcggctctgcgcaccagggctgcctccctccgttcccggcggacgtgttcatgattccgcaatacggctacctgacgctcaacaatggcagccaagccgtgggacgttcatccttttactgcctggaatatttcccttctcagatgctgagaacgggcaacaactttaccttcagctacacctttgaggaagtgcctttccacagcagctacgcgcacagccagagcctggaccggctgatgaatcctcccatcgaccaatacctgtattacctgaacagaactcaaaatcagtccggaagtgcccaaaacaaggacttgctgtttagccgtgggtctccagctggcatgtctgttcagcccaaaaactggctacctggaccctgttatcggcagcagcgcgtttctaaaacaaaaacagacaacaacaacagcaattttacctggactggtgcttcaaaatataacctcaatgggcgtgaatccatcatcaaccctggcactgctatggcctcacacaaagacgacgaagacaagttctttcccatgagcggtgtcatgatttttggaaaagagagcgccggagcttcaaacactgcattggacaatgtcatgattacagacgaagaggaaattaaagccactaaccctgtggccaccgaaagatttgggaccgtggcagtcaatttccagagcagcagcacagaccctgcgaccggagatgtgcatgctatgggagcattacctggcatggtgtggcaagatagagacgtgtacctgcagggtcccatttgggccaaaattcctcacacagatggacactttcacccgtctcctcttatgggcggctttggactcaagaacccgcctcctcagatcctcatcaaaaacacgcctgttcctgcgaatcctccggcggagttttcagctacaaagtttgcttcattcatcacccaatactccacaggacaagtgagtgtggaaattgaatgggagctgcagaaagaaaacagcaagcgctggaatcccgaagtgcagtacacatccaattatgcaaaatctgccaacgttgattttactgtggacaacaatggactttatactgagcctcgccccattggcacccgttaccttacccgtcccctg

SEQ ID NO: 650 - DNA, 2208 bp, synthetic construct
  misc_feature 1..2208: note = Description of Artificial Sequence: Synthetic polynucleotide
  source 1..2208: mol_type = other DNA
atggctgccgatggttatcttccagattggctcgaggacaacctctctgagggcattcgcgagtggtgggacttgaaacctggagccccgaagcccaaagccaaccagcaaaagcaggacgacggccggggtctggtgcttcctggctacaagtacctcggacccttcaacggactcgacaagggggagcccgtcaacgcggcggacgcagcggccctcgagcacgacaaggcctacgaccagcagctcaaagcgggtgacaatccgtacctgcggtataaccacgccgacgccgagtttcaggagcgtctgcaagaagatacgtcttttgggggcaacctcgggcgagcagtcttccaggccaagaagcgggttctcgaacctctcggtctggttgaggaaggcgctaagacggctcctggaaagaaacgtccggtagagcagtcgccacaagagccagactcctcctcgggcatcggcaagacaggccagcagcccgctaaaaagagactcaattttggtcagactggcgactcagagtcagtccccgatccacgacctctcggagaacctccagcaacccccgctgctgtgggacctactacaatggcttcaggcggtggcgcaccaatggcagacaataacgaaggcgccgacggagtgggtaatgcctcaggaaattggcattgcgattccacatggctgggcgacagagtcatcaccaccagcacccgcacctgggccttgcccacctacaataaccacctctacaagcaaatctccagtgcttcaacgggggccagcaacgacaaccactacttcggctacagcaccccctgggggtattttgatttcaacagattccactgccacttttcaccacgcgactggcagcgactcatcaacaacaattggggattccggcccaagagactcaacttcaaactcttcaacatccaagtcaaggaggtcacgacgaatgatggcgtcacaaccatcgctaataaccttaccagcacggttcaagtcttctcggactcggagtaccagcttccgtacgtcctcggctctgcgcaccagggctgcctccctccgttcccggcggacgtgttcatgattccgcaatacggctacctgacgctcaacaatggcagccaagccgtgggacgttcatccttttactgcctggaatatttcccttctcagatgctgagaacgggcaacaactttaccttcagctacacctttgaggaagtgcctttccacagcagctacgcgcacagccagagcctggaccggctgatgaatcctctcatcgaccaatacctgtattacctgaacagaactcaaaatcagtccggaagtgcccaaaacaaggacttgctgtttagccgtgggcctccagctggcatgtctgttcagcccaaaaactggctacctggaccctgttatcggcagcagcgcgtttctaaaacaaaaacagacaacaacaacagcaattttacctggactggtgcttcaaaatataacctcaatgggcgtgaatccatcatcaaccctggcactgctatggcctcacacaaagacgacgaagacaagttctttcccatgagcggtgtcatgatttttggaaaagagagcgccggagcttcaaacactgcattggacaatgtcatgattacggacgaagaggaaattaaagccactaaccctgtggccaccgaaagatttgggaccgtggcagtcaatttccagagcagcagcacagaccctgcgaccggagatgtgcatgctatgggagcattacctggcatggtgtggcaagatagagacgtgtacctgcagggtcccatttgggccaaaattcctcacacagatggacactttcacccgtctcctcttatgggcggctttggactcaagaacccgcctcctcagatcctcatcaaaaacacgcctgttcctgcgaatcctccggcggagttttcagctacaaagtttgcttcattcatcacccaatactccacaggacaagtgagtgtggaaattgaatgggagctgcagaaagaaaacagcaagcgctggaatcccgaagtgcagtacacatccaattatgcaaaatctgccaacgttgattttactgtggacaacaatggactttatactgagcctcgccccattggcacccgttaccttacccgtcccctg

SEQ ID NO: 651 - DNA, 2208 bp, synthetic construct
  misc_feature 1..2208: note = Description of Artificial Sequence: Synthetic polynucleotide
  source 1..2208: mol_type = other DNA
atggctgccgatggttatcttccagattggctcgaggacaacctctctgagggcattcgcgagtggtgggacttgaaacctggagccccgaagcccaaagccaaccagcaaaagcaggacgacggccggggtctggtgcttcctggctacaagtacctcggacccttcaacggactcgacaagggggagcccgtcaacgcggcggacgcagcggccctcgagcacgacaaggcctacgaccagcagctcaaagcgggtgacaatccgtacctgcggtataaccacgccgacgccgagtttcaggagcgtctgcaagaagatacgtcttttgggggcaacctcgggcgagcagtcttccaggccaagaagcgggttctcgaacctctcggtctggttgaggaaggcgctaagacggctcctggaaagaaacgtccggtagagcagtcgccacaagagccagactcctcctcgggcatcggcaagacaggccagcagcccgctaaaaagagactcaattttggtcagactggcggctcagagtcagtccccgatccacaacctctcggagaacctccagcaacccccgctgctgtgggacctactacaatggcttcaggcggtggcgcaccaatggcagacaataacgaaggcgccgacggagtgggtaatgcctcaggaaattggcattgcgattccacatggctgggcgacagagtcatcaccaccagcacccgcacctgggccttgcccacctacaataaccacctctacaagcaaatctccagtgcttcaacgggggccagcaacgacaaccactacttcggctacagcaccccctgggggtattttgatttcaacagattccactgccacttttcaccacgtgactggcagcgactcatcaacaacaattggggattccggcccaagagactcaacttcaaactcttcaacatccaagtcaaggaggtcacgacgaatgatggcgtcacaaccatcgctaataaccttaccagcacggttcaagtcttctcggactcggagtaccagcttccgtacgtcctcggctctgcgcaccagggctgcctccctccgttcccggcggacgtgttcatgattccgcaatacggctacctgacgctcaacaatggcagccaagccgtgggacgttcatccttttactgcctggaatatttcccttctcagatgctgagaacgggcaacaactttaccttcagctacacctttgaggaagtgcctttccacagcagctacgcgcacagccagagcctggaccggctgatgaatcctcccatcgaccaatacctgtattacctgaacagaactcaaaatcagtccgggagtgcccaaaacaaggacttgctgtttagccgtgggtctccagctggcatgtctgttcagcccaaaaactggctacctggaccctgttatcggcagcagcgcgtttctaaaacaaaaacagacaacaacaacagcaattttacctggactggtgcttcaaaatataacctcaatgggcgtgaatccatcatcaaccctggcactgctatggcctcacacaaagacgacgaagacaagttctttcccatgagcggtgtcatgatttttggaaaagagagcgccggagcttcaaacactgcattggacaatgtcatgattacagacgaagaggaaattaaagccactaaccctgtggccaccgaaagatttgggaccgtggcagtcaatttccagagcagcagcacagaccctgcgaccggagatgtgcatgctatgggagcattacctggcatggtgtggcaagatagagacgtgtacctgcagggtcccatttgggccaaaattcctcacacagatggacactttcacccgtctcctcttatgggcggctttggactcaagaacccgcctcctcagatcctcatcaaaaacacgcctgttcctgcgaatcctccggcggagttttcagctacaaagtttgcttcattcatcacccaatactccacaggacaagtgagtgtggaaattgaatgggagctgcagaaagaaaacagcaagcgctggaatcccgaagtgcagtacacatccaattatgcaaaatctgccaacgttgactttactgtggacaacaatggactttatactgagcctcgccccattggcacccgttaccttacccgtcccctg

SEQ ID NO: 652 - DNA, 2208 bp, synthetic construct
  misc_feature 1..2208: note = Description of Artificial Sequence: Synthetic polynucleotide
  source 1..2208: mol_type = other DNA
atggctgccgatggttatcttccagattggctcgaggacaacctctctgagggcattcgcgagtggtgggacttgaaacctggagccccgaagcccaaagccaaccagcaaaagcaggacgacggccggggtctggtgcttcctggctacaagtacctcggacccttcaacggactcgacaagggggagcccgtcaacgcggcggacgcagcggccctcgagcacgacaaggcctacgaccagcagctcaaagcgggtgacaatccgtacctgcggtataaccacgccgacgccgagtttcaagagcgtctgcaagaagatacgtcttttgggggcaacctcgggcgagcagtcttccaggccaagaagcgggttctcgaacctctcggtctggttgaggaaggcgctaagacggctcctggaaagaaacgtccggtagagcagtcgccacaagagccagactcctcctcgggcatcggcaagacaggccagcagcccgctaaaaagagactcaattttggtcagactggcgactcagagtcagtccccgatccgcaacctctcggagaacctccagcaacccccgctgctgtgggacctactacaatggcttcaggcggtggcgcaccaatggcagacaataacgaaggcgccgacggagtgggtaatgcctcaggaaattggcattgcgattccacatggctgggcgacagagtcatcaccaccagcacccgcacctgggccttgcccacctacaataaccacctctacaagcaaatctccagtgcttcaacgggggccagcaacgacaaccactacttcggctacagcaccccctgggggtattttgatttcaacagattccactgccacttttcaccacgtgactggcagcgactcatcaacaacaattggggattccggcccaagagactcaacttcaaactcttcaacatccaagtcaaggaggtcacgacgaatgatggcgtcacaaccatcgctaataaccttaccagcacggttcaagtcttctcggactcggagtaccagcttccgtacgtcctcggctctgcgcaccagggctgcctccctccgttcccggcggacgtgttcatgattccgcaatacggctacctgacgctcaacaatggcagccaagccgtgggacgttcatccttttactgcctggaatatttcccttctcagatgctgagaacgggcaacaactttaccttcagctacacctttgaggaagtgcctttccacagcagctacgcgcacagccagagcctggaccggctgatgaatcctctcatcgaccaatacctgtattacctgaacagaactcaaaatcagtccggaagtgcccaaaacaaggacttgctgtttagccgtgggtctccagctggcatgtctgttcagcccaaaaactggctacctggaccctgttatcggcagcagcgcgtttctaaaacaaaaacagacaacaacaacagcaattttacctggactggtgcttcaaaatataacctcaatgggcgtgaatccatcatcaaccctggcactgctgtggcctcacacaaagacgacgaagacaagttctttcccatgagcggtgtcatgatttttggaaaagagagcgccggagcttcaaacactgcattggacaatgtcatgattacagacgaagaggaaattaaagccactaaccctgtggccaccgaaagatttgggaccgtggcagtcaatttccagagcagcagcacagaccctgcgaccggagatgtgcatgctatgggagcattacctggcatggtgtggcaagatagagacgtgtacctgcagggtcccatttgggccaaaattcctcacacagatggacactttcacccgtctcctcttatgggcggctttggactcaagaacccgcctcctcagatcctcatcaaaaacacgcctgttcctgcgaatcctccggcggagttttcagctacaaagtttgcttcattcatcacccaatactccacaggacaagtgagtgtggaaattgaatgggagctgcagaaagaaaacagcaagcgctggaatcccgaagtgcagtacacatccaattatgcaaaatctgccaacgttgattttactgtggacaacaatggactttatactgagcctcgccccattggcacccgttaccttacccgtcccctg

SEQ ID NO: 653 - DNA, 2208 bp, synthetic construct
  misc_feature 1..2208: note = Description of Artificial Sequence: Synthetic polynucleotide
  source 1..2208: mol_type = other DNA
atggctgccgatggttatcttccagattggctcgaggacaacctctctgagggcattcgcgagtggtgggacttgaaacctggagccccgaagcccaaagccaaccagcaaaagcaggacgacggccggggtctggtgcttcctggctacaagtacctcggacccttcaacggactcgacaagggggagcccgtcaacgcggcggacgcagcggccctcgagcacgacaaggcctacgaccagcagctcaaagcgggtgacaatccgtacctgcggtataaccacgccgacgccgagtttcaggagcgtctgcaagaagatacgtcttttgggggcaacctcgggcgagcagtcttccaggccaagaagcgggttctcgaacctctcggtctggttgaggaaggcgctaagacggctcctggaaagaaacgtccggtagagcagtcgccacaagagccagactcctcctcgggcatcggcaagacaggccagcagcccgctaaaaagagactcaattttggtcagactggcgactcagagtcagtccccgatccacaacctctcggagaacctccagcaacccccgctgctgtgggacctactacaatggcttcaggcggtggcgcaccaatggcagacaataacgaaggcgccgacggagtgggtaatgcctcaggaaattggcattgcgattccacatggctgggcgacagagtcatcaccaccagcacccgcacctgggccttgcccacctacaataaccacctctacaagcaaatctccagtgcttcaacgggggccagcaacgacaaccactacttcggctacagcaccccctgggggtattttgatttcaacagattccactgccacttttcaccacgtgactggcagcaactcatcaacaacaattggggattccggcccaagagactcaacttcaaactcttcaacatccaagtcaaggaggtcacgacgaatgatggcgtcacaaccatcgctaataaccttaccagcacggttcaagtcttctcggactcggagtaccagcttccgtacgtcctcggctctgcgcaccagggctgcctccctccgttcccggcggacgtgttcatgattccgcaatacggctacctgacgctcaacaatggcagccaagccgtgggacgttcatccttttactgcctggaatatttcccttctcagatgctgagaacgggcaacaactttaccttcagctacacctttgaggaagtgcctttccacagcagctacgcgcacagccagagcctggaccggctgatgaatcctctcatcgaccaatacctgtattacctgaacagaactcaaaatcagtccggaagtgcccaaaacaaggacttgctgtttagccgtgggtctccagctggcatgtctgttcagcccaaaaactggctacctggaccctgttatcggcagcagcgcgtttctaaaacaaaaacagacaacaacaacagcaattttacctggactggtgcttcaaaatataacctcaatgggcgtgaatccatcatcaaccctggcactgctatggcctcacacaaagacgacgaagacaagttctttcccatgagcggtgtcatgatttttggaaaagagagcgccggagcttcaaacactgcattggacaatgtcatgattacagacgaagaggaaattaaagccactaaccctgtggccaccgaaagatttgggaccgtggcagtcaatttccagagcaccagcacagaccctgcgaccggagatgtgcatgctatgggagcattacctggcatggtgtggcaagatagagacgtgtacctgcagggtcccatttgggccaaaattcctcacacagatggacactttcacccgtctcctcttatgggcggctttggactcaagaacccgcctcctcagatcctcatcaaaaacacgcctgttcctgcgaatcctccggcggagttttcagctacaaagtttgcttcattcatcacccaatactccacaggacaagtgagtgtggaaattgaatgggagctgcagaaagaaaacagcaagcgctggaatcccgaagtgcagtacacatccaattatgcaaaatctgccgacgttgattttactgtggacaacaatggactttatactgagcctcgccccattggcacccgttaccttacccgtcccctg

SEQ ID NO: 654 - DNA, 2208 bp, synthetic construct
  misc_feature 1..2208: note = Description of Artificial Sequence: Synthetic polynucleotide
  source 1..2208: mol_type = other DNA
atggctgccgatggttatcttccagattggctcgaggacaacctctctgagggcattcgcgagtggtgggacttgaaacctggagccccgaagcccaaagccaaccagcaaaagcaggacgacggccggggtctggtgcttcctggctacaagtacctcggacccttcaacggactcgacaagggggagcccgtcaacgcggcggacgcagcggccctcgagcacgacaaggcctacgaccagcagctcaaagcgggtgacaatccgtacctgcggtataaccacgccgacgccgagtttcaagagcgtctgcaagaagatacgtcttttgggggcaacctcgggcgagcagtcttccaggccaagaagcgggttctcgaacctctcggtctggttgaggaaggcgctaagacggctcctggaaagaaacgtccggtagagcagtcgccacaagagccagactcctcctcgggcatcggcaagacaggccagcagcccgctaaaaagagactcaattttggtcagactggcgactcagagtcagtccccgatccgcaacctctcggagaacctccagcaacccccgctgctgtgggacctactacaatggcttcaggcggtggcgcaccaatggcagacaataacgaaggcgccgacggagtgggtaatgcctcaggaaattggcattgcgattccacatggctgggcgacagagtcatcaccaccagcacccgcacctgggccttgcccacctacaataaccacctctacaagcaaatctccagtgcttcaacgggggccagcaacgacaaccactacttcggctacagcaccccctgggggtattttgatttcaacagattccactgccacttttcaccacgtgactggcagcgactcatcaacaacaattggggattccggcccaagagactcaacttcaaactcttcaacatccaagtcaaggaggtcacgacgaatgatggcgtcacaaccatcgctaataaccttaccagcacggttcaagtcttctcggactcggagtaccagcctccgtacgtcctcggctctgcgcaccagggctgcctccctccgttcccggcggacgtgttcatgattccgcaatacggccacctgacgctcaacaatggcagccaagccgtgggacgttcatccttttactgcctggaatatttcccttctcagatgctgagaacgggcaacaactttaccttcagctacacctttgaggaagtgcctttccacagcagctacgcgcacagccagagcctggaccggctgacgaatcctctcatcgaccaatacctgtattacctgaacagaactcaaaatcagtccggaagtgcccaaaacaaggacttgctgtttagccgtgggtctccagctggcatgtctgttcagcccaaaaactggctacctggaccctgttatcggcagcagcgcgtttctaaaacaaaaacagacaacaacaacagcaattttacctggactggtgcttcaaaatataacctcaatgggcgtgaatccatcatcaaccctggcactgctatggcctcacacaaagacgacgaagacaagttctttcccatgagcggtgtcatgatttttggaaaagagagcgccggagcttcaaacactgcattggacaatgtcatgattacagacgaagaggaaattaaagccactaaccctgtggccaccgaaagatttgggaccgtggcagtcaatttccagagcagcagcacagaccctgcgaccggagatgtgcatgctatgggagcattacctggcatggtgtggcaagatagagacgtgtacctgcagggtcccatttgggccaaaattcctcacacagatggacactttcacccgtctcctcttatgggcggctttggactcaagaacccgcctcctcagatcctcatcaaaaacacgcctgttcctgcgaatcctccggcggagttttcagctacaaagtttgcttcattcatcacccaatactccacaggacaagtgagtgtggaaattgaatgggagctgcagaaagaaaacagcaagcgctggaatcccgaagtgcagtacacatccaattatgcaaaatctgccaacgttgattttactgtggacaacaatggactttatactgagcctcgccccattggcacccgttaccttacccgtcccctg

SEQ ID NO: 655 - DNA, 2208 bp, synthetic construct
  misc_feature 1..2208: note = Description of Artificial Sequence: Synthetic polynucleotide
  source 1..2208: mol_type = other DNA
atggctgccgatggttatcttccagattggctcgaggacaacctctctgagggcattcgcgagtggtgggacttgaaacctggagccccgaagcccaaagccaaccagcaagagcaggacgacggccggggtctggtgcttcctggctacaagtacctcggacccttcaacggactcgacaagggggagcccgtcaacgcggcggacgcagcggccctcgagcacgacaaggcctacgaccagcagctcaaagcgggtgacaatccgtacctgcggtataaccacgccgacgccgagtttcaggagcgtctgcaagaagatacgtcttttgggggcaacctcgggcgagcagtcttccaggccaagaagcgggttctcgaacctctcggtctggttgaggaaggcgctaagacggctcctggaaagaaacgtccggtagagcagtcgccacaagagccagactcctcctcgggcatcggcaagacaggccagcagcccgctaaaaagagactcaattttggtcagactggcgactcagagtcagtccccgatccacaacctctcggagaacctccagcaacccccgctgctgtgggacctactacaatggcttcaggcggtggcgcaccaatggcagacaataacgaaggcgccgacggagtgggtaatgcctcaggaaattggcattgcgattccacatggctgggcgacagagtcatcaccaccagcacccgcacctgggccttgcccacctacaataaccacctctacaagcaaatctccagtgcttcaacgggggccagcaacgacaaccactacttcggctacagcaccccctgggggtattttgatttcaacagattccactgccacttttcaccacgtgactggcagcgactcatcaacaacaattggggattccggcccaagagactcaacttcaaactcttcaacatccaagtcaaggaggtcacgacgaatgatggcgtcacaaccatcgctaataaccttaccagcacggttcaagtcttctcggactcggagtaccagcttccgtacgtcctcggctctgcgcaccagggctgcctccctccgttcccggcggacgtgttcatgattccgcaatacggctacctgacgctcaacaatggcagccaagccgtgggacgttcatccttttactgcctggaatatttcccttctcagatgctgagaacgggcaacaactttaccttcagctacacctttgaggaagtgcctttccacagcagctacgcgcacagccagagcctggaccggctgatgaatcctctcatcgaccaatacctgtattacctgaacagaactcaaaatcagtccggaagtgcccaaaacaaggacttgctgtttagccgtgggtctccagctggcatgtctgttcagcccaaaaactggctacctggaccctgttatcggcagcagcgcgtttctaaaacaaaaacagacaacaacaacagcaattttacctggactggtgcttcaaaatataacctcaatgggcgtgaatccatcatcaaccctggcactgctatggcctcacacaaagacgacgaagacaagttctttcccatgagcggtgtcatgatttttggaaaagagagcgccggagcttcaaacactgcattggacaatgtcatgattacagacgaagaggaaattaaagccactaaccctgtggccaccgaaagatttgggaccgtggcagtcaatttccagagcagcagcacagaccctgcgaccggagatgtgcatgctacgggaacattacctggcatggtgtggcaagatagagacgtgtacctgcagggtcccatttgggccaaaattcctcacacagatggacactttcacccgtctcctcttatgggcggctttggactcaagaacccgcctcctcagatcctcatcaaaaccacgcctgttcctgcgaatcctccggcggagttttcagctacaaagtttgcttcattcatcacccagtactccacaggacaagtgagtgtggaaattgaatgggagctgcagaaagaaaacagcaagcgctggaatcccgaagtgcagtacacatccaattatgcaaaatctgccaacgttgattttactgtggacgacaatggactttatactgagcctcgccccattggcacccgttaccttacccgtcccctg

SEQ ID NO: 656 - DNA, 2208 bp, synthetic construct
  misc_feature 1..2208: note = Description of Artificial Sequence: Synthetic polynucleotide
  source 1..2208: mol_type = other DNA
atggctgccgatggttatcttccagattggctcgaggacaacctctctgagggcattcgcgagtggtgggacttgaaacctggagccccgaagcccaaagccaaccagcaaaagcaggacgacggccggggtctggtgcttcctggctacaagtacctcggacccttcaacggactcgacaagggggagcccgtcaacgcggcggacgcagcggccctcgagcacgacaaggcctacgaccagcagctcaaagcgggtgacaatccgtacctgcggtataaccacgccgacgccgagtttcaggagcgtctgcaagaagatacgtcttttgggggcaacctcgggcgagcagtcttccaggccaagaagcgggttctcgaacctctcggtctggttgaggaaggcgctaagacggctcctggaaagaaacgtccggtagagcagtcgctacaagagccagactcctcctcgggcatcggcaagacaggccagcagcccgctaaaaagagactcaattttggtcagactggcgactcagagtcagtccccgatccacaacctctcggagaacctccagcaacccccgctgctgtgggacctactacaatggcttcaggcggtggcgcaccaatggcagacaataacgaaggcgccgacggagtgggtaatgcctcaggaaattggcattgcgattccacatggctgggcgacagagtcatcaccaccagcacccgcacctgggccttgcccacctacaataaccacctctacaagcaaatctccagtgcttcaacgggggccagcaacgacaaccactacttcggctacagcaccccctgggggtattttgatttcaacagattccactgccacttttcaccacgtgactggcagcgactcatcaacaacaattggggattccggcccaagagactcaacttcaaactcttcaacatccaagtcaaggaggtcacgacgaatgatggcgtcacaaccatcgctaataaccttaccagcacggttcaagtcttctcggactcggagtaccagcttccgtacgtcctcggctctgcgcaccagggctgcctccctccgttcccggcggacgtgttcatgattccgcaatacggctacctgacgctcaacaatggcagccaagccgtgggacgttcatccttttactgcctggaatatttcccttctcagatgctgagaacgggcaacaactttaccttcagctacacctttgaggaagtgcctttccacagcagctacgcgcacagccagagcctggaccggctgatgaatcctctcatcgaccaatacctgtattacctgaacagaactcaaaatcagtccggaagtgcccaaaacaaggacttgctgtttagccgtgggtctccagctggcatgtctgttcagcccaaaaactggctacctggaccctgttatcggcagcagcgcgtttctaaaacaaaaacagacaacgacaacagcaattttacctggactggtgcttcaaaatataacctcaatgggcgtgaatccatcatcaaccctggcactgctatggcctcacacaaagacgacgaagacaagttctttcccatgagcggtgtcatgatttttggaaaagagagcgccggagcttcaaacactgcattggacaatgtcatgattacagacgaagaggaaattaaagccactaaccctgtggccaccgaaagatttgggaccgtggcagtcaatttccagagcagcagcacagaccctgcgaccggagatgtgcatgctatgggagcattacctggcatggtgtggcaagatagagacgtgtacctgcagggtcccatttgggccaaaattcctcacacagatggacactttcacccgtctcctcttatgggcggctttggactcaagaacccgcctcctcagatcctcatcaaaaacacgcctgttcctgcgaatcctccggcggagttttcagctacaaagtttgcttcattcatcacccaatactccacaggacaagtgagtgtggaaattgaatgggagctgcagaaagaaaacagcaagcgctggaatcccgaagtgcagtacacatccaattatgcaaaatctgccaacgttgattttactgtggacaacaatggactttatactgagcctcgccccattggcacccgttaccttacccgtcccctg

SEQ ID NO: 657 - DNA, 2208 bp, synthetic construct
  misc_feature 1..2208: note = Description of Artificial Sequence: Synthetic polynucleotide
  source 1..2208: mol_type = other DNA
atggctgccgatggttatcttccagattggctcgaggacaacctctctgagggcattcgcgagtggtgggacttgaaacctggagctccgaagcccaaagccaaccagcaaaagcaggacgacggccggggtctggtgcttcctggctacaagtacctcggacccttcaacggactcgacaagggggagcccgtcaacgcggcggacgcagcggccctcgagcacgacaaggcctacgaccagcagctcaaagcgggtgacaatccgtacctgcggtataaccacgccgacgccgagtttcaggagcgtctgcaagaagatacgtcttttgggggcaacctcgggcgagcagtcttccaggccaagaagcgggttctcgaacctctcggtctggttgaggaaggcgctaagacggctcctggaaagaaacgtccggtagagcagtcgccacaagagccagactcctcctcgggcatcggcaagacaggccagcagcccgctaaaaagagactcaattttggtcagactggcgactcagagtcagtccccgatccacaacctctcggagaacctccagcaacccccgctgctgtgggacctactacaatggcttcaggcggtggcgcaccaatggcagacaataacgaaggcgccgacggagtgggtaatgcctcaggaaattggcattgcgattccacatggctgggcgacagagtcatcaccaccagcacccgcacctgggccttgcccacctacaataaccacctctacaagcaaatctccagtgcttcaacgggggccagcaacgacaaccactacttcggctacagcaccccctgggggtattttgatttcaacagattccactgccacttttcaccacgtgactggcagcgactcatcaacaacaattggggattccggcccaagagactcaacttcaaactcttcaacatccaagtcaaggaggtcacgacgaatgatggcgtcacaaccatcgctaataaccttaccagcacggttcaagtcttctcggactcggagtaccagcttccgtacgtcctcggctctgcgcaccagggctgcctccctccgttcccggcggacgtgttcatgattccgcaatacggctacctgacgctcaacaatggcagccaagccgtgggacgttcatccttttactgcctggaatatttcccttctcagatgctgagaacgggcaacaactttaccttcagctacacctttgaggaagcgcctttccacagcagctacgcgcacagccagagcctggaccggctgatgaatcctctcatcgaccaatacctgtattacctgaacagaactcaaaatcagtccggaagtgcccaaaacaaggacttgctgtttagccgtgggtctccagctggcatgtctgttcagcccaaaaactggctacctggaccctgttatcggcagcagcgcgtttctaaaacaaaaacagacaacaacaacagcaattttacctggactggtgcttcaaaatataacctcaatgggcgtgaatccatcatcaaccctggcactgctatggcctcacacaaagacgacgaagacaagttctttcccatgagcggtgtcatgatttttggaaaagagagcgccggagcttcaaacactgcattggacaatgtcatgattacagacgaagaggaaattaaagccactaaccctgtggccaccgaaagatttgggaccgtggcagtcaatttccagagcagcagcacagaccctgcgaccggagatgtgcatgctatgggagcattacctggcatggtgtggcaagatagagacgtgtacctgcagggtcccatttgggccaaaattcctcacacagatggacactttcacccgtctcctcttatgggcggctttggactcaagaacccgcctcctcagatcctcatcaaaaacacgcctgttcctgcgaatcctccggcggagttttcagctacaaagtttgcttcattcatcacccaatactccacaggacaagtgagtgtggaaattgaatgggagctgcagaaagaaaacagcaagcgctggaatcccgaagtgcagtacacatccaattatgcgaaatctgccaacgttgattttactgtggacaacaatggactttatactgagcctcgccccgttggcacccgttaccttacccgtcccctg

SEQ ID NO: 658 - DNA, 2208 bp, synthetic construct
  misc_feature 1..2208: note = Description of Artificial Sequence: Synthetic polynucleotide
  source 1..2208: mol_type = other DNA
atggctgccgatggttatcttccagattggctcgaggacaacctctctgagggcattcgcgagtggtgggacttgaaacctggagccccgaagcccaaagccaaccagcaaaagcaggacgacggccggggtctggtgcttcctggctacaagtacctcggacccttcaacggactcgacaagggggagcccgtcaacgcggcggacgcagcggccctcgagcacgacaaggcctacgaccagcagctcaaagcgggtgacaatccatacctgcggtataaccacgccgacgccgagtttcaggagcgtctgcaagaaaatacgtcttttgggggcaacctcgggcgagcagtcttccaggccaagaagcgggttctcgaacctctcggtctggttgaggaaggcgctaagacggctcctggaaagaaacgtccggtagagcagtcgccacaagagccagactcctcctcgggcatcggcaagacaggccagcagcccgctaaaaagagactcaattttggtcagactggcgactcagagtcagtccccgatccacaacctctcggagaacctccagcaacccccgctgctgtgggacctactacaatggcttcaggcggtggcgcaccaatggcagacaataacgaaggcgccgacggagtgggtaatgcctcaggaaattggcattgcgattccacatggctgggcgacagagtcatcaccaccagcacccgcacctgggccttgcccacctacaataaccacctctacaagcaaatctccagtgcttcaacgggggccagcaacgacaaccactacttcggctacagcaccccctgggggtattttgatttcaacagattccactgccactttccaccacgtgactggcagcgactcatcaacaacaattggggattccggcccaagagactcaacttcaaactcttcaacatccaagtcaaggaggtcacgtcgaatgatggcgtcacaaccatcgctaataaccttaccagcacggttcaagtcttctcggactcggagtaccagcttccgtacgtcctcggctctgcgcaccagggctgcctccctccgttcccggcggacgtgttcatgattccgcaatacggctacctgacgctcaacaatggcagccaagccgtgggacgttcatccttttactgcctggaatatttcccttctcagatgctgagaacgggcaacaactttaccttcagctacacctttgaggaagtgcctttccacagcagctacgcgcacagccagagcctggaccggctgatgaatcctctcatcgaccaatacctgtattacctgaacagaactcaaaatcagtccggaagtgcccaaaacaaggacttgctgtttagccgtgggtctccagctggcatgtctgttcagcccaaaaactggctacctggtccctgttatcggcagcagcgcgtttctaaaacaaaaacagacaacaacaacagcaattttacctggactggtgcttcaaaatataacctcaatgggcgtgaatccatcatcaaccctggcactgctatggcctcacacaaagacgacgaagacaagttctttcccatgagcggtgtcatgatttttggaaaagagagcgccggagcttcaaacactgcattggacaatgtcatgattacagacgaagaggaaattaaagccactaaccctgtggccaccgaaagatttgggaccgtggcagtcaatttccagagcagcagcacagaccctgcgaccggagatgtgcatgctatgggagcattacctggcatggtgtggcaagatagagacgtgtacctgcagggtcccatttgggccaaaattcctcacacagatggacactttcacccgtctcctcttatgggcggctttggactcaagaacccgcctcctcagatcctcatcaaaaacacgcctgttcctgcgaatcctccggcggagttttcagctacaaagtttgcttcattcatcacccaatactccacaggacaagtgagtgtggaaattgaatgggagctgcagaaagaaaacagcaagcgctggaatcccgaagtgcagtacacatccaattatgcaaaatctgccaacgttgattttactgtggacaacaatggactttatactgagcctcgccccattggcacccgttaccttacccgtcccctg

SEQ ID NO: 659 - DNA, 2208 bp, synthetic construct
  misc_feature 1..2208: note = Description of Artificial Sequence: Synthetic polynucleotide
  source 1..2208: mol_type = other DNA
atggctgccgatggttatcttccagattggctcgaggacaacctctctgagggcattcgcgagtggtgggacttgaaacctggagccccgaagcccaaagccaaccagcaaaagcaggacgacggccggggtctggtgcttcctggctacaagtacctcggacccttcaacggactcgacaagggggagcccgtcaacgcggcggacgcagcggccctcgagcacgacaaggcctacgaccagcagctcaaagcgggtgacaatccgtacctgcggtataaccacgccgacgccgagtttcaggagcgtctgcaagaagatacgtcttttgggggcaacctcgggcgagcagtcttccaggccaagaagcgggttctcgaacctctcggtctggttgaggaaggcgctaagacggctcctggaaagaaacgtccggtagagcagtcgccacaagagccagactcctcctcgggcatcggcaagacaggccagcagcccgctaaaaagagactcaattttggtcagactggcgactcagagtcagtccccgatccacaacctctcggagaacctccagcaacccccgctgctgtgggacctactacaatggcttcaggcggtggcgcaccaatggcagacaataacgaaggcgccgacggagtgggtaatgcctcaggaaattggcattgcgattccacatggctgggcgacagagtcatcaccaccagcacccgcacctgggccttgcccacctacaataaccacctctacaagcaaatctccagtgcttcaacgggggccagcaacgacaaccactacttcggctacagcaccccctgggggtattttgatttcaacagattccactgccacttttcaccacgtgactggcagcgactcatcaacaacaattggggattccggcccaagagactcaacttcaaactcttcaacatccaagtcaaggaggtcacgacgaatgatggcgtcacaaccatcgctaataaccttaccagcacggttcaagtcttctcggactcggagtaccagcttccgtacgtcctcggctctgcgcaccagggctgcctccctccgttcccggcggacgtgttcatgattccgcaatacggctacctgacgctcaacaatggcagccaagccgtgggacgttcatccttttactgcctggaatatttcccttctcagatgctgagaacgggcaacaactttaccttcagctacacctttgaggaagtgcctttccacagcagctacgcgcacagccagagcctggaccggctgatgaatcctctcatcgaccaatacctgtattacctgaacagaactcaaaatcagtccggaagtgcccaaaacaaggacttgctgtttagccgtgggtctccagctggcacgtctgttcagcccaaaaactggctacctggaccctgttatcggcagcagcgcgtttctaaaacaaaaacagacaacaacaacagcaattttacctggactggtgcttcaaaatataacctcaatgggcgtgaatccatcatcaaccctggcactgctatggcctcacacaaagacgacgaagacaagttctttcccatgagcggtgtcatgatttttggaaaagagagcgccggagcttcaaacactgcattggacaatgtcatgattacagacgaagaggaaattaaagccactaaccctgtggccaccgaaagatttgggaccgtggcagtcaatttccagagcagcagcacagaccctgcgaccggagatgtgcatgctatgggagcattacctggcatggtgtggcaagatagagacgtgtacctgcagggtcccatttgggccaaaattcctcacacagatggacactttcacccgtctcctcttatgggcggctttggactcaagaacccgcctcctcagatcctcatcaaaaacacgcctgttcctgcgaatcctccggcggagttttcagctacaaagtttgcttcattcatcacccaatactccacaggacaagtgagtgtggaaattgaatgggagctgcagaaagaaaacagcaagcgctggaatcccgaagtgcagtacacatccaattatgcaaaatctgccaacgttgattttactgtggacaacaatggactttatactgggcctcgccccattggcacccgttaccttacccgtcccctg

SEQ ID NO: 660 - DNA, 2208 bp, synthetic construct
  misc_feature 1..2208: note = Description of Artificial Sequence: Synthetic polynucleotide
  source 1..2208: mol_type = other DNA
atggctgccgatggttatcttccagattggctcgaggacaacctctctgagggcattcgcgagtggtgggacttgaaacctggagccccgaagcccaaagccaaccagcaaaagcaggacgacggccggggtctggtgcttcctggctacaagtacctcggacccttcaacggactcgacaagggggagcccgtcaacgcggcggacgcagcggccctcgagcacgacaaggcctacgaccagcagctcaaagcgggtgacaatccgtacctgcggtataaccacgccgacgccgagtttcaggagcgtctgcaagaagatacgtcttttgggggcaacctcgggcgagcagtcttccaggccaagaagcgggttctcgaacctctcggtctggttgaggaaggcgctaagacggctcctggaaagaaacgtccggtagagcagtcgccacaagagccagactcctcctcgggcatcggcaagacaggccagcagcccgctaaaaagagactcaattttggtcagactggcgactcagagtcagtccccgatccacaacctctcggagaacctccagcaacccccgctgctgtgggacctactacaatggcttcaggcggtggcgcaccaatggcagacaataacgaaggcgccgacggagtgggtaatgccccaggaaattggcattgcgactccacatggctgggcgacagagtcatcaccaccagcacccgcacctgggccttgcccacctacaataaccacctctacaagcaaatctccagtgcttcaacgggggccagcaacgacaaccactacttcggctacagcaccccctgggggtattttgatttcaacagattccactgccacttttcaccacgtgactggcagcgactcatcaacaacaattggggattccggcccaagagactcaacttcaaactcttcaacatccaagtcaaggaggtcacgacgaatgatggcgtcacaaccatcgctaataaccttaccagcacggttcaagtcttctcggactcggagtaccagcttccgtacgtcctcggctctgcgcaccagggctgcctccctccgttcccggcggacgtgttcatgattccgcaatacggctacctgacgctcaacaatggcagccaagccgtgggacgttcatccttttactgcctggaatatttcccttctcagatgctgagaacgggcaacaactttaccttcagctacacctttgaggaagtgcctttccacagcagctacgcgcacagccagagcctggaccggctgatgaatcctctcatcgaccaatacctgtattacctgaacagaactcaaaatcagtccggaagtgcccaaaacaaggacttgctgtttagccgtgggtctccagctggcatgtctgttcagcccaaaaactggctacctggaccctgttatcggcagcagcgcgtttctaaaacaaaaacagacaacaacaacagcaattttacctggactggtgcttcaaaatataacctcaatgggcgtgaatccatcatcaaccctggcacagctatggcctcacacaaagacgacgaagacaagttctttcccatgagcggtgtcatgatttttggaaaagagagcgccggagcttcaaacactgcattggacaatgtcatgattacaggcgaagaggaaattaaagccactaaccctgtggccaccgaaagatttgggaccgtggcagtcaatttccagagcagcagcacagaccctgcgaccggagatgtgcatgctatgggagcattacctggcatggtgtggcaagatagagacgtgtacctgcagggtcccatttgggccaaaattcctcacacagatggacactttcacccgtctcctcttatgggcggctttggactcaagaacccgcctcctcagatcctcatcaaaaacacgcctgttcctgcgaatcctccggcggagttttcagctacaaagtttgcttcattcatcacccaatactccacaggacaagtgagtgtggaaattgaatgggagctgcagaaagaaaacagcaagcgctggaatcccgaagtgcagtacacatccaattatgcaaaatctgccaacgttgattttactgtggacaacaatggactttatactgagcctcgccccattggcacccgttaccttacccgtcccctg

SEQ ID NO: 661 - DNA, 2208 bp, synthetic construct
  misc_feature 1..2208: note = Description of Artificial Sequence: Synthetic polynucleotide
  source 1..2208: mol_type = other DNA
atggctgccgatggttatcttccagattggctcgaggacaacctctctgagggcattcgcgagtggtgggacttgaaacctggagccccgaagcccaaagccaaccagcaaaagcaggacgacggccggggtctggtgcttcctggctacaagtacctcggacccttcaacagactcgacaagggggagcccgtcaacgcggcggacgcagcggccctcgagcacgacaaggcctacgaccagcagctcaaagcgggtgacaatccgtacctgcggtataaccacgccgacgccgagtttcaggagcgtctgcaagaagatacgtcttttgggggcaacctcgggcgagcagtcttccaggccaagaagcgggttctcgaacctctcggtctggttgaggaaggcgctaagacggctcctggaaggaaacgtccggtagagcagtcgccacaagagccagactcctcctcgggcatcggcaagacaggccagcagcccgctaaaaagagactcaattttggtcagactggcgactcagagtcagtccccgatccacaacctctcggagaacctccagcaacccccgctgctgtgggacctactacaatggcttcaggcggtggcgcgccaatggcagacaataacgaaggcgccgacggagtgggtaatgcctcaggaaattggcattgcgattccacatggctgggcgacagagtcatcaccaccagcacccgcacctgggccttgcccacctacaataaccacctctacaagcaaatctccagtgcttcaacgggggccagcaacgacaaccactacttcggctacagcaccccctgggggtattttgatttcaacagattccactgccacttttcaccacgtgactggcagcgactcatcaacaacaattggggattccggcccaagagactcaacttcaaactcttcaacatccaagtcaaggaggtcacgacgaatgatggcgtcacaaccatcgctaataaccttaccagcacggttcaagtcttctcggactcggagtaccagcttccgtacgtcctcggctctgcgcaccagggctgcctccctccgttcccggcggacgtgttcatgattccgcaatacggctacctgacgctcaacaatggcggccaagccgtgggacgttcatccttttactgcctggaatatttcccttctcagatgctgagaacgggcaacaactttaccttcagctacacctttgaggaagtgcctttccacagcagctacgcgcacagccagagcctggaccggctgatgaatcctctcatcgaccaatacctgtattacctgaacagaactcaaaatcagtccggaagtgcccaaaacaaggacttgctgtttagccgtgggtctccagctggcatgtctgttcagcccaaaaactggctacctggaccctgttatcggcagcagcgcgtttctaaaacaaaaacagacaacaacaacagcaattttacctggactggtgcttcaaaatatagcctcaatgggcgtgaatccatcatcaaccctggcactgctatggcctcacacaaagacgacgaagacaagttctttcccatgggcggtgtcatgatttttggaaaagagagcgccggagcttcaaacactgcattggacaatgccatgattacagacgaagaggaaattaaagccactaaccctgtggccaccgaaagatttgggaccgtggcagtcaatttccagagcagcagcacagaccctgcgaccggagatgtgcatgctatgggagcattacctggcatggtgtggcaagatagagacgtgtacctgcagggtcccatttgggccaaaattcctcacacagatggacactttcacccgtctcctcttatgggcggctttggactcaagaacccgcctcctcagatcctcatcaaaaacacgcctgttcctgcgaatcctccggcggagttttcagctacaaagtttgcttcattcatcacccaatactccacaggacaagtgagtgtggaaattgaatgggagctgcagaaagaaaacagcaagcgctggaatcccgaagtgcagtacacatccaattatgcaaaatctgccaacgttgattttactgtggacaacaatggactttatactgagcctcgccccattggcacccgttaccttacccgtcccctg

SEQ ID NO: 662 - DNA, 2208 bp, synthetic construct
  misc_feature 1..2208: note = Description of Artificial Sequence: Synthetic polynucleotide
  source 1..2208: mol_type = other DNA
atggctgccgatggttatcttccagattggctcgaggacaacctctctgagggcattcgcgagtggtgggacttgaaacctggagccccgaagcccaaagccaaccagcaaaagcaggacgacggccggggtctggtgcttcctggctacaagtacctcggacccttcaacggactcgacaagggggagcccgtcaacgcggcggacgcagcggccctcgagcacgacaaggcctacgaccagcagctcaaagcgggtgacaatccgtacctgcggtataaccacgccgacgccgagtttcaggagcgtctgcaagaagatacgtcttttgggggcaacctcgggcgagcagtcttccaggccaagaagcgggttctcgaacctctcggtctggttgaggaaggcgctaagacggctcctggaaagaaacgtccggtagagcagtcgccacaagagccagactcctcctcgggcatcggcaagacaggccagcagcccgctaaaaagagactcaattttggtcagactggcgactcagagtcagtccccgatccacaacctctcggagaacctccagcaacccccgctgctgtgggacctactacaatggcttcaggcggtggcgcaccaatggcagacaataacgaaggcgccgacggagtgggtaatgcctcaggaaattggcattgcgattccacatggctgggcggcagagtcatcaccaccagcacccgcacctgggccttgcccacctacaataaccacctctacaagcaaatctccagtgcttcaacgggggccagcaacgacaaccactacttcggctacagcaccccctgggggtattttgatttcaacagattccactgccacttttcaccacgtgactggcagcgactcatcaacaacaattggggattccggcccaagagactcaacttcaaactcttcaacatccaagtcaaggaggtcacgacgaatgatggcgtcacaaccatcgctaataaccttaccagcacggttcaagtcttctcggactcggagtaccagcttccgtacgtcctcggctctgcgcaccagggctgcctccctccgttcccggcggacgtgttcatgattccgcaatacggctacctgacgctcaacaatggcagccaagccgtgggacgttcatccttttactgcctggaatatttcccttctcagatgctgagaacgggcaacaactctaccttcagctacacctttgaggaagtgcctttccacagcagctacgcgcacagccagagcctggaccggctgatgaatcctctcatcgaccaatacctgtattacctgaacagaactcaaaatcagtccggaagtgcccaaaacaaggacttgctgtttagccgtgggtctccagctggcatgtctgttcagcccaaaaactggctacctggaccctgttatcggcagcagcgcgtttctaaaacaaaaacagacaacaacaacagcaattttacctggactggtgcttcaaaatataacctcaatgggcgtgaatccatcatcaaccctggcactgctatggcctcacacaaagacgacgaagacaagttctttcccatgagcggtgtcatgatttttggaaaagagagcgccggagcttcaaacactgcattggacaatgtcatgattacagacgaagaggaaattaaagccactaaccctgtggccaccgaaagatttgggaccgtggcagtcaatttccagagcagcagcacagaccctgcgaccggagatgtgcatgctatgggaacattacctggcatggtgtggcaagatagagacgtgtacctgcagggtcccatttgggccaaaattcctcacacagatggacactttcacccgtctcctcttatgggcggctttggactcaagaacccgcctcctcagatcctcatcaaaaacacgcctgttcctgcgaatcctccggcggagttttcagctacaaagtttgcttcattcatcacccaatactccacaggacaagtgagtgtggaaattgaatgggagctgcagaaagaaaacagcaagcgctggaatcccgaagtgcagtacacatccaattatgcaaaatctgccaacgttgattttactgtggacaacaatggactttatactgagcctcgccccattggcacccgttaccttacccgtcccctg

SEQ ID NO: 663 - DNA, 2208 bp, synthetic construct
  misc_feature 1..2208: note = Description of Artificial Sequence: Synthetic polynucleotide
  source 1..2208: mol_type = other DNA
atggctgccgatggttatctcccagattggctcgaggacaacctctctgagggcattcgcgagtggtgggacttgaaacctggagccccgaagcccaaagccaaccagcaaaagcaggacgacggccggggtctggtgcttcctggctacaagtacctcggacccttcaacggactcgacaagggggagcccgtcagcgcggcggacgcagcggccctcgagcacgacaaggcctacgaccagcagctcaaagcgggtgacaatccgtacctgcggtataaccacgccgacgccgagtttcaggagcgtctgcaagaagatacgtcttttgggggcaacctcgggcgagcagtcttccaggccaagaagcgggttctcgaacctctcggtctggttgaggaaggcgctaagacggctcctggaaagaaacgtccggtagagcagtcgccacaagagccagactcctcctcgggcatcggcaagacaggccagcagcccgctaaagagagactcaattttggtcagactggcgactcagagtcagtccccgatccacaacctctcggagaacctccagcaacccccgctgctgtgggacctactacaatggcttcaggcggtggcgcaccaatggcagacaataacgaaggcgccgacggagtgggtaatgcctcaggaaattggcattgcgattccacatggctgggcgacagagtcatcaccaccagcacccgcacctgggccttgcccacctacaataaccacctctacaagcaaatctccagtgcttcaacgggggccagcaacgacaaccactacttcggctacagcaccccctgggggtattttgatttcaacagattccactgccacttttcaccacgtgactggcagcgactcatcaacaacaattggggattccggcccaagagactcaacttcaaactcttcaacatccaagtcaaggaggtcacgacgaatgatggcgtcacaaccatcgccaataaccttaccagcacggttcaagtcttctcggactcggagtaccagcttccgtacgtcctcggctctgcgcaccagggctgcctccctccgttcccggcggacgtgttcatgattccgcaatacggctacctgacgctcaacaatggcagccaagccgtgggacgttcatccttttactgcctggaatatttcccttctcagatgctgagaacgggcaacaactttaccttcagctacacctttgaggaagtgcctttccacagcagctacgcgcacagccagagcctggaccggctgatgaatcctctcatcgaccaatacctgtattacctgaacagaactcaaaatcagtccggaagtgcccaaaacaaggacttgctgtttagccgtgggtctccagctggcatgtctgttcagcccaaaaactggctacctggaccctgttatcggcagcagcgcgtttctaaaacaaaaacagacaacaacaacagcaattttacctggactggtgcttcaaaatataacctcaatgggcgtgaatccatcatcaaccctggcactgctatggcctcacacaaagacgacgaagacaagttctttcccatgagcggtgtcatgatttttggaaaagagagcgccggagcttcaaacactgcattggacaatgtcatgattacagacgaagaggaaattaaagccactaaccctgtggccaccgaaagatttgggaccgtggcagtcaatttccagagcagcagcacagaccctgcgaccggagatgtgcatgctatgggagcattacctggcatggtgtggcaagatagagacgtgtacctgcagggtcccatttgggccaaaattcctcacacagatggacactttcacccgtctcctcttatgggcggctttggactcaagaacccgcctcctcagatcctcatcaaaaacacgcctgttcctgcgaatcctccggcggagttttcagctacaaagtttgcttcattcatcacccaatactccacaggacaagtgagtgtggaaattgaatgggagctgcagaaagaaaacagcaagcgctggaatcccgaagtgcagtacacatccaattatgcaaaatctgccaacgttgattttactgtggacaacaatggactttatactgagcctcgccccattggcacccgttaccttacccgtcccctg

SEQ ID NO: 664 - DNA, 2208 bp, synthetic construct
  misc_feature 1..2208: note = Description of Artificial Sequence: Synthetic polynucleotide
  source 1..2208: mol_type = other DNA
atggctgccgatggttatcttccagattggctcgaggacaacctctctgagggcattcgcgagtggtgggacttgaaacctggagccccgaagcccaaagccaaccagcaaaagcaggacgacggccggggtctggtgcttcctggctacaagtacctcggacccttcaacggactcgacaagggggagcccgtcaacgcggcggacgcagcggccctcgagcacgacaaggcctacgaccagcagctcaaagcgggtgacaatccgtacctgcggtataaccacgccgacgccgagtttcaggagcgtctgcaagaagatacgtcttttgggggcaacctcgggcgagcagtcttccaggccaagaagcgggttctcgaacctctcggtctggttgaggaaggcgctaagacggctcctggaaagaaacgtccggtagagcagtcgccacaagagccagactcctcctcgggcatcggcaagacaggccagcagcccgctaaaaagagactcaattttggtcagactggcgactcagagtcagtccccgatccacaacctctcggagaacctccagcaacccccgctgctgtgggacctactacaatggcttcaggcggtggcgcaccaatggcagacaataacgaaggcgccgacggagtgggtaatgcctcaggaaattggcattgcgattccacatggctgggcgacagagtcatcaccaccagcacccgcacctgggccttgcccacctacaataaccacctctacaagcaaatctccagtgcttcaacgggggccagcaacgacaaccactacttcggctacagcaccccctgggggtattttgatttcaacagattccactgccacttttcaccacgtgactggcagcgactcatcaacaacaattggggattccggcccaagagactcaacttcaaactcttcaacatccaagtcaaggaggtcacgacgaatgatggcgtcacaaccatcgctaataaccttaccagcacggttcaagtcttctcggactcggagtaccagcttccgtacgtcctcggctctgcgcaccagggctgcctccctccgttcccggcggacgtgttcatgattccgcaatacggctacctgacgctcaacaatggcagccaagccgtgggacgttcatccttttactgcctggaatatttcccttctcagatgctgagaacgggcaacaactttaccttcagctacacctttgaggaagtgcctttccacagcagctacgcgcacagccagagcctggaccggctgatgaatcctctcatcgaccaatacctgtattacctgaacagaactcaaaatcagtccggaagtgcccaaaacaaggacttgctgtttagccgtgggtctccagctggcatgtctgttcagcccaaaaactggctacctggaccctgttatcggcagcagcgcgtttctaaaacaaaaacagacaacaacaacagcaattttacctggactggtgcttcaaaatataacctcaatgggcgtgaatccatcatcaaccctggcactgctatggcctcacacaaagacgacgaagacaagttctttcccatgagcggtgtcatgatttttggaaaagagagcgccggagcttcaaacactgcattggacaatgtcatgattacagacgaaggggaaattaaagccactaaccctgtggccaccgaaagatttgggaccgtggcagtcaatttccagagcagcagcacagaccctgcgaccggagatgtgcatgctatgggagcattacctggcatggtgtggcaagatagagacgtgtacctgcagggtcccatttgggccaaaattcctcacacagatggacactttcacccgtctcctcttatgggcggctttggactcaagaacccgcctcctcagatcctcatcaaaaacacgcctgttcctgcgaatcctccggcggagttttcagctacaaagtttgcttcattcatcacccaatactccacaggacaagtgagtgtggaaattgaatgggagctgcagaaagaaaacagcaagcgctggaatcccgaagtgcagtacacatccaattatgcaaaatctgccaacgttgattttactgtggacaacaatggactttatactgagcctcgccccattggcacccgttaccttacccgtcccctg

SEQ ID NO: 665 - DNA, 2208 bp, synthetic construct
  misc_feature 1..2208: note = Description of Artificial Sequence: Synthetic polynucleotide
  source 1..2208: mol_type = other DNA
atggctgccgatggttatcttccagattggctcgaggacaacctctctgagggcattcgcgagtggtgggacttgaaacctggagccccgaaacctaaagccaaccagcaaaagcaggacgacggccggggtctggtgcttcctggctacaagtacctcggacccttcaacggactcgacaagggggagcccgtcaacgcggcggacgcagcggccctcgagcacgacaaggcctacgaccagcagctcaaagcgggtgacaatccgtacctgcggtataaccacgccgacgccgagtttcaggagcgtctgcaagaagatacgtcttttgggggcaacctcgggcgagcagtcttccaggccaagaagcgggttctcgaaccttttggtctggttgaggaaggcgctaagacggctcctggaaagaaacgtccggtagagcagtcgccacaagagccagactcctcctcgggcatcggcaagacaggccagcagcccgctaaaaagagactcaattttggtcagactggcgactcagagtcagtccccgacccacaacctctcggagaacctccagcaacccccgctgctgtgggacctactacaatggcttcaggcggtggcgcaccaatggcagacaataacgaaggcgccgacggagtgggtaatgcctcaggaaattggcattgcgattccacatggctgggcgacagagtcatcaccaccagcacccgcacctgggccttgcccacctacaataaccacctctacaagcaaatctccagtgcttcaacgggggccagcaacgacaaccactacttcggctacagcaccccctgggggtattttgatttcaacagattccactgccacttttcaccacgtgactggcagcgactcatcaacaacaattggggattccggcccaagagactcaacttcaagctcttcaacatccaagtcaaggaggtcacgacgaacgatggcgtcacgaccatcgctaataaccttaccagcacggttcaagtcttctcggattcagagtaccaactgccgtacgtcctcggctctgcgcaccagggctgcctccctccgttcccggcggacgtgtttatgattccgcagtacggctacctaacgctcaacaatggcagccaggccgtgggacgttcatccttttactgcccggaatatttcccttctcagatgctgagaacgggcaacaactttaccttcagctacacctttgaggaagtgcctttccacagcagctacgcgcacagccagagcctggaccggctgatgaatcctctcatcgaccaatacctgtattacctgaacagaactcaaaatcagtccggaagtgcccaaaacaaggacttgctgtttagccgtgggtctccagctggcatgtctgttcagcccaaaaactggctacctggaccctgttatcggcagcagcgcgtttctaaaacaaaaacagacaacaacaacagcaattttacctggactggtgcttcaaaatataacctcaatgggcgtgaatccatcatcaaccctggcactgctatggcctcacacaaagacgacaaagacaagttctttcccatgagcggtgtcatgatttttggaaaagagagcgccggagcttcaaatactgcattggacaatgtcatgatcacagatgaagaggaaattaaagccactaaccctgtggccaccgaaagatttgggaccgtggcagtcaatttccagagcagcaacacagaccccgcgaccggagatgtgcatgttatgggagccttacctggcatggtgtggcaagacagagacgtatacctgcagggtcccatttgggccaaaattcctcacacggatggacactttcacccgtctcctctcatgggcggctttggacttaagcacccgcctcctcaaatcctcatcaaaaacacgcctgttcctgcgaatcctccggcagagttttcggctacaaagtttgcttcattcatcacccagtactccacaggacaagtgagtgtggaaattgaatgggagctgcagaaagaaaacagcaagcgctggaatcccgaagtgcagtacacatccaattatgcaaaatctgccaacgttgatttcactgtggacaacaatggactttatactgagcctcgccccattggcacccgttaccttacccgtcccttg

SEQ ID NO: 666 - DNA, 2208 bp, synthetic construct
  misc_feature 1..2208: note = Description of Artificial Sequence: Synthetic polynucleotide
  source 1..2208: mol_type = other DNA
atggctgccgatggttatcttccagattggctcgaggacaacctctctgagggcattcgcgagtggtgggacttgaaacctggagccccgaaacctaaagccaaccagcaaaagcaggacgacggccggggtctggtgcttcctggctacaagtacctcggacccttcaacggactcgacaagggggagcccgtcaacgcggcggacgcagcggccctcgagcacgacaaggcctacgaccagcagctcaaagcgggtgacaatccgtacctgcggtataaccacgccgacgccgagtttcaggagcgtctacaagaagatacgtcttttgggggcaacctcgggcgagcagtcttccaggccaagaagcgggttctcgaaccttttggtctggttgaggaaggcgctaagacggctcctggaaagaaacgtccggtagagcagtcgccacaagagccagactcctcctcgggcatcggcaagacaggccagcagcccgctaaaaagagactcaattttggtcagactggcgactcagagtcagtccccgacccacaacctctcggagaacctccagcaacccccgctgctgtgggacctactacaatggcttcaggcggtggcgcaccaatggcagacaataacgaaggcgccgacggagtgggtaatgcctcaggaaattggcattgcgattccacatggctgggcgacagagtcatcaccaccagcacccgcacctgggccttgcccacctacaataaccacctctacaagcaaatctccagtgcttcaacgggggccagcaacgacaaccactacttcggctacagcaccccctgggggtattttgatttcaacagattccactgccacttttcaccacgtgactggcagcgactcatcaacaacaattggggattccggcccaagagactcaacttcaagctcttcaacatccaagtcaaggaggtcacgacgaacgatggcgtcacgaccatcgctaataaccttaccagcacggttcaagtcttctcggattcagagtaccaactgccgtacgtcctcggctctgcgcaccagggctgcctccctccgttcccggcggacgtgttcatgattccgcagtacggctacctaacgctcaacaatggcagccaggccgtgggacgttcatccttttactgcctggaatatttcccttctcagatgctgagaacgggcaacaactttaccttcagctacacctttgaggaagtgcctttccacagcagctacgcgcacagccagagcctggaccggctgatgaatcctctcatcgaccaatacctgtattacctgaacagaactcaaaatcagtccggaagtgcccaaaacaaggacttgctgtttagccgtgggtctccagctggcatgtctgttcagcccaaaaactggctacctggaccctgttatcggcagcagcgcgtttctaaaacaaaaacagacaacaacaacagcaattttacctggactggtgcttcaaaatataacctcaatgggcgtgaatccatcatcaaccctggcactgctatggcctcacacaaagacgacaaagacaagttctttcccatgagcggtgtcatgatttttggaaaagagagcgccggagcttcaaatactgcattggacaatgtcatgatcacagatgaagaggaaattaaagccactaaccctgtggccaccgaaagatttgggaccgtggcagtcaatttccagagcagcgacacagaccccgcgaccggagatgtgcatgttatgggagccttacctggcatggtgtggcaagacagagacgtatacctgcagggtcccatttgggccaaaattcctcacacggatggacactttcacccgtctcctctcatgggcggctttggacttaagcacccgcctcctcaaatcctcatcaaaaacacgcctgttcctgcgaatcctccggcagagttttcggctacaaagtttgcttcattcatcacccagtactccacaggacaagtgagtgtggaaattgaatgggagctgcagaaagaaaacagcaagcgctggaatcccgaagtgcagtacacatccaattatgcaaaatctgccaacgttgatttcactgtggacaacaatggactttatactgagcctcgccccattggcacccgttaccttacccgtcccttg

SEQ ID NO: 667 - DNA, 2208 bp, synthetic construct
  misc_feature 1..2208: note = Description of Artificial Sequence: Synthetic polynucleotide
  source 1..2208: mol_type = other DNA
atggctgccgatggttatcttccagattggctcgaggacaacctctctgagggcattcgcgagtggtgggacttgaaacctggagccccgaaacctaaagccaaccagcaaaagcagggcgacggccggggtctggtgcttcctggctacaagtacctcggacccttcaacggactcgacaagggggagcccgtcaacgcggcggacgcagcggccctcgagcacgacaaggcctacgaccagcagctcaaagcgggtgacaatccgtacctgcggtataaccacgccgacgccgagtttcaggagcgtctgcaagaagatacgtcttttgggggcaacctcgggcgagcagtcttccaggccaagaagcgggttctcgaaccttttggtctggttgaggaaggcgctaagacggctcctggaaagaaacgtccggtagagcagtcgccacaagagccagactcctcctcgggcatcggcaagacaggccagcagcccgctaaaaagagactcaattttggtcagactggcgactcagagtcagtccccgacccacaacctctcggagaacctccagcaacccccgctgctgtgggacctactacaatggcttcaggcggtggcgcaccaatggcagacaataacgaaggcgccgacggagtgggtaatgcctcaggaaattggcattgcgattccacatggctgggcgacagagtcatcaccaccaacactcgcacctgggccttgcccacctacaataaccacctctacaagcaaatctccagtgcttcaacgggggccagcaacgacaaccactacttcggctacagcaccccctgggggtattttgatttcaacagattccactgccacttttcaccacgtgactggcagcgactcatcaacaacaattggggattccggcccaagagactcaacttcaagctcttcaacatccaagtcaaggaggtcacgacgaacgatggcgtcacgaccatcgctaataaccttaccagcacggttcaagtcttctcggattcagagtaccaactgccgtacgtcctcggctctgcgcaccagggctgcctccctccgttcccggcggacgtgttcatgattccgcagtacggctacctaacgctcaacaatggcagccaggccgtgggacgttcatccttttactgcctggaatatttcccttctcagatgctgagaacgggcaacaactttaccttcagctacacctttgaggaagtgcctttccacagcagttacgggcacagccagagcctggaccggctgatgaatcttctcatcgaccaatacctgtattacctgaacagaactcaaaatcagtccggaagtgcccaaaacaaggacttgctgtttagccgtgggtctccagctggcatgtttgttcagcccaaaaactggctacctggaccctgttatcggcagcagcgcgtttctaaaacaaaaacagacaacaacaacagcaattttacctggactggtgcttcaaaatataacctcaatgggcgtgaatccatcatcaaccctggcactgctatggcctcacacaaagacgacgaagacaagttctttcccatgagcggtgtcatgatttttggaaaagagagcgccggagcttcaaatactgcattggacaatgtcatgatcacagatgaagaggaaattaaagccactaaccctgtggccaccgaaagatttgggaccgtggcagtcaatttccagagcagcagcacagaccccgcgaccggagatgtgcatgttatgggagccttacctggcatggtgtggcaagacagagacgtatacctgcagggtcccatttgggccaaaattcctcacacggatggacactttcacccgtctcctctcatgggcggctttggacttaagcacccgcctcctcaaatcctcatcaaaaacacgcctgttcctgcgaatcctccggcagagttttcggctacaaagtttgcttcattcatcacccagtactccacaggacaagtgagtgtggaaattgaatgggagctgcagaaagaaaacagcaagcgctggaatcccgaagtgcagtacacatccaattatgcaaaatctgccaacgttgatttcactgtggacaacaatggactttatactgagcctcgccccattggcacccgttaccttacccgtcccttg

SEQ ID NO: 668 - DNA, 2208 bp, synthetic construct
  misc_feature 1..2208: note = Description of Artificial Sequence: Synthetic polynucleotide
  source 1..2208: mol_type = other DNA
atggctgccgatggttatcttccagattggctcgaggacaacctctctgagggcattcgcgagtggtgggacttgaaacctggagccccgaaacctaaagccaaccagcaaaagcaggacgacggccggggtctggtgcttcctggctacaagtacctcggacccttcaacggactcgacaagggggagcccgtcaacgcggcggacgcagcggccctcgagcacgacaaggcctacgaccagcagctcaaagcgggtgacaatccgtacctgcggtataaccacgccgacgccgagtttcaggagcgtctgcaagaagatacgtcttttgggggcaacctcgggcgagcagtcttccaggccaagaagcgggttctcgaaccttttggtctggttgaggaaggcgctaagacggctcctggaaagaaacgtccggtagagcagtcgccacaagagccagactcctcctcgggcatcggcaagacaggccagcagcccgctaaaaagagactcaattttggtcagactggcgactcagagtcagtccccgacccacaacctctcggagaacctccagcaacccccgctgctgtgggacctactacaatggcttcaggcggtggcgcaccaatggcagacaataacgaaggcgccgacggagtgggtaatgcctcaggaaattggcattgcgattccacatggctgggcgacagagtcatcaccaccaacacccgcacctgggccttgcccacctacaataaccacctctacaagcaaatctccagtgcttcaacgggggccagcaacgacaaccactacttcggctacagcaccccctgggggtattttgatttcaacagattccactgccacttttcaccacgtgactggcagcgactcatcaacaacaattggggattccggcccaagagactcaacttcaagctcttcaacatccaagtcaaggaggtcacgacgaacgatggcgtcacgaccatcgctaataaccttaccagcacggttcaagtcttctcggattcagagtaccaactgccgtacgtcctcggctctgcgcaccagggctgcctccctccgttcccggcggacgtgttcatgattccgcagtacggctacctaatgctcaacaatggcagccaggccgtgggacgttcatccttttactgcctggaatatttcccttctcagatgctgagaacgggcaacaactttaccttcagctacacctttgaggaagtgcctttccacagcagctacgcgcacagccagagcctggaccggctgatgaatcctctcatcgaccaatacctgtattacctgaacagaactcaaaatcagtccggaagtgcccaaaacaaggacttgctgtttagccgtgggtctccagctggcatgtctgttcagcccaaaaactggctacctggaccctgttatcggcagcagcgcgtttctaaaacaaaaacagacaacaacaacagcaattttacctggactggtgcttcaaaatataacctcaatgggcgtgaatccatcatcaaccctggcactgctatggcctcacacaaagacgacgaagacaagttctttcccatgagcggtgtcatgatttttggaaaagagagcgccggagcttcaaatactgcattggacaatgtcatgatcacagatgaagaggaaattaaagccactaaccctgcggccaccgaaagatttgggaccgtggcagtcaatttccagagcagcagcacagaccccgcgaccggagatgtgcatgttatgggagccttacctggcatggtgtggcaagacagagacgtatacctgcagggtcccatttgggccaaaattcctcacacggatggacactttcacccgtctcctctcatgggcggctttggacttaagcacccgcctcctcaaatcctcatcaaaaacacgcctgttcctgcgaatcctccggcagagttttcggctacaaagtttgcttcattcatcacccagtactccacaggacaagtgagtgtggaaattgaatgggagctgcagaaagaaaacagcaagcgctggaatcccgaagtgcagtacacatccaattatgcaaaatctgccaacgttgatttcactgtggacaacaatggactttatactgagcctcgccccattggcacccgttaccttacccgtcccttg

SEQ ID NO: 669 - DNA, 2208 bp, synthetic construct
  misc_feature 1..2208: note = Description of Artificial Sequence: Synthetic polynucleotide
  source 1..2208: mol_type = other DNA
atggctgccgatggttatcttccagattggctcgaggacaacctctctgagggcattcgcgagtggtgggacttgaaacctggagccccgaaacctaaagccaaccagcaaaagcaggacgacggccggggtctggtgcttcctggctacaagtacctcggacccttcaacggactcgacaagggggagcccgtcaacgcggcggacgcagcggccctcgagcacgacaaggcctacgaccagcagctcaaagcgggtgacaatccgtacctgcggtataaccacgccgacgccgagtttcaggagcgtctgcaagaagatacgtcttttgggggcaacctcgggcgagcagtcttccaggccaagaagcgggttctcgaaccttttggtctggttgaggaaggcgctaagacggctcctggaaagaaacgtccggtagagcagtcgccacaagagccagactcctcctcgggcatcggcaagacgggccagcagcccgctaaaaagagactcaattttggtcagactggcgactcagagtcagtccccgacccacaacctctcggagaacctccagcaacccccgctgctgtgggacctactacaatggcttcaggcggtggcgcaccaatggcagacaataacgaaggcgccgacggagtgggtaatgcctcaggaaattggcattgcgattccacatggctgggcgacagagtcatcaccaccagcacccgcacctgggccttgcccacctacaataaccacctctacaagcaaatctccagtgcttcaacgggggccagcaacgacaaccactacttcggctacagcaccccctgggggtattttgatttcaacagattccactgccacttttcaccacgtgactggcagcgactcatcaacaacaattggggattccggcccaagagactcaacttcaagctcttcaacatccaagtcaaggaggtcacgacgaacgatggcgtcacgaccatcgctaataaccttaccagcacggttcaagtcttctcggattcagagtaccaactgccgtacgtcctcggctctgcgcaccagggctgcctccctccgttcccggcggacgtgttcatgattccgcagtacggctacctaacgctcaacaatggcagccaggccgtgggacgttcatccttttactgcctggaatatttcccttctcagatgctgagaacgggcaacaactttaccttcagctacacctttgaggaagtgcctttccacagcagctacgcgcacagccagagcctggaccggctgatgaatcctctcatcgaccaatacctgtattacctgaacagaactcaaaatcagtccggaagtgcccaaaacaaggacttgctgtttagccgtgggtctccagctggcatgtccgttcagcccaaaaactggctacctggaccctgttatcggcagcagcgcgtttctaaaacaaaaacagacaacaacaacagcaattttacctggactggtgcttcaaaatataacctcaatgggcgtgaatccatcatcaaccctggcactgctatggcctcacacaaagacgacgaagacaagttctttcccatgagcggtgtcatgatttttggaaaagagagcgccggagcttcaaatactgcattggacaatgtcatgatcacagatgaagaggaaattaaagccactaaccctgtggccaccgaaagatttgggaccgtggcagtcaatttccagagcagcagcacagaccccgcgaccggagatgtgcatgttatgggagccttacctggcatggtgtggcaagacagagacgtatacctgcagggtcccatttgggccaaaattcctcacacggatggacactttcacccgtctcctctcatgggcggctttggacttaagcacccgcctcctcaaatcctcatcaaaaacacgcctgttcctgcgaatcctccggcagagttttcggctacaaagtttgcttcattcatcacccagtactccacaggacaagtgagtgtggaaattgaatgggagctgcagaaagaaaacagcaagcgctggaatcccgaagtgcagtacacatccaattatgcaaaatctgccaacgttgatttcactgtggacaacaatggactttatactgagcctcgccccattggcacccgttaccttacccgtcccttg

SEQ ID NO: 670 - DNA, 2208 bp, synthetic construct
  misc_feature 1..2208: note = Description of Artificial Sequence: Synthetic polynucleotide
  variation 305: note = n is a, c, t, or g
  source 1..2208: mol_type = other DNA
atggctgccgatggttatcttccagattggctcgaggacaacctctctgagggcattcgcgagtggtgggacttgaaacctggagccccgaaacctaaagccaaccagcaaaagcaggacgacggccggggtctggtgcttcctggctacaagtacctcggacccttcaacggactcgacaagggggagcccgtcaacgcggcggacgcagcggccctcgagcacgacaaggcctacgaccagcagctcaaagcgggtgacaatccgtacctgcggtataaccacgccgacgccgagtttcaggngcgtctgcaagaagatacgtcttttgggggcaacctcgggcgagcagtcttccaggccaagaagcgggttctcgaaccttttggtctggttgaggaaggcgctaagacggctcctggaaagaaacgtccggtagagcagtcgccacaagagccagactcctcctcgggcatcggcaagacaggccagcagcccgctaaaaagagactcaattttggtcagactggcgactcagagtcagtccccgacccacaacctctcggagaacctccagcaacccccgctgctgtgggacctactacaatggcttcaggcggtggcgcaccaatggcagacaataacgaaggcgccgacggagtgggtaatgcctcaggaaattggcattgcgattccacatggctgggcggcagagtcatcaccaccagcacccgcacctgggccttgcccacctacaataaccacctctacaagcaaatctccagtgcttcaacgggggccagcaacgacaaccactacttcggccacagcaccccctgggggtattttgatttcaacagattccactgccacttttcaccacgtgactggcagcgactcatcaacaacaattggggattccggcccaagagactcaacttcaagctcttcaacatccaagtcaaggaggtcacgacgaacgatggcgtcacgaccatcgctaataaccttaccagcacggttcaagtcttctcggattcagagtaccaactgccgtacgtcctcggctctgcgcaccagggctgcctccctccgtccccggcggacgtgttcatgattccgcagtacggctacctaacactcaacaatggcagccaggccgtgggacgttcatccttttactgcctggaatatttcccttctcagatgctgagaacgggcaacaactttaccttcagctacacctttgaggaagtgcctttccacagcagctacgcgcacagccagagcctggaccggctgatgaatcctctcatcgaccaatacctgtattacctgaacagaactcaaaatcagtccggaagtgcccaaaacaaggacttgctgtttagccgtgggtctccagctggcatgtctgttcagcccaaaaactggctacctggaccctgttatcggcagcagcgcgtttctaaaacaaaaacagacaacaacaacagcaattttacctggactggtgcttcaaaatataacctcaatgggcgtgaatccatcatcaaccctggcactgctatggcctcacacaaagacgacaaagacaagttctttcccatgagcggtgtcatgatttttggaaaagagagcgccggagcttcaaatactgcattggacaatgtcatgatcacagatgaagaggaaattaaagccactaaccctgtggccaccgaaagatttgggaccgtggcagtcaatttccagagcagcaacacagaccccgcgaccggagatgtgcatgttatgggagccttacctggcatggtgtggcaagacagagacgtatacctgcagggtcccatttgggccaaaattcctcacacggatggacactttcacccgtctcctctcatgggcggctttggacttaagcacccgcctcctcaaatcctcatcaaaaacacgcctgttcctgcgaatcctccggcagagttttcggctacaaagtttgcttcattcatcacccagtactccacaggacaagtgagtgtggaaattgaatgggagctgcagaaagaaaacagcaagcgctggaatcccgaagtgcagtacacatccaattatgcaaaatctgccaacgttgatttcactgtggacaacaatggactttatactgagcctcgccccattggcacccgttaccttacccgtcccttg

SEQ ID NO: 671 - DNA, 2208 bp, synthetic construct
  misc_feature 1..2208: note = Description of Artificial Sequence: Synthetic polynucleotide
  source 1..2208: mol_type = other DNA
atggctgccgatggttattttccagattggctcgaggacaacctttctgagggcattcgcgagtggtgggacttgaaacctggagccccgaaacctaaagccaaccagcaaaagcaggacgacggccggggtctggtgcttcctggctacaagtacctcggacccttcaacggactcgacaagggggagcccgtcaacgcggcggacgcagcggccctcgagcacgacaaggcctacgaccagcagctcaaagcgggtgacaatccgtacctgcggtataaccacgccgacgccgagtttcaggagcgtctgcaagaagatacgtcttttgggggcaacctcgggcgagcagtcttccaggccaagaagcgggttctcgaaccttttggtctggttgaggaaggcgctaagacggctcctggaaagaaacgtccggtagagcagtcgccacaagagccagactcctcctcgggcatcggcaggacaggccagcagcccgctaaaaagagactcaattttggtcagactggcgactcagagtcagtccccgacccacaacctctcggagaacctccagcgacccccgctgctgtgggacctactacaatggcttcaggcggtggcgcaccaatggcagacaataacgaaggtgccgacggagtgggtaatgcctcaggaaattggcattgcgattccacatggctgggcgacagagtcatcaccaccagcacccgcacctgggccttgcccacctacaataaccacctctacaagcaaatctccagtgcttcaacgggggccagcaacgacaaccactacttcggctacagcaccccctgggggtattttgatttcaacagattccactgccacttttcaccacgtgactggcagcgactcatcaacaacaattggggattccggcccaagagactcaacttcaagctcttcaacatccaagtcaaggaggtcacgacgaacgatggcgtcacgaccatcgctaataaccttaccagcacggttcaagtcttctcggattcagagtaccaactgccgtacgtcctcggctctgcgcaccagggctgcctccctccgttcccggcggacgtgttcatgattccgcagtacggctacctaacgctcaacaatggcagccaggccgtgggacgttcatccttttactgcctggaatatttcccttctcagatgctgagaacgggcaacaactttaccttcagctacacctttgaggaagtgcctttccacagcagctacgcgcacagccagagcctggaccggctgatgaatcctctcatcgaccaatacctgtattacctgaacagaactcaaaatcagtccggaagtgcccaaaacaaggacttgctgtttagccgtgggtctccagctggcatgtctgttcagcccaaaaactggctacctggaccctgttatcggcagcagcgcgtttctaaaacaaaaacagacaacaacaacagcaattttacctggactggtgcttcaaaatataacctcaatgggcgtgaatccatcatcaaccctggcactgctatggcctcacacaaagacgacgaagacaagttctttcccatgagcggtgtcatgatttttggaaaagagagcgccggagcttcaaatactgcattggacaatgtcatgatcacagatgaagaggaaattaaagccactaaccctgtggccaccgaaagatttgggaccgtggcagtcaatttccagagcagcagcccagaccccgcgaccggagatgtgcatgttatgggagccttacctggcatggtgtggcaagacagagacgtatacctgcagggtcccatttgggccaaaattcctcacacggatggacactttcacccgtctcctctcatgggcggctttggacttaagcacccgcctcctcaaatcctcatcaaaaacacgcctgttcctgcgaatcctccggcagagttttcggctacaaagtttgcttcattcatcacccagtactccacaggacaagtgagtgtggaaattgaatgggagctgcagaaagaaaacagcaagcgctggaatcccgaagtgcagtacacatccaattatgcaaaatctgccaacgttgatttcactgtggacaacaatggactttatagtgagcctcgccccattggcacccgttaccttacccgtcccttg

SEQ ID NO: 672 - DNA, 2208 bp, synthetic construct
  misc_feature 1..2208: note = Description of Artificial Sequence: Synthetic polynucleotide
  source 1..2208: mol_type = other DNA
atggctgccgatggttatcttccagattggctcgaggacaacctctctgagggcattcgcgagtggtgggacttgaaacctggagccccgaaacctaaagccaaccagcaaaagcaggacgacggccggggtctggtgcttcctggctacaagtacctcggacccttcaacggactcgacaagggggagcccgtcaacgcggcggacgcagcggccctcgagcacgacaaggcctacgaccagcagctcaaagcgggtgacaatccgtacctgcggtataaccacgccgacgccgagtttcaggagcgtctgcaagaagatacgtcttttgggggcaacctcgggcgagcagtcttccaggccaagaagcgggttctcgaaccttttggtctggttgaggaaggcgctaagacggctcctggaaagaaacgtccggtagagcagtcgccacaagagccagactcctcctcgggcatcggcaagacaggccagcagcccgctaaaaagagactcaattttggtcagactggcgactcagagtcagtccccgacccacaacctctcggagaacctccagcaacccccgctgctgtgggacctactacaatggcttcaggcggtggcgcaccaatggcagacaataacgaaggcgccgacggagtgggtaatgcctcaggaaattggcattgcgattccacatggctgggcgacagagtcatcaccaccagcacccgcacctgggccttgcccacctacaataaccacctctacaagcaaacctccagtgcttcaacgggggccagcaacgacaaccactacttcggctacagcaccccctgggggtattttgatttcaacagattccactgccacttttcaccacgtgactggcagcgactcatcaacaacaattggggattccggcccaagagactcaacttcaagctcttcaacatccaagtcaaggaggtcacgacgaacgatggcgtcacgaccatcgctaataaccttaccagcacggttcaagtcttctcggattcagagtaccaactgccgtacgtcctcggctctgcgcaccagggctgcctccctccgttcccggcggacgtgttcatgattccgcagtacggctacctaacgctcaacaatggcagccaggccgtgggacgttcatccttttactgcctggaatatttcccttctcagatgctgagaacgggcaacaactttaccttcagctacacctttgaggaagtgcctttccacagcagctacgcgcacagccagagcctggaccggctgatgaatcctctcatcgaccaatacctgtattacctgaacagaactcaaaatcagtccggaagtgcccaaaacaaggacttgctgtttagccgtgggtctccagctggcatgtctgttcagcccaaaaactggctacctggaccctgttatcggcagcagcgcgtttctaaaacaaaaacagactacaacaacagcaattttacctggactggtgcttcaaaatataacctcaatgggcgtgaatccatcatcaaccctggcactgctatggcctcacacaaagacgacgaagacaagttctttcccatgagcggtgtcatgatttttggaaaagagagcgccggagcttcaaatactgcattggacaatgtcatgatcacagatgaagaggaaattaaagccactaaccctgtggccaccgaaagatttgggaccgtggcagtcaatttccagagcagcagcacagaccccgcgaccggagatgtgcatgttatgggagccttacctggcatggtgtggcaagacagagacgtatacctgcagggtcccatttgggccaaaattcctcacacggatggacactttcacccgtctcctctcatgggcggctttggacttaagcacccgcctcctcaaatcctcatcaaaaacacgcctgttcctgcgaatcctccggcagagttttcggctacaaagtttgcttcattcatcacccagtactccacaggacaagtgagtgtggaaattgaatgggagctgcagaaagaaaacagcaagcgctggaatcccgaagtgcagtacacatccaattatgcaaaatctgccaacgttgatttcactgtggacaacaatggactttatactgagcctcgccccattggcacccgttaccttacccgtcccttg

SEQ ID NO: 673 - DNA, 2208 bp, synthetic construct
  misc_feature 1..2208: note = Description of Artificial Sequence: Synthetic polynucleotide
  source 1..2208: mol_type = other DNA
atggctgccgatggttatcctccagattggctcgaggacaacctctctgagggcattcgcgagtggtgggacttgaaacctggagtcccgaaacctaaagccaaccagcaaaagcaggacgacggccggggtctggtgcttcctggctacaagtacctcggacccttcaacggactcgacaagggggagcccgtcaacgcggcggacgcagcggccctcgagcacgacaaggcctacgaccagcagctcaaagcgggtgacaatccgtacctgcggtataaccacgccgacgccgagtttcaggagcgtctgcaagaagatacgtcttttgggggcaacctcgggcgagcagtcttccaggccaagaagcgggttctcgaaccttttggtctggttgaggaaggcgctaagacggctcctggaaagaaacgtccggtagagcagtcgccacaagagccagactcctcctcgggcatcggcaagacaggccagcagcccgctaaaaagagactcaattttggtcagactggcgactcagagtcagtccccgacccacaacctctcggagaacctccagcaacccccgctgctgtgggacctactacaatggcttcaggcggtggcgcaccaatggcagacaataacgaaggcgccgacggagtgggtaatgcctcaggaaattggcattgcgattccacatggctgggcgacagagtcatcaccaccagcacccgcacctgggccttgcccacctacaataaccacctctacaagcaaatctccagtgcttcaacgggggccagcaacgacaaccactacttcggctacagcaccccctgggggtattttgatttcaacagattccactgccacttttcaccacgtgactggcagcgactcatcaacaacaattggggattccggcccaagagactcaacttcaagctcttcaacatccaagtcaaggaggtcacgacgaacgatggcgtcacgaccatcgctaataaccttaccagcacggttcaagtcttctcggattcagagtaccaactgccgtacgtcctcggctctgcgcaccagggctgcctccctccgttcccggcggacgtgttcatgattccgcagtacggctacctaacgctcaacaatggcagccaggccgtgggacgttcatccttttactgcctggaatatttcccttctcagatgctgagaacgggcaacaactttaccttcagctacacctttgaggaagtgcctttccacagcagctacgcgcacagccagagcctggaccggctgatgaatcctctcatcgaccaatacctgtattacctgaacagaactcaaaatcagtccggaagtgcccaaaacaaggacttgctgtttagccgtgggtctccagctggcatgtctgttcagcccaaaaactggctacctggaccctgttatcggcagcagcgcgtttctaaaacaaaaacagacaacaacaacagcaattttacctggactggtgcttcaaaatataacctcaatgggcgtgaatccatcatcaaccctggcactgctatggcctcacacaaagacgacgaagacaagttctttcccatgagcggtgtcatgatttttggaaaagagagcgccggagcttcaaatactgcattggacaatgtcatgatcacagatgaagaggaaattaaagccactaaccctgtggccaccgaaagatttgggaccgtggcagtcaatttccagagcagcagcacagaccccgcgaccggagatgtgcatgttatgggagccttacctggcatggtgtggcaagacagagacgtatacctgcagggtcccatttgggccaaaattcctcacacggatggacactttcacccgtctcctctcatgggcggctttggacttaagcacccgcctcctcaaatcctcatcaaaaacacgcctgttcctgcgaatcctccggcagagttttcggctacaaagtttgcttcattcatcacccagtactccacaggacaagtgagtgtggaaattgaatgggagctgcagaaagaaaacagcaagcgctggaatcccgaagtgcagtacacatccaattatgcaaaatctgccaacgttgatttcactgtggacaacaatggactttatactgagcctcgccccattggcacccgttaccttacccgtcccttg

SEQ ID NO: 674 - DNA, 2196 bp, synthetic construct
  misc_feature 1..2196: note = Description of Artificial Sequence: Synthetic polynucleotide
  source 1..2196: mol_type = other DNA
atggctgccgatggttatcttccagattggctcgaggacaacctctctgagggcattcgcgagtggtgggacttgaaacctggagccccgaaacctaaagccaaccagcaaaagcaggacgacggccggggtctggtgcttcctggctacaagtacctcggacccttcaacggactcgacaagggggagcccgtcaacgcggcggacgcagcggccctcgagcacgacaaggcctacgaccagcagctcaaagcgggtgacaatccgtacctgcggtataaccacgccgacgccgagtttcaggagcgtctgcaagaagatacgtcttttgggggcaacctcgggcgagcagtcttccaggccaagaagcgggttctcgaaccttttggtctggttgaggaaggcgctaagacggctcctggaaagaaacgtccggtagagcagtcgccacaagagccagactcctcctcgggcatcggcaagacaggccagcagcccgctaaaaagagactcaattttggtcagactggcgactcagagtcagtccccgacccacaacctctcggagaacctccagcaacccccgctgctgtgggacctactacaatggcttcaggcggtggcgcaccaatggcagacaataacgaaggcgccgacggagtgggtaatgcctcaggaaattggcattgcgattccacatggctgggcgacagagtcatcaccaccagcacccgcacctgggccttgcccacctacaataaccacctctacaagcaaatctccagtgcttcaacgggggccagcaacgacaaccactacttcggctacagcaccccctgggggtattttgatttcaacagattccactgccacttttcaccacgtgactggcagcgactcatcaacaacaattggggattccggcccaagagactcaacttcaagctcttcaacatccaagtcaaggaggtcacgacgaacgatggcgtcacgaccatcgctaataaccttaccagcacggttcaagccttctcggattcagagtaccaactgccgtacgtcctcggctctgcgcaccagggctgcctccctccgttcccggcggacgtgttcatgattccgcagtacggctacctaacgctcaacaatggcagccaggccgtgggacgttcatccttttactgcctggaatatttcccttctcagatgctgagaacgggcaacaactttaccttcagctacacctttgaggaagtgcctttccacagcagctacgcgcacagccagagcctggaccggctgatgaatcctctcatcgacccatacctgtattacctgaacagaactcaaaatcagtccggaagtgcccaaaacaaggacttgctgtttagccgtgggtctccagctggcatgtctgttcagcccaaaaactggctacctggaccctgttatcggcagcagcgcgtttctaaaacaaaaacagacaacaacaacagcaattttacctggactggtgcttcaaaatataacctcaatgggcgtgaatccatcatcaaccctggcactgctatggcctcacacaaagacgacgaagacaagttctttcccatgagcggtgtcatgatttttggaaaagagagcgccggagcttcaaatactgcattggacaatgtcatgatcacagatgaagaggaaattaaagccactaaccctgtggccaccgaaagatttgggaccgtggcagtcaatttccagagcagcagcacagaccccgcgaccggagatgtgcatgttatgggagccttacctggcatggtgtggcaagacagagacgtatacctgcagggtcccatttgggccaaaattcctcacacggatggacactttcacccgtctcctctcatgggcggctttggacttaagcacccgcctcctcaaatcctcatcaaaaacacgcctgttcctgcgaatcctccggcagagttttcggctacaaagtttgcttcattcatcacccagtactccacaggacaagtgagtgtggaaattgaatgggagctgcagaaagaaaacagcaagcgctggaatcccgaagtgcagtacacatccaattatgcaaaatctgccaacgttgatttcactgtggacaacaatggactttatactgagcctcgccccattggcacccgttacctt

SEQ ID NO: 675 - DNA, 2208 bp, synthetic construct
  misc_feature 1..2208: note = Description of Artificial Sequence: Synthetic polynucleotide
  source 1..2208: mol_type = other DNA
atggctgccgatggttatcttccagattggctcgaggacaacctctctgagggcattcgcgagtggtgggacttgaaacctggagccccgaaacctaaagccaaccagcaaaagcaggacgacggccggggtctggtgcttcctggctacaagtacctcggacccttcaacggactcgacaagggggagcccgtcaacgcggcggacgcagcggccctcgagcacgacaaggcctacgaccagcagctcaaagcgggtgacaatccgtacctgcggtataaccacgccgacgccgagtttcaggagcgtctgcaagaagatacgtcttttgggggcaacctcgggcgagcagtcttccaggccaagaagcgggttctcgaaccttttggtctggttgaggaaggcgctaagacggctcctggaaagaaacgtccggtagagcagtcgccacaagagccagactcctcctcgggcatcggcaagacaggccagcagcccgctaaaaagagactcaattttggtcagactggcgactcagagtcagtccccgacccacaacctctcggagaacctccagcaacccccgctgctgtgggacctactacaatggcttcaggcggtggcgcaccaatggcagacaataacgaaggcgccgacggagtgggtaatgcctcaggaaattggcattgcgattccacatggctgggcgacagagtcatcaccaccagcacccgcacctgggccttgcccacctacaataaccacctctacaagcaaatctccagtgcttcaacgggggccagcaacgacaaccactacttcggctacagcaccccctgggggtattttgatttcaacagattccactgccacttttcaccacgtgactggcagcgactcatcaacaacaattggggattccggcccaagagactcaacttcaagctcttcaacatccaagtcaaggaggtcacgacgaacgatggcgtcacgaccatcgctaataaccttaccagcacggttcaagtcttctcggattcagagtaccaactgccgtacgtcctcggctctgcgcaccagggctgcctccctccgttcccggcggacgtgttcatgattccgcagtacggctacctaacgctcaacaatggcagccaggccgtgggacgttcatccttttactgcctggaatatttcccttctcagatgctgagaacgggcaacaactttaccttcagctacacctttgaggaagtgcctttccacagcagctacgcgcacagccagagcctggaccggctgatgaatcctctcatcgaccaatacctgtattacctgaacagaactcaaaatcagtccggaagtgcccaaaacaaggacttgctgtttagccgtgggtctccagctggcatgtctgttcagcccaaaaactggctacctggaccctgttatcggcagcagcgcgtttctaaaacaaaaacagacaacaacaacagcaattttacctggactggtgcttcaaaatataacctcaatgggcgtgaatccatcatcaaccctggcactgctatggcctcacacaaagacgacgaagacaagttctttcccatgagcggtgtcatgatttttggaaaagagagcgccggagcttcaaatactgcattggacaatgtcatgatcacagatgaagaggaaattaaagccactaaccctgtggccaccgaaagatttgggaccgtggcagtcaatttccagagcagcagcacagaccccgcgaccggagatgtgcatgttatgggagccttacctggcatggtgtggcaagacagagacgtatacctgcagggtcccatttgggccaaaattcctcacacggatggacactctcacccgtctcctctcatgggcggctttggacttaagcacccgcctcctcaaatcctcatcaaaaacacgcctgttcctgcgaatcctccggcagagttttcggctacaaagtttgcttcattcatcacccagtactccacaggacaagtgagtgtggaaattgaatgggagctgcagaaagaaaacagcaagcgctggaatcccgaagtgcagtacacatccaattatgcaaaatctgccaacgttgatttcactgtggacaacaatggactttatactgagcctcgccccattggcacccgttaccttacccgtcccttg

SEQ ID NO: 676 - DNA, 2208 bp, synthetic construct
  misc_feature 1..2208: note = Description of Artificial Sequence: Synthetic polynucleotide
  source 1..2208: mol_type = other DNA
atggctgccgatggttatcttccagattggctcgaggacaacctctctgagggcattcgcgagtggtgggacttgaaacctggagccccgaaacctaaagccaaccagcaaaagcaggacgacggccggggtctggtgcttcctggctacaagtacctcggacccttcaacggactcgacaagggggagcccgtcaacgcggcggacgcagcggccctcgagcacgacaaggcctacgaccagcagctcaaagcgggtgacaatccgtacctgcggtataaccacgccgacgccgagtttcaggagcgtctgcaagaagatacgtcttttgggggcaacctcgggcgagcagtcttccaggccaagaagcgggttctcgaaccttttggtctggttgaggaaggcgctaagacggctcctggaaagaaacgtccggtagagcagtcgccacaagagccagactcctcctcgggcatcggcaagacaggccagcagcccgctaaaaagagactcaattttggtcagactggcgactcagagtcagtccccgacccacaacctctcggagaacctccagcaacccccgctgctgtgggacctactacaatggcttcaggcggtggcgcaccaatggcagacaataacgaaggcgccgacggagtgggtaatgcctcaggaaattggcattgcgattccacatggctgggcgacagagtcatcaccaccagcacccgcacctgggccttgcccacctacaataaccacctctacaagcaaatctccagtgcttcaacgggggccagcaacgacaaccactacttcggctacagcaccccctgggggtattttgatttcaacagattccactgccacttttcaccacgtgactggcagcgactcatcaacaacaattggggattccggcccaagagactcaacttcaagctcttcaacatccaagtcaaggaggtcacgacgaacgatggcgtcacgaccatcgctaataaccttaccagcacggttcaagtcttctcggattcagagtaccaactgccgtacgtcctcggctctgcgcaccagggctgcctccctccgttcccggcggacgtgttcatgattccgcagtacggctacctaacgctcaacaatggcagccaggccgtgggacgttcatccttttactgcctggaatatttcccttctcagatgctgagaacgggcaacaactttaccttcagctacacctttgaggaagtgcctttccacagcagctacgcgcacagccagagcctggaccggctgatgaatcctctcatcgacctatacctgtattacctgaacagaactcaaaatcagtccggaagtgcccaaaacaaggacttgctgtttagccgtgggtctccagctggcatgtctgttcagcccaaaaactggctacctggaccctgttatcggcagcagcgcgtttctaaaacaaaaacagacaacaacaacagcaattttacctggactggtgcttcaaaatataacctcaatgggcgtgaatccatcatcaaccctggcactgctatggcctcacacaaagacgacgaagacaagttctttcccatgagcggtgtcatgatttttggaaaagagagcgccggaacttcaaatactgcattggacaatgtcatgatcacagatgaagaggaaattaaagccactaaccctgtggccaccgaaagatttgggaccgtggcagtcaatttccagagcagcagcacagaccccgcgaccggagatgtgcatgttatgggagccttacctggcatggtgtggcaagacagagacgtatacctgcagggtcccatttgggccaaaattcctcacacggatggacactttcacccgtctcctctcatgggcggctttggacttaagcacccgcctcctcaaatcctcatcaaaaacacgcctgttcctgcgaatcctccggcagagttttcggctacaaagtttgcttcattcatcacccagtactccacaggacaagtgagtgtggaaattgaatgggagctgcagaaagaaaacagcaagcgctggaatcccgaagtgcagtacacatccaattatgcaaaatctgccaacgttgatttcactgtggacaacaatggactttatactgagcctcgccccattggcacccgttaccttacccgtcccttg

SEQ ID NO: 677 - DNA, 2208 bp, synthetic construct
  misc_feature 1..2208: note = Description of Artificial Sequence: Synthetic polynucleotide
  source 1..2208: mol_type = other DNA
atggctgccgatggttatcttccagattggctcgaggacagcctctctgagggcattcgcgagtggtgggacttgaaacctggagccccgaaacctaaagccaaccagcaaaagcaggacgacggccggggtctggtgcttcctggctacaagtacctcggacccttcaacggactcgacaagggggagcccgtcaacgcggcggacgcagcggccctcgagcacgacaaggcctacgaccagcagctcaaagcgggtgacaatccgtacctgcggtataaccacgccgacgccgagtttcaggagcgtctgcaagaagatacgtcttttgggggcaacctcgggcgagcagtcttccaggccaagaagcgggttctcgaaccttttggtctggttgaggaaggcgctaagacggctcctggaaagaaacgtccggtagagcagtcgccacaagagccagactcctcctcgggcatcggcaagacaggccagcagcccgctaaaaagagactcaattttggtcagactggcgactcagagtcagtccccgacccacaacctctcggagaacctccagcaacccccgctgctgtgggacctactacgatggcttcaggcggtggcgcaccaatggcagacaataacgaaggcgccgacggagtgggtaatgcctcaggaaattggcattgcgattccacatggctgggcgacagagtcatcaccaccagcacccgcacctgggccttgcccacctacaataaccacctctacaagcaaatctccagtgcttcaacgggggccagcaacgacaaccactacttcggctacagcaccccctgggggtattttgatttcaacagattccactgccacttttcaccacgtgactggcagcgactcatcaacaacaattggggattccggcccaagagactcaacttcaagctcttcaacatccaagtcaaggaggtcacgacgaacgatggcgtcacgaccatcgctaataaccttaccagcacggttcaagtcttctcggattcagagtaccaactgccgtacgtcctcggctctgcgcaccagggctgcctccctccgttcccggcggacgtgttcatgattccgcagtacggctacctaacgcccaacaatggcagccaggccgtgggacgttcatccttttactgcctggaatatttcccttctcagatgctgagaacgggcaacaactttaccttcagctacacctttgaggaagtgcctttccacagcagctacgcgcacagccagagcctggaccggctgatgaatcctctcatcgaccaataccagtattacctgaacagaactcaaaatcagtccggaagtgcccaaaacaaggacttgctgtttagccgtgggtctccagctggcatgtctgttcagcccaaaaactggctacctggaccctgttatcggcagcagcgcgtttctaaaacaaaaacagacaacaacaacagcaattttacctggactggtgcttcaaaatataacctcaatgggcgtgaatccatcatcaaccctggcactgctatggcctcacacaaagacgacgaagacaagttctttcccatgagcggtgtcatgatttttggaaaagagagcgccggagcttcaaatactgcattggacaatgtcatgatcacagatgaagaggaaattaaagccactaaccctgtggccaccgaaagatttgggaccgtggcagtcaatttccagagcagcagcacagaccccgcgaccggagatgtgcatgttatgggagccttacctggcatggtgtggcaagacagagacgtatacctgcagggtcccatttgggccaaaattcctcacacggatggacactttcacccgtctcctctcatgggcggctttggacttaagcacccgcctcctcaaatcctcatcaaaaacacgcctgttcctgcgaatcctccggcagagttttcggctacaaagtttgcttcattcatcacccagtactccacaggacaagtgagtgtggaaattgaatgggagctgcagaaagaaaacagcaagcgctggaatcccgaagtgcagtacacatccaattatgcaaaatctgccaacgttgatttcactgtggacaacaatggactttatactgagcctcgccccattggcacccgttaccttacccgtcccttg

SEQ ID NO: 678 - DNA, 2208 bp, synthetic construct; identical to SEQ ID NO: 669
  misc_feature 1..2208: note = Description of Artificial Sequence: Synthetic polynucleotide
  source 1..2208: mol_type = other DNA

SEQ ID NO: 679 - DNA, 2205 bp, synthetic construct
  misc_feature 1..2205: note = Description of Artificial Sequence: Synthetic polynucleotide
  source 1..2205: mol_type = other DNA
atggctgccgatggttatcttccagattggctcgaggacactctctctgaaggaataagacagtggtggaagctcaaacctggcccaccaccaccaaagcccgcagagcggcataaggacgacagcaggggtcttgtgcttcctgggtacaagtacctcggacccttcaacggactcgacaagggagagccggtcaacgaggcagacgccgcggccctcgagcacgacaaagcctacgaccggcagctcgacagcggagacaacccgtacctcaagtacaaccacgccgacgcggagtttcaggagcgccttaaagaagatacgtcttttgggggcaacctcggacgagcagtcttccaggcgaaaaagagggttcttgaacctctgggcctggttgaggaacctgttaagacggctccgggaaaaaagaggccggtagagcactctcctgtggagccagactcctcctcgggaaccggaaaggcgggccagcagcctgcaagaaaaagattgaattttggtcagactggagacgcagactcagtacctgacccccagcctctcggacagccaccagcagccccctctggtctgggaactaatacgatggctacaggcagtggcgcaccaatggcagacaataacgagggcgccgacggagtgggtaattcctcgggaaattggcattgcgattccacatggatgggcgacagagtcatcaccaccagcacccgaacctgggccctgcccacctacaacaaccacctctacaaacaaatttccagccaatcaggagcctcgaacgacaatcactactttggctacagcaccccttgggggtattttgacttcaacagattccactgccacttttcaccacgtgactggcaaagactcatcaacaacaactggggattccgacccaagagactcaacttcaagctctttaacattcaagtcaaagaggtcacgcagaatgacggtacgacgacgattgccaataaccttaccagcacggttcaggtgtttactgactcggagtaccagctcccgtacgtcctcggctcggcgcatcaaggatgcctcccgccgttcccagcagacgtcttcatggtgccacagtatggatacctcaccctgaacaacgggagtcaggcagtaggacgctcttcattttactgcctggagtactttccttctcagatgctgcgtaccggaaacaactttaccttcagctacacttttgaggacgttcctttccacagcagctacgctcacagccagagtctggaccgtctcatgaatcctctcatcgaccagtacctgtattacttgagcagaacaaacactccaagtggaaccaccacgcagtcaaggcttcagttttctcgggccggagcgagtgacattcgggaccagtctaggaactggcttcctggaccctgttaccgccagcagcgagtatcaaagacatctgcggataacaacaacagtgaatactcgtggactggagctaccaagtaccacctcaatggcagagactctctggtgaatccgggcccggccatggcaagccacaaggacgatgaagaaaagttttttcctcagagcggggttctcatctttgggaagcaaggctcagagaaaacaaatgtggacattgaaaaggtcatgattacagacgaagaggaaatcaggacaaccaatcccgtggctacggagcagtatggttctgtatctaccaacctccagagaggcaacagacaagcagctaccgcagatgtcaacacacaaggcgttcttccaggcatggtctggcaggacagagatgtgtaccttcaggggcccatctgggcaaagattccacacacggacggacattttcacccctctcccctcatgggtggattcggacttaaacaccctcctccacagattctcatcaagaacaccccggtacctgcgaatccttcgaccaccttcagtgcggcaaagtttgcttccttcatcacacagtactccacgggacaggtcagcgtggagatcgagtgggagctgcagaaggaaaacagcaaacgctggaatcccgaaattcagtacacttccaactacaacaagtctgttaatgtggactttactgtggacactaatggcgtgtattcagagcctcgccccattggcaccagatacctgactcgtaatctg

SEQ ID NO: 680 - protein, 736 aa, synthetic construct
  REGION 1..736: note = Description of Artificial Sequence: Synthetic polypeptide
MAADGYLPDWLEDNLSEGIREWWALKPGAPQPKANQQHQDNARGLVLPDYKYLGPGNGLDKGEPVNAADVAALEHDKAYDQQLKAGDNPYLKYNHADAEFQERLKEDTSFGGNLGRAVFQAKKRLLEPLGLVEEAAKTAPGKKRPVEQSPQEPDSSAGIGKSGAQPAKKRLNFGQTGDTESVPDPQPIGEPPAAPSGVGSLTMASGGGAPVADNNEGADGVGSSSGNWHCDSQWLGDGVITTSTRTWALPTYNNHLYKQISNSTSGGSSNDNAYFGYSTPWGYFDFNRFHCHFSPRDWQRLINNNWGFRPKRLNFKLFNIQVKEVTDNNGVKTIANNLTSTVQVFTDSDYQLPYVLGSAHEGCLPPFPADVFMIPQYGYLTLNDGSQAVGRSSFYCLEYFPSQMLRTGNNFQFSYEFENVPFHSSYAHSQSLDRLMNPLIDQYLHYLPKTINGSGQNQQTLKFSVAGPSNMAVQGRNYIPGPSYRQQRVSTTVTQNNNSEFAWPGASSWALNGRNSLMNPGPAMASYKEGEDSFFPLSGSLIFGKQGTGRDNVDADKVMITNEEEIKTTNPVATESYGQVATNHQSAQAQAQTGWVQNQGILPGMVWQDRDVYLQGPIWAKIPHTDGNFHPSPLMGGFGMKHPPPQTLIKNTPVPADPPTAFNKDKLNSFITQYSTGQVSVEIEWELQKENSKRWNPEIQYTSNYYKSNNVEFAVNTEGVYSEPRPIGTRYLTRNL

SEQ ID NO: 681 - protein, 736 aa, synthetic construct
  REGION 1..736: note = Description of Artificial Sequence: Synthetic polypeptide
MAADGYLPDWLEDNLSEGIREWWALKPGAPQPKANQQHQDNARGLVLPGYKYLGPGNGLDKGEPVNAADAAALEHDKAYDQQLKAGDNPYLKYNHADAEFQERLKEDTSFGGNLGRAVFQAKRRLLEPLGLVEEAAKTAPGKKRPVEQSPQEPDSSAGIGKSGAQPAKKRLNFGQTGDTESVPDPQPIGEPPAAPSGVGSLTMASGGGAPVADNNEGADGVGSSSGNWHCDSQWLGDRVITTSTRTWALPTYNNHLYKQISNSTSGGSSNDNAYFGYSTPWGYFDFNRFHCHFSPRDWQRLINNNWGFRPKRLNFKLFNIQIKEVTDNNGVKTIANNLTSTVQVFTDLDYQLPYVLGSAHEGCLPPFPADVFMIPQYGYLTLNDGSQAVGRSSFYCLEYFPSQMLRTGNNFQFSYEFENVPFHSSYAHSQSLDRLMNPLIDQYLHYLSKTINGSGQNQQTLKFSVAGPSNMAVQGRNYIPGPSYRQQRVSTTVTQNNNSEFAWPGASSWALNGRNSLMNPGPAMASYKEGEDSFFPLSGSLIFGKQGTGRDNVDADKVMITNEEEIKTTNPVATESYGQVATNHQSAQAQAQTGWVQNQGILPGMVWQDRDVYLQGPIWAKIPHTDGNFHPSPLMGGFGMKHPPPQTLIKNTPVPADPPTAFNKDKLNSFITQYSTGQVSVEIEWELQKENSKRWNPEIQYTSNYYKSNNVEFAVNTEGVYSEPRPIGTRYLTRNL

SEQ ID NO: 682 - protein, 736 aa, synthetic construct
  REGION 1..736: note = Description of Artificial Sequence: Synthetic polypeptide
MAADGYLPDWLEDNLSEGIREWWALKPGAPQPKANQQHQDNARGLVLPGYKYLGPGNGLDKGEPVSAADAAALEHDKAYDQQLKAGDNPYLKYNHADAEFQERLKEDTSFGGNLGRAVFQAKKRLLEPLGLVEEAAKTAPGKKRPVEQSPQEPDSSAGIGKSGAQPAKKRLNFGQTGDTESVSDPQPIGEPPAAPSGVGSLTMASGGGAPVADNNEGADGVGSSSGNWHCDSQWLGDRVITTSTRTWALPTYNNHLYKQISNSTSGGSSNDNAYFGYSTPWGYFDFNRFHCHFSPRDWQRLINNNWGFRPKRLNFKLFNIQVKEVTDNNGVKTIANNLTSTVQVFTDSDYQLPYVLGSAHEGCLPPSPADVFMIPQYGYLTLNDGSQAVGRSSFYCLEYFPSQMLRTGNNFQFSYEFENVPFHSSYAHSQSLDRLMNPLIDQYLHYLSKTINGSGQNQQTLKFSVAGPSNMAVQGRNYIPGPSYRQQRVSTTVTQNNNSEFAWPGASSWALNGRNSLMNPGPAMASYKEGEDSFFPLSGSLIFGKQGTGRDDVDADKVIITNEEEIKTTNPVATESYGQVATNHQSAQAQAQTGWVQNQGILPGMVWQDRDVYLQGPIWAKIPHTDGNFHPSPLMGGFGMKHPPPQTLIKNTPVPADPPTAFNKDKLNSFITQYSTGQVSVEIEWELQKENSKRWNPEIQYTSNYYKSNNVEFAVNTEGVYSEPRPIGTRYLTRNL

SEQ ID NO: 683 - protein, 736 aa, synthetic construct
  REGION 1..736: note = Description of Artificial Sequence: Synthetic polypeptide
MAADGYLPDWLEDNLSEGIREWWALKPGAPQPKANQQHQDNARGLVLPGYKYLGPGNGLDKGEPVNAADAAALEHDKAYDQQLKAGDNPYLKYNHAGAEFQERLKEDTSFGGNLGRAVFQAKKRLLEPLGLVEEAAKTAPGKKRPVEQSPQEPDSSAGIGKSGAQPAKKRLNFGQTGDTESVPDPQPIGEPPAAPSGVGSLTMASGGGAPVADNNEGAGGVGSSSGNWHCDSQWLGDRVVTTSTRTWALPTYNNHLYKQISNSTSGGSSNDNAYFGYSTPWGYFDFNRFHCHFSPRDWQRLINNNWGFRPKRLNFKLFNIQVKEVTDNNGVKTIANNLTSTVQVFTDSDYQLPYVLGSAHGGCLPPFPADVFMIPQYGYLTLNDGSQAVGRSSFYCLEYFPSQMLRTGNNFQFSYEFENVPFHSSYAHSQSLDRLMNPLIDQYLHYLSKTINGSGQNQQTLKFSVAGPSNMAVQGRSYIPGPSYRQQRVSTTVTQNNNSEFAWPGASSWALNGRNSLMNPGPAMASYKEGEDSFFPLSGSLIFGKQGTGRDNVDADKVMITNEEEIKTTNPVATESYGQVATNHQSAQAQAQTGWVQNQGILPGMVWQDRDVYLQGPIWAKIPHTDGNFHPSPLMGGFGMKHPPPQTLIKNTPVPADPPTAFNKDKLNSFITQYSTGQVSVEIEWELQKENSKRWNPEIQYTSNYYKSNNVEFAVNTEGVYSEPRPIGTRYLTRNL

SEQ ID NO: 684 - protein, 736 aa, synthetic construct
  REGION 1..736: note = Description of Artificial Sequence: Synthetic polypeptide
MAADGYLPDWLEDNLSEGIREWWALKPGAPQPKANQQHQDNARGLVLPGYKYLGPGNGLDKGEPVNAADAAALEHDKAYDQQLKAGDNPYLKYNHADAEFQERLKEDTSFGGNLGRAVFQAKKRLLEPLGLVEEAAKTAPGKKRPVEQSPQEPDSSAGIGKSGAQPAKKRLNFGQTGDTESVPDPQPIGEPPAAPSGVGSLTMASGGGAPVADNNEGADGVGSSSGNWHCDSQWLGDRVVTTSTRTWALPTYNNHLYKQISNSTSGGSSNDNAYFGYSTPWGYFDFNRFHCHFSPRDWQRLINNNWGFRPKRLNFKLFNIQVKEVTDNNGVKTIANNLTSTVQVFTDSDYQLPYVLGSAHEGCLPPFPADVFMIPQYGYLTLNDGSQAVGRSSFYCLEYFPSQMLRTGNNFQFSYEFENVPFHSSHAHSQSLDRLMNPLIDQYLHYLSKTINGSGQNQQTLKFSVAGHSNMAVQGRNYIPGPSYRQQRVSTTVTQNNNSEFAWPGASSWALNGRNSLMNPGPAMASYKEGEDSFFPLSGSLIFGKQGTGRDNVDADKVMITNEEEIKTTNPVATESYGQVATNHQSAQAQAQTGWVQNQGILPGMVWQDRDVYLQGPIWAKIPHTDGNFHPSPLMGGFGMKHPPPQTLIKNTPVPADPPTAFNKDKLNSFITQYSTGQVSVEIGWELQKENSKRWNPEIQYTSNYYKSNNVEFAVNTEGVYSEPRPIGTRYLTRNL

SEQ ID NO: 685 - protein, 736 aa, synthetic construct
  REGION 1..736: note = Description of Artificial Sequence: Synthetic polypeptide
MAADGYLPDWLEDNLSEGIREWWALKPGAPQPKANQQHQDNARGLVLPGYKYLGPGNGLDKGEPVNAADAAALEHDKAYDQQLKAGDNPYLKYNHADAEFQERLKEDTSFGGNLGRAVFQAKKRLLEPLGLVEEAAKTAPGKKRPVEQSPQEPDSSAGIGKSGAQPAKKRLNFGQTGDTESVPDPQPIGEPPAAPSGVGSLTMASGGGAPVADNNEGADGVGSSSGNWHCDSQWLGDRVITTSTRTWALPTYNNRLYKQISNSTSGGSSNDNAYFGYSTPWGYFDFNRFHCHFSPRDWQRLINNNWGFRPKRLNFKPFNIQVKEVTDNNGVKTIANNLTSTVQVFTDSDYQLPYVLGSAHEGCLPPFPADVFMIPQYGYLTLNDGSQAVGRSSFYCLEYFPSQMLRTGNNFQFSYEFENVPFHSSYAHSQSLDRLMNPLIDQYLHYLSKTINGSGQNQQTLKFSVAGPSNMAVQGRNYIPGPSYRQQRVSTTVTQNNNSEFAWPGASSWALNGRNSLMNPGPAMASYKEGEDSFFPLSGSLIFGKQGTGRDNVDADKVMITNEEEIKTTNPVATESYGQVATNHQSAQAQAQTGWVQNQGILPGMVWQDRDVYLQGPIWAKIPHTDGNFHPSPLMGGFGMKHPPPQTLIKNTPVPADPPTAFNKDKLNSFITQYSTGQVSVEIEWELQKENSKRWNPEIQYTSNYYKSNNVEFAVNTEGVYSEPRPIGTRYLTRNL

SEQ ID NO: 686 - protein, 736 aa, synthetic construct
  REGION 1..736: note = Description of Artificial Sequence: Synthetic polypeptide
MAADGYLPDWLEDNLSEGIREWWALKPGAPQPKANQQHQDNARGLVLPGYKYLGPGNGLDKGEPVNAADAAALEHDKAYDQQLKAGDNPYLKYNHADAEFQERLKEDTSFGGNLGRAVFQAKKRLLEPLGLVEEAAKTAPGKKRPVEQSPQEPDSSAGIGKSGAQPAKKRLNFGQTGDTESVPDPQPIGEPPAAPSGVGSLTMASGGGAPVADNNEGADGVGSSSGNWHCDSQWLGDRVITTSTRTWALPTYNNHLYKQISNSTSGGSSNDNAYFGYSTPWGYFDFNRFHCHFSPRDWQRLINNNWGFRPKRLNFKLFNIQVKEVTDNNGVKTIANNLTSTVQVFTDSDYQLPYVLGSAHEGCLPPFPADVFMIPQYGYLTLNDGSQAVGRSSFYCLEYFPSQMLRTGNNFQFSYEFENVPFHSSYAHSQSLDRLMNPLIDQYLHYLSKTINGSGQNQQTLKFSVAGPSNMAVQGRNYIPGPSYRQQRVSTTVTQNNNSEFAWPGASSWALNGRNSLMNPGPAMASYKEGEDSFFPLSGSLIFGKQGTGRDNVDADKVMITNEEEIKTTNPVATESYGQVATNHQSAQAQAQTGWVQNQGILPGMVWQDRDVYLQGPIWAKIPHTDGNFHPSPLMGGFGMKHPPPQTLIKNTPVPADPPTAFNKDKLNSFITQYSTGQVSVEIEWELQKENSKRWNPEIQYTSNYYKSNNVEFAVNTEGVYSEPRPIGTRYLTRNL

SEQ ID NO: 687 - protein, 736 aa, synthetic construct; identical to SEQ ID NO: 686
  REGION 1..736: note = Description of Artificial Sequence: Synthetic polypeptide

SEQ ID NO: 688 - protein, 736 aa, synthetic construct
  REGION 1..736: note = Description of Artificial Sequence: Synthetic polypeptide
MAADGYLPDWLEDNLSEGIREWWDLKPGAPKPKANQQKQDDGRGLVLPGYKYLGPFNGLDKGEPVNAADAAALEHDKAYDQQLKAGDNPYLRYNHADAEFQERLQEDTSFGGNLGRAVFQAKKRVLEPFGLVEEGAKTAPGKKRPVEQSPQEPDSSSGIGKSGQQPAKKRLNFGQTGDSESVPDPQPLGEPPATPAALGPTTMASGGGAPMADNNEGADGVGNASGNWHCDSTWLGDRVITTSTRTWALPTYNNHLYKQISSASTGASNDNHYFGYSTPWGYFDFNRFHCHFSPRDWQRLINNNWGFRPKRLNFKLFNIQVKEVTTNDGVTTIANNLTSTVQVFSDSEYQLPYVLGSAHQGCLPPFPADVFMIPQYGYLTLNNGSKAVGRSSFYCLEYFPSQMLRTGNNFTFSYTFEEVPFHSSYAHSQSLDRLMNPLIDQYLYYLNRTQNQSGSAQNKDLLFSRGSPAGMSVQPKNWLPGPCYRQQRVSKTKTDNNNSNFTWTGASKYNLNGRESIINPGTAMASHKDDEDKFFPMSGVMIFGKESAGASNTALDNVMITDEEEIKATNPVATERFGTVAVNFQSSSTDPATGDVHVMGALPGMVWQDRDVYLQGPIWAKIPHTDGHFHPSPLMGGFGLKHPPPQILIKNTPVPANPPAEFSATKFASFITQYSTGQVSVEIEWELQKENSKRWNPEVQYTSNYAKSANVDFTVDNNGLYTEPRPIGTRYLTRPL

SEQ ID NO: 689 - protein, 736 aa, synthetic construct
  REGION 1..736: note = Description of Artificial Sequence: Synthetic polypeptide
MAADGYLPDWLEDNLSEGIREWWDLKPGAPKPKANQQKQDDGRGLVLPGYKYLGPFNGLDKGEPVNAADAAALEHDKAYDQQLKAGDNPYLRYNHADAEFQERLQEDTSFGGNLGRAVFQAKKRVLEPLGLVEEGAKTAPGKKRPVEQSPQEPDSSSGIGKTGQQPAKKRLNFGQTGDSESVPDPQPLGEPPATPAAVGPTTMASGGGAPMADNNEGADGVGNASGNWHCDSTWLGDRVITTSTRTWALPTYNNHLYKQISSTSTGASNDNHYFGYSTPWGYFDFNRFHCHFSPRDWQRLINNNWGFRPKRLNFKLFNIQVKEVTTNDGVTTIANNLTSTVQVFSDSEYQLPYVLGSAHQGCLPPFPADVFMIPQYGYLTLNNGSQAVGRSSFYCLEYFPSQMLRTGNNFTFSYTFEEVPFHSSYAHSQSLDRLMNPLIDQYLYYLNRTQNQSGSAQNKDLLFSRGSPAGMSVQPKNWLPGPCYRQQRVSKTKTDNNNSNFTWTGASKYNLNGRESIINPGTAVASHKDDEDKFFPMSGVMIFGKESAGASNTALDNVMITDEEEIKATNPVATERFGTVAVNFQSSSTDPATGDVHAMGALPGMVWQDRDVYLQGPIWAKIPHTDGHFHPSPLMGGFGLKNPPPQILIKNTPVPANPPAEFSATKFASFITQYSTGQVSVEIEWELQKENSKRWNPEVQYTSNYAKSANVDFTVDNNGLYTEPRPIGTRYLTRPL

SEQ ID NO: 690 - protein, 736 aa, synthetic construct
  REGION 1..736: note = Description of Artificial Sequence: Synthetic polypeptide
MAADGYLPDWLEDNLSEGIREWWALKPGAPQPKANQQHQDNARGLVLPGYKYLGPGNGLDKGEPVNAADAAALEHDKAYDQQLKAGDNPYLKYNHADAEFQERLKEDTSFGGNLGRAVFQAKKRLLEPLGLVEEAAKTAPGKKRPVEQSPQEPDSSAGIGKSGAQPAKKRLNFGQTGDTESVPDPQPIGEPPAAPSGVGSLTMASGGGAPVADNNEGADGVGSSSGNWHCDSQWLGDRVITTSTRTWALPTYNNHLYKQISNSTSGGSSNDNAYFGYSTPWGYFDFNRFHCHFSPRDWQRLINNNWGFRPKRLNFKLFNIQVKEVTDNNGVKTIANNLTSTVQVFTDSDYQLPYVLGSAHEGCLPPFPADVFMIPQYGYLTLNDGSQAVGRSSFYCLEYFPSQMLRTGNNFQFGYEFENVPFHSSYAHSQSLDRLMNPLIDQYLYYLSKTINGSGQNQQTLKFSVAGPSNMAVQGRNYIPGPSYRQQRVSTTVTQNNNSEFAWPGASSWALNGRNSLMNPGPAMASHKEGEDRFFPLSGSLIFGKQGTGRDNVDADKVMITNEEEIKTTNPVATESYGQVATNHQSAQAQAQTGWVQNQGILPGMVWQDRDVYLQGPIWAKIPHTDGNFHPSPLMGGFGMKHPPPQILIKNTPVPADPPTAFNKDKLNSFITQYSTGQVSVEIEWELQKENSKRWDPEIQYTSNYYKSNNVEFAVNTEGVYSEPRPIGTRYLTRNL

SEQ ID NO: 691 - protein, 736 aa, synthetic construct
  REGION 1..736: note = Description of Artificial Sequence: Synthetic polypeptide
MAADGYLPDWLEDNLSEGIREWWALKPGAPQPKANQQHQDNARGLVLPGYKYLGPGNGLDKGEPVNAADAAALEHDKAYDQQLKAGDNPYLKYNHADAEFQERLKEDTSFGGNLGRAVFQAKKRLLEPLGLVEEAAKTAPGKKRPVEQSPQEPDSSAGIGKSGAQPAKKRLNFGQTGDTESVPDPQPIGEPPAAPSGVGSLTMASGGGAPVADNNEGADGVGSSSGNWHCDSQWLGDRVITTSTRTWALPTYNNHLYKQISNSTSGGSSNDNAYFGYSTPWGYFDFNRFHCRFSPRDWQRLINNNWGFRPKRLNFKLFNIQVKEVTDNNGVKTIANNLTSTVQVFTDSDYQLPYVLGSAHEGCLPPFPADVFMIPQYGYLTLNDGSQAVGRSSFYCLEYFPSQMLRTGNNFQFSYEFENVPFHSSYAHSQSLDRLMNPLIDQYLYYLSKTINGSGQNQQTLKFSVAGPSNMAVQGRNYIPGPSYRQQRVSTTVTQNNNSEFAWPGASSWALNGRNSLMNPGPAMASHKEGEDRFFPLSGSLIFGKQGTGRDNVDADKVMITNEEEIKTTNPVATESYGQVATNHQSAQAQAQTGWVQNQGILPGMVWQDRDVYLQGPIWAKIPHTDGNFHPSPLMGGFGMKHPPPQILIKNAPVPADPPTAFNKDKLNSFITQYSTGQVSVEIEWELQKENSKRWNPEIQYTSNYYKSNNVEFAVNTEGVYSEPRPIGTRYLTRNL

SEQ ID NO: 692 - protein, 736 aa, synthetic construct
  REGION 1..736: note = Description of Artificial Sequence: Synthetic polypeptide
MAADGYLPDWLEDNLSEGIREWWALKPGAPQPKANQQHQDNARGLVLPGYKYLGPGNGLDKGEPVSAADAAALEHDKAYDQQLKAGDNPYLKYNHADAEFQERLKEDTSFGGNLGRAVFQAKKRLLEPLGLVEEAAKTAPGKKRPVEQSPQEPDSSAGIGKSGAQPAKKRLNFGQTGDTESVPDPQPIGEPPAAPSGVGSLTMASGGGAPVADNNEGADGVGSSSGNWHCDSQWLGDRVITTSTRTWALPTYNNHLYKQISNSTSGGSSNDNAYFGYSTPWGYFDFNRFHCHFSPRDWQRLINNNWGFRPKRLNFKLFNIQVKEVTDNNGVKTIANNLTSTVQVFTDSDYQLPYVLGSAHEGCLPPFPADVFMIPQYGYLTLNDGSQAVGRSSFYCLEYFPSQMLRTGNNFQFSYEFENVPFHSSYAHSQSLDRLMNPLIDQYLYYLSKTINGSGQNQQTLKFSVAGPSNMAVQGRNYIPGPSYRQQRVSTTVTQNNNSEFAWPGASSWALNGRNSLMNPGPAMASHKEGEDRFFPLSGSLIFGKQGTGRDNVDADKVMITNEEEIKTTNPVATESYGQVATNHQSAQAQAQTGWVQNQGILPGMVWQDRDVYLQGPIWAKIPHTDGNFHPSPLMGGFGMKHPPPQILIKNTPVPADPPTAFNKDKLNSFITQYSTGQVSVEIEWELQKENSKRWNPEIQYTSNYYKSNNVEFAVNTEGVYSEPRPIGTRYLTRNL

SEQ ID NO: 693 - protein, 736 aa, synthetic construct
  REGION 1..736: note = Description of Artificial Sequence: Synthetic polypeptide
MAADGYLPDWLEDNLSEGIREWWALKPGAPQPKANQQHQDNARGLVLPGYKYLGPGNGLDKGEPVNAADAAALEHDKAYDQQLKAGDNPYLKYNHADAEFQERLKEDTSFGGNLGRAVFQAKKRLLEPLGLVEEAAKTAPGKKRPVEQSPQEPDSSAGIGKSGAQPAKKRLNFGQTGDTESVPDPQPIGEPPAAPSGVGSLTMASGGGAPVADNNEGADGVGSSSGNWHCDSQWLGDRVITTSTRTWALPTYNNHLYKQISNSTSGGSSNDNAYFGYSTPWGYFDFNRFHCHFSPRDWQRLINNNWGFRPKRLNFKLFNIQVKEVTDNNGVKTIANNLTSTVQVFTDSDYQLPYVLGSAHEGCLPPFPADVFMIPQYGYLTLNDGSQAVGRSSFYCLEYFPSQMLRTGNNFQFSYEFENVPFHSSYAHSQSLDRLMNPLIDQYLYYLSKTINGSGQNQQTLKFSVAGPSNTAVQGRNYIPGPSYRQQRVSTTVTQNNNSEFAWPGASSWALNGRNSLMNPGPAMASHKEGEDRFFPLSGSLIFGKQGTGRDNVDADKVMITNEEEIKTTNPVATESYGQVATNHQSAQAQAQTGWVQNQGILPGMVWQDRDVYLQGPIWAKIPHTDGNFHPSPLMGGFGMKHPPPQILIKNTPVPADPPTAFNKDKLNSFITQYSTGQVSVEIEWELQKENSKRWNPEIQYTSNYYKSNNVEFAVNTEGVYSEPRPIGTRYLTRNL

SEQ ID NO: 694 - protein, 736 aa, synthetic construct
  REGION 1..736: note = Description of Artificial Sequence: Synthetic polypeptide
MAADGYLPDWLEDNLSEGIREWWALKPGAPQPKANQQHQDNARGLVLPGYKYLGPGNGLDKGEPVNAADAAALEHDKAYDQQLKAGDNPYLKYNHADAEFQERLKEDTSFGGNLGRAVFQAKKRLLEPLGLVEEAAKTAPGKKRPVEQSPQEPDSSAGIGKSGAQPAKKRLNFGQTGDTESVPDPQPIGEPPAAPSGVGSLTMASGGGAPVADNNEGADGVGSSSGNWHCDSQWLGDRVITTSTRTWALPTYNNHLYKQISNSTSGGSSNDNAYFGYSTPWGYFDFNRFHCHFSPRDWQRLINNNWGFRPKRLNFKLFNIQVKEVTDNNGVKTIANNLTSTVQVFTDSDYQLPYVLGSAHEGCLPPFPADVFMIPQYGYLTLNDGSQAVGRSSFYCLEYFPSQMLRTGSNFQFSYEFENVPFHSSYAHSQSLDRLMNPLIDQYLYYLSKTINGSGQNQQTLKFSVAGPSNMAVQGRNYIPGPSYRQQRVSTTVTQNNNSEFAWPGASSWALNGRNSLMNPGPAMASHKEGEDRFFPLSGSLIFGKQGTGRDNVDADKVMITNEEEIKTTNPAATESYGQVATNHQSAQAQAQTGWVQNQGILPGMVWQDRDVYLQGPIWAKIPHTDGNFHPSPLMGGFGMKHPPPQILIKNTPVPADPPTAFNKDKLNSFITQYSTGQVSVEIEWELQKENSKRWNPEIQHTSNYYKSNNVEFAVNTEGVYSEPRPIGTRYLTRNL

SEQ ID NO: 695 - protein, 736 aa, synthetic construct
  REGION 1..736: note = Description of Artificial Sequence: Synthetic polypeptide
MAADGYLPDWLEDNLSEGIREWWALKPGAPQPKANQQHQDNARGLVLPGYKYLGPGNGLDKGEPVNAADAAALEHDKAYDQQLKAGDNPYLKYNHADAEFQERLKEDTSFGGNLGRAVFQAKKRLLEPLGLVEEAAKTAPGKKRPVEQSPQEPDSSAGIGKSGAQPAKKRLNFGQTGDTESVPDPQPIGEPPAAPSGVGSLTMASGGGAPVADNNEGADGVGSSSGNWHCDSQWLGDRVITTSTRTWALPTYNNHLYKQISNSTSGGSSNDNAYFGYSTPWGYFDFNRFHCHFSPRDWQRLINNNWGFRPKRLNFRLFNIQVKEVTDNNGVKTIANNLTSTVQVFTDSDYQLPYVLGSAHEGCLPPFPADVFMIPQYGYLTLNDGSQAVGRSSFYCLEYFPSQMLRTGNNFQFSYEFENVPFHSSYAHSQSLDRLMNPLIDQYLYYLSKTINGSGQNQQTLKFSVAGPSNMAVQGRNYIPGPSYRQQRVSTTVTQNNNSEFAWPGASSWALNGRNSLMNPGPAMASHKEGEDRFFPLSGSLIFGKQGTGRDNVDADKVMITNEEEIKTTNPVATESYGQVATNHQSAQAQAQTGWVQSQGILPGMVWQDRDVYLQGPIWAKIPHTDGNFHPSPLMGGFGMKHPPPQILIKNTPVPADPPTAFNKDKLNSFITQYSTGQVSVEIEWELQKENSKRWNPEIQYTSNYYKSNNVEFAVNTEGVYSEPRPIGTRYLTRNL

SEQ ID NO: 696 - protein, 735 aa, synthetic construct
  REGION 1..735: note = Description of Artificial Sequence: Synthetic polypeptide
MAADGYLPDWLEDNLSEGIREWWALKPGAPQPKANQQHQDNARGLVLPGYKYLGPGNGLDKGEPVNAADAAALEHDKAYDQQLKAGDNPYLKYNHADAEFQERLKEDTSFGGNLGRAVFQAKKRLLEPLGLVEEAAKTAPGKKRPVEQSPQEPDSSAGIGKSGAQPAKKRLNFGQTGDTESVPDPQPIGEPPAAPSGVGSLTMASGGGAPVADNNEGADGVGSSSGNWHCDSQWLGDRVITTSTRTWALPTYNNHLYKQISNSTSGGSSNDNAYFGYSTPWRYFDFNRFHCHFSPRDWQRLINNWGFRPKRLNFKLFNIQVKEVTDNNGVKTIANNLTSTVQAFTDSDYQLPYVLGSAHEGCLPPFPADVFMIPQYGYLTLNDGSQAVGRSSFYCLEYFPSQMLRTGNNFQFSYEFENVPFHSSYAHSQSLDRLMNPLIDQYLYYLSKTINGSGQNQQTLKFSVAGPSNMAVQGRNYIPGPSYRQQRVSTTVTQNNNSEFAWPGASSWALNGRNSLMNPGPAMASHKEGEDRFFPLSGSLIFGKQGTGRDNVDADKVMITNEEEIKTTNPVATESYGQVATNHQSAQAQAQTGWVQNQGILPGMVWQDRDVYLQGPIWAKIPHTDGNFHPSPLMGGFGMKHPPPQILIKNTPVPADPPTAFNKDELNSFITQYSTGQVSVEIEWELQKENSKRWNPEIQYTSNYYKSNNVEFAVNTEGVYSEPRPIGTRYLTRNL

SEQ ID NO: 697 - protein, 735 aa, synthetic construct
  REGION 1..735: note = Description of Artificial Sequence: Synthetic polypeptide
MAADGYLPDWLEDNLSEGIREWWALKPGAPQPKANQQHQDNARGLVLPGYKYLGPGNGLDKGEPVNAADAAALEHDKAYDQQLKAGDNPYLKYNHADAEFQERLKEDTSFGGNLGRAVFQDKKRLLEPLGLVEEAAKTAPGKKRPVEQSPQEPDSSAGIGKSGAQPAKKRLNFGQTGDTESVPDPQPIGEPPAAPSGVGSLTMASGGGAPVADNNEGADGVGSSSGNWHCDSQWLGDRVITTSTRTWALPTYNNHLYKQISNSTSGGSSNDNAYFGYSTPWGYFDFNRFHCHFSPRDWQRLINNWGFRPKRLNFKLFNIQVKEVTDNNGVKTIANNLTSTVQVFTDSDYQLPYVLGSAHEGCLPPFPADVFMIPQYGYLTLNDGSQAVGRSSFYCLEYFPSQMLRTGNNFQFSYEFENVPFHSSYAHSQSLDRLMNPLIDQYLYYLSKTINGSGQNQQTLKFSVAGPSNMAVQGRNYIPGPSYRQQRVSTTVTQNNNSEFAWPGASSWALNGRNSLMNPGPAMASHKEGEDRFFPLSGSLIFGKQGTGRDNVDADKVMITNEEEIKTTNPVATESYGQVATNHQSAQAQAQTGWVQNQGILPGMVWQDRDVYLQGPIWAKIPHTDGNFHPSPLMGGFGMKHPPPQILIKNTPVPADPPTAFNKDKLNSFITQYSTGQVSVEIEWELQKENSKRWNPEIQYTSNYYKSNNVEFAVNTEGVYSEPRPIGTRYLTRNL

SEQ ID NO: 698 - protein, 736 aa, synthetic construct
  REGION 1..736: note = Description of Artificial Sequence: Synthetic polypeptide
MAADGYLPDWLEDNLSEGIREWWALKPGAPQPKANQQHQDNARGLVLPGYKYLGPGNGLDKGEPVNAADAAALEHDKAYDQQLKAGDNPYLKYNHADAEFQERLKEDTSFGGNLGRAVFQAKKRLLEPLGLVEEAAKTAPGKKRPVEQSPQEPDSSAGIGKSGAQPAKKRLNFGQTGDTESVPDPQPIGEPPAAPSGVGSLTMASGGGAPVADNNEGADGVGSSSGNWHCDSQWLGDRAITTSTRTWALPTYNNHLYKQISNSTSGGSSNDNAYFGYSTPWGYFDFNRFHCHFSPRDWQRLINNNWGFRPKRLNFKLFNIQVKEVTDNNGVKTIANNLTSTVQVFTDSDYQLPYVLGSAHEGCLPPFPADVFMIPQYGYLTLNDGSQAVGRSSFYCLEYFPSQMLRTGNNFQFSYEFENVPFHSSYAHSQSLDRLMNPLIDQYLYYLSKTINGSGQNQQTLKFSVAGPSNMAVQGRNYIPGPSYRQQRVSTTVTQNNNSEFAWPGASSWALNGRNSLMNPGPAMASHKEGEDRFFPLSGSLIFGKQGTGRDNVDADKVMTTNEEEIKTTNPVATESYGQVATNHQSAQAQAQTGWVQNQGILPGMVWQDRDVYLQGPIWAKIPHTDGNFHPSPLMGGFGMKHPPPQILIKNTPVPADPPTAFNKDKLNSFITQYSTGQVSVEIEWELQKENSKRWNPEIQYTSNYYKSNNVEFAVNTEGVYSEPRPIGTRYLTRNL

SEQ ID NO: 699 - protein, 736 aa, synthetic construct
  REGION 1..736: note = Description of Artificial Sequence: Synthetic polypeptide
MAADGYLPDWLEDNLSEGIREWWALKPGAPQPKANQQHQDNARGLVLPGYKYLGPGNGLDKGEPVNAADAAALEHDKAYDQQLKAGDNPYLKYNHADAEFQERLKEDTSFGGNLGRAVFQTKKRLLEPLGLVEEAAKTAPGKKRPVEQSPQEPGSSAGIGKSGAQPAKKRLNFGQTGDTESVPDPQPIGEPPAAPSGVGSLTMASGGGAPVADNNEGADGVGSSSGNWHCDSQWLGDRVITTSTRTWALPTYNNHLYKQISNSTSGGSSNDNAYFGYSTPWGYFDFNRFHCHFSPRDWQRLINNNWGFRPKRLNFKLFNIQVKEVTDNNGVKTIANNLTSTVQVFTDSDYQLPYVLGSAHEGCLPPFPADVFMIPQYGYLTLNDGSQAVGRSSFYCLEYFPSQMLRTGNNFQFSYEFENVPFHSSYAHSQSLDRLMNPLIDQYLHYLSKTINGSGQNQQTLKFSVAGPSNMAVQGRNYIPGPSYRQQRVSTTVTQNNNSEFAWPGASSWALNGRNSLMNPGPAMASHKEGEDRFFPLSGSLIFGKQGTGRDNVDADKVMITNEEEIKTTNPVATESYGQVATNHQSAQAQAQTGWVQNQGILPGMVWQDRDVYLQGPIWAKIPHTDGNFHPSPLMGGFGMKHPPPQILIKNTPVPADPPTAFNKDKLNSFITQYSTGQVSVEIEWELQKENSKRWNPEIQYTSNYYKSNNVEFAVNTEGVYSEPRPIGTRYLTRNL

SEQ ID NO: 700 - protein, 736 aa, synthetic construct
  REGION 1..736: note = Description of Artificial Sequence: Synthetic polypeptide
MAADGYFPDWLEDNLSEGIREWWALKPGAPQPKANQQHQDNARGLVLPGYKYLGPGNGLDKGEPVNAADAAALEHDKAYDQQLKAGDNPYLKYNHADAEFQERLKEDTSFGGNLGRAVFQAKKRLLEPLGLVEEAAKTAPGKKRPVEQSPQEPDSSAGIGKSGAQPAKKRLNFGQTGDTESVPDPQPIGESPAAPSGVGSLTMASGGGAPVADNNEGADGVGSSSGNWHCDSQWLGDRVITTSTRTWALPTYNNHLYKQISNSTSGGSSNDNAYFGYSTPWGYFDFNRFHCHFSPRDWQRLINNNWGFRPKRLNFKLFNIQVKEVTDNNGVKTIANNLTSTVQVFTDSDYQLPYVLGSAHEGCLPPFPADVFMIPQYGYLTLNDGSQAVGRSSFYCLEYLPSQMLRTGNNFQFSYEFENVPFHSSYAHSQSLDRLMNPLIDQYLHYLSKTINGSGQNQQTLKFSVAGPSNMAVQGRNYIPGPSYRQQRVSTTVTQNNNSEFAWPGASSWALNGRNSLMNPGPAVASHKEGEDRFFPLSGSLIFGKQGTGRDNVDADKVMITNEEEIKTTNPVATESYGQVATNHQSAQAQAQTGWVQNQGILPGMVWQDRDVYLQGPIWAKIPHTDGNFHPSPLMGGFGMKHPPPQILIKNTPVPADPPTAFNKDKLNSFITQYSTGQVSVEIEWELQKENSKRWNPEIQYTSNYYKSNNVEFAVNTEGVYSEPRPIGTRYLTRNL

SEQ ID NO: 701 - protein, 736 aa, synthetic construct
  REGION 1..736: note = Description of Artificial Sequence: Synthetic polypeptide
MAADGYLPDWLEDNLSEGIREWWALKPGAPQPKANQQHQDNARGLVLPGYKYLGPGNGLDKGEPVNAADAAALEHDKAYDQQLKAGDNPYLKYNHADAEFQERLKEDTSFGGNLGRAVFQAKKRLLEPLGPVEEAAKTAPGKKRPVEQSPQEPDSSAGIGKSGAQPAKKRLNFGQTGDTESVPDPQPIGEPPAAPSGVGSLTMASGGGAPVADNNEGADGVGSSSGNWHCDSQWLGDRVITTSTRTWALPTYNNHLYKQISNSTSGGSSNDNAYFGYSTPWGYFDFNRFHCHFSPRDWQRLINNNWGFRPKRLNFKLFNIQVKEVTDNNGVKTIANNLTSTVQVFTDSDYQLPYVLGSAHEGCLPPFPADVFMIPQYGYLTLNDGSQAVGRSSFYCLEYFPSQMLRTGNNFQFSYEFENVPFHSSYAHSQSLDRLMNPLIDQYLYYLSKTINGSGQNQQTLKFSVAGPSNMAVQGRNYIPGPSYRQQRVSTTVTQNNNSEFAWPGASSWALNGRNSLMNPGPAMASHKEGEDRFFPLSGSLIFGKQGTGRDNVDADKVMITNEEEIKTTNPVATESYGQAATNHQSAQAQAQTGWVQNQGILPGMVWQDRDVYLQGPIWAKIPHTDGNFHPSPLMGGFGMKHPPPQILIKNTPVPADPPTAFNKDKLNSFITQYSTGQVSVEIEWELQKENSKRWNPEIQYTSNYYKSNNVEFAVNTEGVYSEPRPIGTRYLTRNL

SEQ ID NO: 702 - protein, 736 aa, synthetic construct
  REGION 1..736: note = Description of Artificial Sequence: Synthetic polypeptide
MAADGYLPDWLEDNLSEGIREWWALKPGAPQPKANQQHQDNARGLVLPGYKYLGPGNGLDKGEPVNAADAAALEHDKAYDQQLKAGDNPYLKYNHADAEFQERLKEDTSFGGNLGRAVFQAKKRLLEPLGPVEEAAKTAPGKKRPVEQSPQEPDSSAGIGKSGAQPAKKRLNFGQTGDTESVPDPQPIGEPPAAPSGVGSLTMASGGGAPVADNNEGADGVGSSSGNWHCDSQWLGDRVITTSTRTWALPTYNNHLYKQISNSTSGGSSNDNAYFGYSTPWGYFDFNRFHCHFSPRDWRRLINNNWGFRPKRLNFKLFNIQVKEVTDNNGVKTIANNLTSTVQVFTDSDYQLPYVLGSAHEGCLPPFPADVFMIPQYGYLTLNDGSQAVGRSSFYCLEYFPSQMLRTGNNFQFSYEFENVPFHSSYAHSQSLDRLMNPLIDQYLYYLSKTINGSGQNQQTLKFSVAGPSNMAVQGRNYIPGPSYRQQRVSTTVTQNNNSEFAWPGASSWALNGRNSLMNPGPAMASHKEGEDRFFPLSGSLIFGKQGTGRDNVDADKVMITNEEEIKTTNPVATESYGQVATNHQSAQAQAQTGWVQNQGILPGMVWQDRDVYLQGPIWAKIPHTDGNFHPSPLMGGFGMKHPPPQILIKNTPVPADPPTAFNKDKLNSFITQYSTGQVSVEIEWELQKENSKRWNPEIQYTSNYYKSNNVEFAVNTEGVYSEPRPIGTRYLTRNL

SEQ ID NO: 703 - protein, 736 aa, synthetic construct
  REGION 1..736: note = Description of Artificial Sequence: Synthetic polypeptide
MAADGYLPDWLEDNLSEGIREWWALKPGAPQPKANQQHQDNARGLVLPGYKYLGPGNGLDKGEPVNAADAAALEHDKAYDQQLKAGDNLYLKYNHADAEFQERLKEDTSFGGNLGRAVFQAKKRLLEPLGLVEEAAKTAPGKKRPVEQSPQEPDSSAGIGKSGAQPAKKRLNFGQTGDTESVPDPQPIGEPPAAPSGVGSLTMASGGGAPVADNNEGADGVGSSSGNWHCDSQWLGDRVITTSTRTWALPTYNNHLYKQISNSTSGGSSNDNAYFGYSTPWGYFDFNRFHCHFSPRDWQRLINNNWGFRPKRLNFKLFNIQVKEVTDNNGVKTIANNLTSTVQVFTDSDYQLPYVLGSAHEGCLPPFPADVFMIPQYGYLTLNDGSQAVGRSSFYCLEYFPSQMLRTGNNFQFSYEFENVPFHSSYAHSQSLDRLMNPLIDQYLHYLSKTINGSGQNQQTLKFSVAGPSNMAVQGRNYIPGPSYRQQRVSTTVTQNNNSEFAWPGASSWALNGRNSLMNPGPAMASHKEGEDRFFPLSGSLIFGKQGTGRDNVDADKVMITNEEEIKTTNPVATESYGQVATNHQSAQAQAQTGWVQNQGILPGMVWQDRDVYLQGPIWAKIPHTDGNFHPSPLMGGFGMKHPPPQILIKNTPVPADPPTAFNKDKLNSFITQYSTGQVSVEIEWELQKENSKRWNPEIQYTSNYYKSNNVEFAVNTEGVYSEPRPIGTRYLTRNL

SEQ ID NO: 704 - protein, 736 aa, synthetic construct
  REGION 1..736: note = Description of Artificial Sequence: Synthetic polypeptide
MAADGYLPDWLEDNLSEGIREWWALKPGAPQPKANQQHQDNARGLVLPGYKYLGPGNGLDKGEPVNAADAAALEHDKAYDQQLKAGDNPYLKYNHADAEFQERLKEDTSFGGNLGRAVFQAKKRLLEPLGLVEEAAKTAPGKKRPVEQSPQEPDSSAGIGKSGAQPAKKRLNFGQTGDTESVPDPQPIGEPPAAPSGVGSLTMASGGGAPVADNNEGADGVGSSSGNWHCDSQWLGDRVITTSTRTWALPTYNNHLYKQISNSTSGGSSNDNAYFGYSTPWGYFDFNRFHCHFSPRDWQRLINNNWGFRPKRLNFKLFNIQVKEVTDNNGVKTIANNLTSTVQVFTDSDYQLPYVLGSAHEGCLPPFPADVFMIPQYGYLTLNDGSQAVGRSSFYCLEYFPSQMLRTGNNFQFSYEFENVPFHSSYAHSQSLDRLMNPLIDQYLHYLSKTINGSGQNQQTLKFSVAGPSNMAVQGRNYIPGPSYRQQRVSTTVTQNNNSEFAWPGASSWALNGRNSLMNPGPAMASHKEGEDRFFPLSGSLIFGKQGTGRDNVDADKVMITNEEEIKTTNPVATESYGQVATNHQSAQAQAQTGWVQNQGILPGMVWQDRDVYLQGPIWAKIPHTDGNFHPSPLMGGFGMKHPPPQILIKNTPVPADPPTAFNKDKLNSFITQYSTGQVSVEIEWELQKENSKRWNPEIQYTSNYYKSNNVEFAVNTEGVYSEPRPIGTRYLTRNL

SEQ ID NO: 705 - protein, 736 aa, synthetic construct
  REGION 1..736: note = Description of Artificial Sequence: Synthetic polypeptide
  VARIANT 442: note = Xaa = any amino acid
MAADGYLPDWLEDNLSEGIREWWALKPGAPQPKANQQHQDNARGLVLPGYKYLGPGNGLDKGEPVNAADAAALEHDKAYDQQLKAGDNPYLKYNHADAEFQERLKEDTSFGGNLGRAVFQAKKRLLEPLGLVEEAAKTAPGKKRPVEQSPQEPDSSAGIGKSGAQPAKKRLNFGQTGDTESVPDPQPIGEPPAAPSGVGSLTMASGGGAPVADNNEGADGVGSSSGNWHCDSQWLGDRVITTSTRTWALPTYNNHLYKQISTSTSGGSSNDNAYFGYSTPWGYFDFNRFHCHFSPRDWQRLINNNWGFRPKRLNFKLFNIQVKEVTDNNGVKTIANNLTSTVQVFTDSDYQLPYVLGSAHEGCLPPFPADVFMIPQYGYLTLNDGSQAVGRSSFYCLEYFPSQMLRTGNNFQFSYEFENVPFHSSYAHSQSLDRLMNPLIDXYLHYLSKTINGSGQNQQTLKFSVAGPSNMAVQGRNYIPGPSYRQQRVSTTVTQNNNSEFAWPGASSWALNGRNSLMNPGPAMASHKEGEDRFFPLSGSLIFGKQGTGRDNVDADKVMITNEEEIKTTNPVATESYGQVATNHQSAQAQAQTGWVQNQGILPDMVWQDRDVYLQGPIWAKIPHTDGNFHPSPLMGGFGMKHPPPQILIKNTPVPADPPTAFNKDKLNSFITQYSTGQVSVEIEWELQKENSKRWNPEIQYTSNYYKSNNVEFAVNTEGVYSEPRPIGTRYLTRNL

SEQ ID NO: 706 - protein, 736 aa, synthetic construct; identical to SEQ ID NO: 686
  REGION 1..736: note = Description of Artificial Sequence: Synthetic polypeptide

SEQ ID NO: 707 - protein, 736 aa, synthetic construct; identical to SEQ ID NO: 690
  REGION 1..736: note = Description of Artificial Sequence: Synthetic polypeptide

SEQ ID NO: 708 - protein, 736 aa, synthetic construct
  REGION 1..736: note = Description of Artificial Sequence: Synthetic polypeptide
MAADGYLPDWLEDNLSEGIREWWALKPGAPQPRANQQHQDNARGLVLPGYKYLGPGNGLDKGEPVNAADAAALEHDKAYDQQLKAGDNPYLKYNHADAEFQERLKEDTSFGGNLGRAVFQAKKRLLEPLGLVEEAAKTAPGKKRPVEQSPQEPDSSAGIGKSGAQPAKKRLNFGQTGDTESVPDPQPIGEPPAAPSGVGSLTMASGGGAPVADNNEGADGVGSSSGNWHCDSQWLGDRVITTSTRTWALPTYNNHLYKQISNSTSGGSSNDNAYFGYSTPWGYFDFNRFHCHFSPRDWQRLINNNWGFRPKRLNFKLFNIQVKEVTDNNGVKTIANNLTSTVQVFTDSDCQLPYVLGSAHEGCLPPFPADVFMIPQYGYLTLNDGSQAVGRSSFYCLEYFPSQMLRTGNNFQFSYEFENVPFHSSYAHSQSLDRLTNPLIDQYLYYLSKTINGSGQNQQTLKFSVAGPSNMAVQGRNYIPGPSYRQQRVSTTVTQNNNSEFAWPGASSWALNGRNSLMNPGPAMASHKEGEDRFFPLSGSLIFGKQGTGRDNVDADKVMITNEEEIKTTNPVATESHGQVATNHQSAQAQAQTGWVQNQGILPGMVWQDRDVYLQGPIWAKIPHTDGNFHPSPLMGGFGMKHPPPQILIKNTPVPADPPTAFNKDKLNSFITQYSTGQVSVEIEWELQKENSKRWNPEIQYTSNYYKSNNVEFAVNTEGVYSEPRPIGTRYLTRNL

SEQ ID NO: 709 - protein, 736 aa, synthetic construct
  REGION 1..736: note = Description of Artificial Sequence: Synthetic polypeptide
MAADGYLPDWLEDNLSEGIREWWALKPGAPQPKANQQHQDNARGLVLPGYKYLGPGNGLDKGEPVNAADAAALEHDKAYDQQLKAGDNPYLKYNHADAEFQERLKEDTSFGGNLGRAVFQAKKRLLEPLGLVEEAAKTAPGKKRPVEQSPQEPDSSAGIGKSGAQPAKKRLNFGQTGDTESVPDPQPIGEPPAAPSGVGSLTMASGGGAPVADNNEGADGVGSSSGNWHCDSQWLGDRVITTSTRTWALPTYNNHLYKQISNSTSGGSSNDNAYFGYSTPWGYFDFNRFHCHFSPRDWQRLINNNWGFRPKRLNFKLFNIQVKEVTDNNGVKTIANNLTSTVQVFTDSDYQLPYVLGSAHEGCLPPFPADVFMIPQYGYLTLNDGSQAVGRSSFYCLEYFPSQMLRTGNNFQFSYEFENVPFHSSYAHSQSLDRLMNPPIDQYLYYLSKTINGSGQNQQTLKFSVAGPSNMAVQGRNYIPGPSYRQQRVSTTVTQNNNSEFAWPGASSWALNGRNSLMNPGPAMASHKEGEDRFFPLSGSLIFGKQGTGRDNVDADKVMITNEEEIKTTNPVATESYGQVATNHQSAQAQAQTGWVQNQGILPGMVWQDRDVYLQGPIWAKIPHTDGNFHPSPLMGGFGMKHPPPQILIKNTPVPADPPTAFNKDKLNSFITQYSTGQVSVEIEWELQKENSKRWNPEIQYTSNYYKSNNVEFAVNTEGVYGEPRPIGTRYLTRNL

SEQ ID NO: 710 - protein, 736 aa, synthetic construct
  REGION 1..736: note = Description of Artificial Sequence: Synthetic polypeptide
MAADGYLPDWLEDNLSEGIREWWALKPGAPQPKANQQHQDNARGLVLPGYKYLGPGNGLDKGEPVNAADAAALEHDKAYDQQLKAGDNPYLKYNHADAEFQERLKEDTSFGGNLGRAVFQAKKRLLEPLGLVEEAAKTAPGKKRPVEQSPQEPDSSAGIGKSGAQPAKKRLNFGQTGDTESVPDPQPIGEPPAAPSGVGSLTMASGGGAPVADNNEGADGVGSSSGNWHCDSQWLGDRVITTSTRTWALPTYNNHLYKQISNSTSGGSSNDNAYFGYSTPWGYFDFNRFHCHFSPRDRQRLINNNWGFRPKRLNFKLFNIQVKEVTDNNGVKTIANNLTSTVQVFTDSDYQLPYVLGSAHEGCLPPFPADVFMIPQYGYLTLNDGSQAVGRSSFYCLEYFPSQMLRTGNNFQFSYEFENVPFHSSYAHSQSLDRLMNPLIDQYLYYLSKTINGSGQNQQTLKFSVAGPSNMAVQGRNYIPGPSYRQQRVSTTVTQNNNSEFAWPGASSWALNGRNSLMNPGPAMASHKEGEDRFFPLSGSLIFGKQGTGRDNVDADKVMITNEEEIKTTNPVATESYGQVATNHQSAQAQAQTGWVQNQGILPGMVWQDRDVYLQGPIWAKIPHTDGNFHPSPLMGGFGMKHPPPQILIKNTPVPADPPTAFNKDKLNSFITQYSTGQVSVEIEWELQKENSKRWNPEIQYTSNYYKSNNVEFAVNTEGVYSEPRPIGTRYLTRNL

SEQ ID NO: 711 - protein, 736 aa, synthetic construct
  REGION 1..736: note = Description of Artificial Sequence: Synthetic polypeptide
MAADGYLPDWLEDNLSEGIREWWALKPGAPQPKANQQHQDNARGLVLPGYKYLGPGNGLDKGEPVNAADAAALEHDKAYDQQLKAGDNPYLKYNHADAEFQERLKEDTSFGGNLGRAVFQAKKRLLEPLGLVEEAAKTAPGKKRPVEQSPQEPDSSAGIGKSGAQPAKKRLNFGQTGDTESVPDPQPIGEPPAAPSGVGSLTMASGGGAPVADNNEGADGVGSSSGNWHCNSQWLGDRVITTSTRTWALPTYNNHLYKQISNSTSGGSSNDNAYFGYSTPWGYFDFNRFHCHFSPRDWQRLINNNWGFRPKRLNFKLFNIQVKEVTDNNGVKTIANNLTSTVQVFTDSDYQLPYVLGSAHEGCLPPFPADVFMIPQYGYLTLNDGSQAVGRSSFYCLEYFPSQMLRTGNNFQFSYEFENVPFHSSYAHSQSLDRLMNPLIDQYLYYLSKTINGSGQNQQTLKFSVAGPGNMAVQGRNYIPGPSYRQQRVSTTVTQNNNSEFAWPGASSWALNGRNSLMNPGPAMASHKEGEDRFFPLSGSLIFGKQGTGRDNVDADKVMITNEEEIKTTNPVATESYGQVATNHQSAQAQAQTGWVQNQGILPGMVWQDRDVYLQGPIWAKIPHTDGNFHPSPLMGGFGMKHPPPQILIKNTPVPADPPTAFNKDKLNSFITQYSTGQVSVEIEWELQKENSKRWNPEIQYTSNYYKSNNVEFAVNTEGVYSEPRPIGTRYLTRNL

SEQ ID NO: 712 - protein, 736 aa, synthetic construct
  REGION 1..736: note = Description of Artificial Sequence: Synthetic polypeptide
MAADGYLPDWLEDNLSEGIREWWALKPGAPQPKANQQHQDNARGLVLPGYRYLGPGNGLDKGEPVNAADAAALEHDKAYDQQLKAGDNPYLKYNHADAEFQERLKEDTSFGGNLGRAVFQAKKRLLEPLGLVEEAAKTAPGKKRPVEQSPQEPDSSAGIGKSGAQPAKKRLNFGQTGDTESVPDPQPIGEPPAAPSGVGSLTMASGGGAPVADNNEGADGVGSSSGNWHCDSQWLGDRVITTSTRTWALPTYNNHLYKQISNSTSGGSSNDNAYFGYSTPWGYFDFNRFHCHFSPRDWQRLINNNWGFRPKRLNFKLFNIQVKEVTDNNGVKTVANNLTSTVQVFTDSDYQLPYVLGSAHEGCLPPFPADVFMIPQYGYLTLNDGSQAVGRSSFYCLEYFPSQMLRTGNNFQFSYEFENVPFHSSYAHSQSLDRLMNPLIDQYLYYLSKTINGSGQNQQTLKFSVAGPSNMAVQGRNYIPGPSYRQQRVSTTVTQNNNSEFAWPGASSWALNGRNSLMNPGPAMASHKEGEDRFFPLSGSLIFGKQGTGRDNVDADKVMITNEEEIKTTNPVATESYGQVATNHQSAQAQAQTGWVQNQGILPGMVWQDRDVYLQGPIWAKIPHTDGNFHPSPLMGGFGMKHPPPQILIKNTPVPADPPTAFNKDKLNSFITQYSTGQVSVEIEWELQKENSKRWNPEIQYTSNYYKSNNVEFAVNTEGVYSGPRPIGTRYLTRNL

SEQ ID NO: 713 - protein, 736 aa, synthetic construct; identical to SEQ ID NO: 123
  REGION 1..736: note = Description of Artificial Sequence: Synthetic polypeptide

SEQ ID NO: 714 - protein, 736 aa, synthetic construct
  REGION 1..736: note = Description of Artificial Sequence: Synthetic polypeptide
MAADGYLPDWLEDNLSEGIREWWALKPGAPQPKANQQRQDNARGLVLPGYKYLGPGNGLDKGEPVNAADAAALEHDKAYDQQLKAGGNPCLKYNHADAEFQERLKEDTSFGGNLGRAVFQAKKRLLEPLGLVEEAAKTAPGKKRPVEQSPQEPDSSAGIGRSGAQPAKKRLNFGQTGDTESVPDPQPIGEPPAAPSGVGSLTMASGGGAPVADNNEGADGVGSSSGNWHCDSQWLGDRVITTSTRTWALPTYNNHLYKQISNSTSGGSSNDNAYFGYSTPWGYFDFNRFHCHFSPRDWQRLINNNWGFRPKRLNFKLFNIQVKEVTDNNGVKAIANNLTSTVQVFTDSDYQLPYVLGSAHEGCLPPFPADVFMIPQYGYLTLNDGSQAVGRSSFYCLEYFPSQMLRTGNNFQFSYEFENVPFHSSYAHSQSLDRLMNPLIDQYLYYLSKTIDGSGQNQQTLKFSVAGPSNMAVQGRNYIPGPSYRQQRVSTTVTQNNNSEFAWPGASSWALNGRNSLMDPGPAMASHKEGEDRFFPLSGSLIFGKQGTGRDNVDADKVMITNEEEIKTTNPVATESYGQVATNHQSAQAQAQTGWVQNQGILPGMVWQDRDVYLQGPIWAKIPHTGGNFHPSPLMGGFGMKHPPPQILIKNTPVPADPPTAFNKDKLNSFITQYSTGQVSVEIEWELQKENSKRWNPEIQYTSNYYKSNNVEFAVNTEGVYSEPRPIGTRYLTRNL

SEQ ID NO: 715 - protein, 736 aa, synthetic construct
  REGION 1..736: note = Description of Artificial Sequence: Synthetic polypeptide
MAADGYLPDWLEDNLSEGIREWWALKPGAPQPKANQQHQDNARGLVLPGYKYLGPGNGLDKGEPVNAADAAALEHDKAYDQQLKAGDNPYLKYNHADAEFQERLKEDTSFGGNLGRAVFQAKKRLLEPLGLVEEAAKTAPGKKRPVEQSPQEPDSSAGIGKSGAQPAKKRLNFGQTGDTESVPDPQPIGEPPAAPSGVGSLTMASGGGAPVADNNEGADGVGSSSGNWHCDSQWLGDRVITTSTRTWALPTYNNHLYKQISNSTSGGSSNDNAYFGYSTPWGYFDFNRFHCHFSPRDWQRLINNNWGFRPKRLNFKLFNIQVKEVTDNNGVKTIANNLTSTVQVFTDSDYQLPYVLGSAHEGCLPPFPADVFMIPQYGYLTLNDGSQAVGRSSFYCLEYFPSQMLRTGNNFQFSYEFENVPFHSSYAHSQSLDRLMNPLIDQYLYYLSKTINGSGQNQQTLKFSVAGPSNMAVQGRNYIPGPSYRQQRVSTTVTQNNNSEFAWPGASSWALNGRNSLMNPGPAMASHKEGEDRFFPLSGSLIFGKQGTGRDNVDADKVMITNEEEIKTTNPVATESYGQVATNHQSAQAQAQTGWVQNQGILPGMVWQDRDVYLQGPIWAKIPHTDGNFHPSPLMGGFGMKHPPPQILIKNTPVPADPPTAFNKDKLNSFITQYSTGQVSVEIEWELQKENSKRWNPEIQYTSNYYKPNNVEFAVNTEGVYSEPRPIGTRYLTRNL

SEQ ID NO: 716 - protein, 736 aa, synthetic construct
  REGION 1..736: note = Description of Artificial Sequence: Synthetic polypeptide
MAADGYLPDWLEDNLSEGIREWWALKPGAPQPKANQQHQDNARGLVLPGYKYLGPGNGLDKGEPVNAADAAALEHNKAYDQQLKAGDNPYLKCNHADAEFQERLKEDTSFGGNLGRAVFQAKKRPLEPLGLVEEAAKTAPGKKRPVEQSPQEPDSSAGIGKSGAQPAKKRLNFGQTGDTESVPDPQPIGEPPAAPSGVRSLTMASGGGAPVADNNEGADGVGSSSGNWHCDSQWLGDRVITTSTRTWALPTYNNHLYKQISNSTSGGSSNDNAYLGYSTPWGYFDFNRFHCHFSPRDWQRLINNNWGFRPKRLNFKLFNIQVKEVTDNNGVKTIANNLTSTVQVFTDSDYQLPYVLGSAHEGCLPPFPADVFMIPQYGYLTLNDGSQAVGRSSFYCLEYFPSQMLRTGNNFQFSYEFENVPFHSSYAHSQSLDRLMNPLIDQYLYYLSKTINGSGQNQQTLKFSVAGPSNMAVQGRNYIPGPSYRQQRVSTTVTQNNNSEFAWPGASSWALNGRNSLMNPGPTMASHKEGEDRFFPLSGSLIFGKQGTGRDNVDADKVMITNEEEIKTTNPVATESYGQVATNHQSAQAQAQTGWVQNQGILPGMVWQDRDVYLQGPIWAKIPHTDGNFHPSPLMGGFGMKHPPPQILIKNTPVPADPPTAFNKDKLNSFITQYSTGQVSVEIEWELQKENSKRWNPEIQYTSNYYKSNNVEFAVNTEGVYSEPRPIGTRYLTRNL

SEQ ID NO: 717 - protein, 736 aa, synthetic construct
  REGION 1..736: note = Description of Artificial Sequence: Synthetic polypeptide
MAADGYLPDWLEDNLSEGIREWWALKPGAPQPKANQQHQDNARGLVLPGYKYLGPGNGLDKGEPVNAADAAALVHDKAYDQQLKAGDNPYLKCNHADAEFQERLKEDTSFGGNLGRAVFQAKKRLLEPLGLVEEAAKTAPGKKRPVEQSPQEPDSSAGIGKSGAQPAKKRLNFGQTGDTESVPDPQPIGEPPAAPSGVGSLTMASGGGAPVADNNEGADGVGSSSGNWHCDSQWLGDRVITTSTRTWALPTYNNHLYKQISNSTSGGSSNDNAYLGYSTPWGYFDFNRFHCHFSPRDWQRLINNNWGFRPKRLNFKLFNIQVKEVTDNNGVKTIANNLTSTVQVFTDSDYQLPYVLGSAHEGCLPPFPADVFTIPQYGYLTLNDGSQAVGRSSFYCLEYFPSQMLRTGNNFQFSYEFENVPFHSSYAHSQSLDRLMNPLIDQYLYYLSKTINGSGQNQQTLKFSVAGPSNMAVQGRNYIPGPSYRQQRVSTTVTQNNNSEFAWPGASSWALNGRNSLMNPGPAMASHKEGEDRFFPLSGSLIFGKQGTGRDNVDADKVMITNEEEIKTTNPVATESYGQVATNHQSAQAQAQTGWVQNQGILPGMVWQDRDVYLQGPIWAKIPHTDGNFHPSPLMGGFGMKHPPPQILIKNTPVPADPPTAFNKDKLNSFITQYSTGQVSVEIEWELQKENSKRWNPEIQYTSNYYKSNNVEFAVNTEGVYSEPRPIGPRYLTRNF

SEQ ID NO: 718 - protein, 736 aa, synthetic construct
  REGION 1..736: note = Description of Artificial Sequence: Synthetic polypeptide
MAADGYLPDWLEDNLSEGIREWWALKPGAPQPKANQQHQDNARGLVLPGYKYLGPGNGLDKGEPVNAADAAALEHNKAYDQQLKAGDNPYLKCNHADAEFQERLKEDTSFGGNLGRAVFQAKKRLLEPLGLVEEAAKTAPGKKRPVEQSPQEPDSSAGIGKSGAQPAKKRLNFGQTGDTESVPDPQPIGEPPAAPSGVRSLTMASGGGAPVADNNEGADGVGSSSGNWHCDSQWLGDRVITTSTRTWALPTYNNHLYKQISNSTSGGSSNDNAYLGYSTPWGYFDFNRFHCHFSPRDWQRLINNNWGFRPKRLNFKLFNIQVKEVTDNNGVKTIANNLTSTVQVFTDSDYQLPYVLGSAHEGCLPPFPADVFMIPQYGYLTLNDGSQAVGRSSFYCLEYFPSQMLRTGNNFQFSYEFENVPFHSSYAHSQSLDRLMNPLIDQYLYYLSKTINGSGQNQQTLKFSVAGPSNMAVQGRNYIPGPSYRQQRVSTTVTQNNNSEFAWPGASSWALNGRNSLMNPGPAMASHKEGEDRFFPLSGSLIFGKQGTGRDNVDADKVMITNEEEIKTTNPVATESYGQVATNHQSAQAQAQTGWVQNQGILPGMVWQDRDVYLQGPIWAKIPHTDGNFHPSPLMGGFGMKHPPPQILIKNTPVPADPPTAFNKDKLNSFITQYSTGQVSVEIEWELQKENSKRWNPEIQYTSNYYKSNNVEFAVNTEGVYSEPRPIGTRYLTRNL

SEQ ID NO: 719 - protein, 736 aa, synthetic construct
  REGION 1..736: note = Description of Artificial Sequence: Synthetic polypeptide
MAADGYLPDWLEDNLSEGIREWWALKPGAPQPKANQQHQDNARGLVLPGYKYLGPGNGLDKGEPVNAADAAALEHDKAYDQQLKAGDNPYLKCNHADAEFQERLKEDTSFGGNLGRAVFQAKKRLLEPLGLVEEAAKTAPGKKRPVEQSPQEPDSSAGIGKSGAQPAKKRLNFGQTGDTESVPDPQPIGEPPAAPSGVGSLTMASGGGAPVADNNEGADGVGSSSGNWHCDSQWLGDRVITTSTRTWALPTYNNHLYKQISNSTSGGSSNDNAYLGYSTPWGYFDFNRFHCHFSPRDWQRLINNNWGFRPKRLNFELFNIQVKEVTDNNGVKTIANNLTSTVQVFTDSDYQLPYVLGSAHEGCLPPFPADVFMIPQYGYLTLNDGSQAVGRSSFYCLEYFPSQMLRTGNNFQSSYEFENVPFHSSYAHSQSLDRLMNPLIDQYLYYLSKTINGSGQNQQTLKFSVAGPSNMAVQGRNYIPGPSYRQQRASTTVTQNNNSEFAWPGASSWALNGRNSLMNPGPAMASHKEGEDRFFPLSGSLIFGKQGTGRDNVDADKVMITNEEEIKTTNPVATESYGQVATNHQSAQAQAQTGWVQNQGILPGMVWQDRDVYLQGPIWAKIPHTDGNFHPSPLMGGFGMKHPPPQILIKNTPVPADPPTAFNKDKLNSFITQYSTGQVSVEIEWELQKENSKRWNPEIQYTSNYYKSNNVEFAVNTEGVYSEPRPIGTRYLTRNL

SEQ ID NO: 720 - protein, 736 aa, synthetic construct
  REGION 1..736: note = Description of Artificial Sequence: Synthetic polypeptide
MAADGYLPDWLEDNLSEGIREWWALKPGAPQPKANQQHQDNARGLVLPGYKYLGPGNGLDKGEPVNAADAAALEHDKAYDQQLKAGDNPYLKCNHADAEFQERLKEDTSFGGNLGRAVFQAKKRLLEPLGLVEEAAKTAPGKKRPVEQSPQEPDSSAGIGKSGAQPAKKRLNFGQTGDTESVPDPQPIGEPPAAPPGVGSLTMASGGGAPVADNNEGADGVGSSSGNWHCDSQWLGDRVITTSTRTWALPTYNNHLYKQISNSTSGGSSNDNAYLGYSTPWGYFDFNRFHCHFSPRDWQRLINNNWGFRPKRLNFKLFNIQVKEVTDNNGVKTIANNLTSTVQVFTDSDYQLPYVLGSAHEGCLPPFPADVFMIPQYGYLTLNDGSQAVGRSSFYCLEYFPSQMLRTGNNFQFSYEFENVPFHSSYAHSQSLDRLMNPLIDQYLYYLSKTISGSGQNQQTLKFSVAGPSNMAVQGRNYIPGPSYRQQRVSTTVTQNNSSEFAWPGASSWALNGRNSLMNPGPAMASHKEGEDRFFPLSGSLIFGKQGTGRDNVDADKVMITNEEEIKTTNPVATESYGQVATNHQSAQAQAQTGWVQNQGILSGMVWQDRDVYLQGPIWAKIPHTDGNFHPSPLMGGFGMKHPPPQILIKNTPVPADPPTAFNKDKLNSFITQYSTGQVSVEIEWELQKENSKRWNPEIQYTSNYYKSNNVEFAVNTEGVYSEPRPIGTRYLTRNL

SEQ ID NO: 721 - protein, 736 aa, synthetic construct
  REGION 1..736: note = Description of Artificial Sequence: Synthetic polypeptide
MAADGYLPDWLEDNLSEGIREWWALKPGAPQPKANQQHQDNARGLVLPGYKYLGPGNGLDKGEPVNAADAAALEHDKAYDQQLKAGDNPYLKCNHADAEFQERLKEDTSFGGNLGRAVFQAKKRLLEPLGLVEEAAKTAPGKKRPVEQSPQEPDSSAGIGKSGAQPAKKRLNFGQTGDTESVPDPQPIGEPPAAPSGVGSLTMASGGGAPVADNNEGADGVGSSSGNWHCDSQWLGDRVITTSTRTWALPTYNNHLYKQISNSTSGGSSNDNAYLGYSTPWGYFDFNRFHCHFSPRDWQRLINNNWGFRPKRLNFKLFNIQVKEVTDNNGVKTIANNLTSTVQVFTDSDYQLPYVLGSAHEGCLPPFPADVFMIPQYGYLTLNDGSQAVGRSSFYCLEYFPSQMLRTGNNFQFSYEFENVPFHSSYAHSQSLDRLMNPLIDQYLYYLSKTINGSGQNQQTLKFSVAGPSNMAVQGRNYIPGPSYRQQRVSTTVTQNNNSEFAWPGASSWALNGRNSLMNPGPAMASHKEGEDRFFPLSGSLIFGKQGTGRDNVDADKVMITNEEEIKTTNPVATESYGQVATNHQSAQAQAQTGWVQNQGILPGMVWQDRDVYLQGPIWAKIPHTDGNFHPSPLMGGFGMKHPPPQILIKNTPVPADPPTAFNKDKLNSFITQYSTGQVSVEIEWELQKENSKRWNPEIQYTSNYYKSNNVEFAVNTEGVYSEPRPIGTRYLTRNL

SEQ ID NO: 722 - protein, 736 aa, synthetic construct; identical to SEQ ID NO: 721
  REGION 1..736: note = Description of Artificial Sequence: Synthetic polypeptide

SEQ ID NO: 723 - protein, 736 aa, synthetic construct
  REGION 1..736: note = Description of Artificial Sequence: Synthetic polypeptide
MAADGYLPDWLEDNLSEGIREWWALKPGAPQPKANQQHQDNARGLVLPGYKYLGPGNGLDKGEPVNAADAAALEHDKAYDQQLKAGDNPYLKCNHADAEFQERLKEDTSFGGNLGRAVFQAKKRLLEPLGLVEEAAKTAPGKKRPVEQSPQEPDSSAGIGKSGAQPAKKRLNFGQTGDTESVPDPQPIGEPPAAPSGVGSLTMASGGGAPVADNNEGADGVGSSSGNWHCDSQWLGDRVITTSTRTWALPTYNNHLYKQISNSTSGGSSNDNAYLDYSTPWGYFDFNRFHCHFSPRDWQRLINNNWGFRPKRLNFKLFNIQVKEVTDNNGVKTIANNLTSTVQVFTDSDYQLPYVLGSAHEGCLPPFPADVFMIPQYGYLTLNDGSQAVGRSSFYCLEYFPSQMLRTGNNFQFSYEFENVPFHSSYAHSQSLDRLMNPLIDQYLYYLSKTINGSGQNQQTLKFSVAGPSNMAVQGRNYIPGPSYRQQRVSTTVTQNNNSEFAWPGASSWALNGRNSLMNPGPAMASHKEGEDRFFPLSGSLIFGKQGTGRDNVDADKVMITNEEEIKTTNPVATESYGQVATNHQSAQAQAQTGWVQNQGILPGMVWQGRDVYLQGPIWAKIPHTDGNFHPSPLMGGFGMKHPPPQILIKNTPVPADPPTAFNKDKLNSFITQYSTGQVSVEIEWELQKENSKRWNPEIQYTSNYYKSNNVEFAVNTEGVYSEPRPIGTRYLTRNL

SEQ ID NO: 724 - protein, 736 aa, synthetic construct; identical to SEQ ID NO: 721
  REGION 1..736: note = Description of Artificial Sequence: Synthetic polypeptide

SEQ ID NO: 725 - protein, 736 aa, synthetic construct
  REGION 1..736: note = Description of Artificial Sequence: Synthetic polypeptide
MAADGYPPDWLEDNLSEGIREWWALKPGAPQPKANQQHQDNARGLVLPGYKYLGPGNGLDKGEPVNAADAAALEHDKAYDQQLKAGDNPHLKYNHADAEFQERLKEDTSFGGNLGRAVFQAKKRLLEPLGLVEEAAKTAPGKKRPVEQSPQEPDSSAGIGKSGAQPAKKRLNFGQTGDTESVPDPQPIGEPPAAPSGVGSLTMASGGGAPVADNNEGADGVGSSSGNWHCDSQWLGDRVITTSTRTWALPTYNNHLYKQISNSTSGGSSNDNAYFGYSTPWGYFDFNRFHCHFSPRDWQRLINNNWGFRPKRLNFKLFNIQVKEVTDNNGVKTIANNLTSTVQVFTDSDYQLPYVLGSAHEGCLPPFPADVFMIPQYGYLTLNDGSQAVGRSSFYCLEYFPSQMLRTGNNFQFSYEFENVPFHSSYAHSQSLDRLMNPLIDQYLYYLSKTINGSGQNQQTLKFSVAGPSNMAVQGRNYIPGPSYRQQRVSTTVTQNNNSEFAWPGASSWALNGRNSLMNPGPAMASHKEGEDRFFPLSGSLIFGKQGTGRDNVDADKVMITNEEEIKTTNPVATESYGQVATNHQSAQAQAQTGWVQNQGILPGMVWQDRDVYLQGPIWAKIPHTDGNFHPSPLMGGFGVKHPPPQILIKNTPVPADPPTAFNKDRLNSFITQYSTGQVSVEIEWELQKENSKRWNPEIQYTSNYYKSNNVEFAVNTEGVYSEPRPIGTRYLTRNL

SEQ ID NO: 726 - protein, 736 aa, synthetic construct
  REGION 1..736: note = Description of Artificial Sequence: Synthetic polypeptide
MAADGYLPDWLEDNLSEGIREWWALKPGAPQPKANQQHQDNARGLVLPGYKYLGPGNGLDKGEPVNAADAAALEHDKAYDQQLKAGDNPYLKYNHADAEFQERLKEDTSFGGNLGRAVFQAKKRLLEPLGLVEEAAKTAPGKKRPVEQSPQEPDSSAGIGKSGAQPAKKRLNFGQTGDTESVPDPQPIGEPPAAPSGVGSLTMASGGGAPVADNNEGADGVGSSSGNWHCDSQWLGDRVITTSTRTWALPTYNNHLYKQISNSTSGGSSNDNAYFGYSTPWGYFDFNRFHCHFSPRDWQRLINNNWGFRPKRLNFKLFNIQVKEVTDNNGVKTIANNLTSTVQVFTDSDYQLPYVLGSAHEGCLPPFPADVFMIPQYGYLTLNDGSQAVGRSSFYCLEYFPSQMLRTGNNFQFSYEFENVPFHSSYAHSQSLDRLMNPLIDQYLYYLSKTINGSGQNQQTLKFSVAGPSNMAVQGRNYIPGPSYRQQRVSTTVTQNNNSEFAWPGASSWALNGRNSLMNPGPAMASHKEGEDRFFPLSGSLIFGKQGTGRDNVDADKVMITNEEEIKTTNPVATESYGQVATNHQSAQAQAQTGWVQNQGILPGMVWQDRDVYLQGPIWAKIPHTDGNFHPSPLMGGFGVKHPPPQILIKNTPVPADPPTAFNKDKLNSFITQYSTGQVSVEIEWELQKENSKRWNPEIQYTSNYYKSNNVEFAVNTEGVYSEPRPIGTRYLTRNL

SEQ ID NO: 727 - protein, 736 aa, synthetic construct
  REGION 1..736: note = Description of Artificial Sequence: Synthetic polypeptide
MAADGYLPDWLEDNLSEGIREWWALKPGAPQPKANQQHQDNARGLVLPGYKYLGPGNGLDKGEPVNAADAAALEHDKAYDQQLKAGDNPYLKYNHADAEFQERLKEDTSFGGNLGRAVFQAKKRLLEPLGLVEEAAKTAPGKKRPVEQSPQEPDSSAGIGKSGAQPAKKRLNFGQTGDTESVPDPQPIGEPPAAPSGVGSLTMASGGGAPVADNNEGADGVGSSSGNWHCDSQWLGDRVITTSTRTWALPTYNNHLYKQISNSTSGGSSNDNAYFGYSTPWGYFDFNRFHCHFSPRDWQRLTNNNWGFRPKRLNFKLFNIQVKEVTDNNGVKTIANNLTSTVQVFTDSDYQLPYVLGSAHEGCLPPFPADVFMIPQYGYLTLNDGSQAVGRSSFYCLEYIPSQMLRTGNNFQFSYEFENVPFHSSYAHSQSLDRLMNPLIDQYLYYLSKTINGSGQNQQTLKFSVAGPSNMAVQGRNYIPGPSYRQQRVSTTVTQNNNSEFAWPGASSWALNGRNSLMNPGPAMASHKEGEDRFFPLSGSLIFGKQGTGRDNVDADKVMITNEEEIKTTNPVATESYGQVATNHQSAQAQAQTGWVQNQGILPGMVWQDRDVYLQGPIWAKIPHTDGNFHPSPLMGGFGVKHPPPQILIKNTPVPADPPTAFNKDKLNSFITQYSTGQVSVEIEWELQKENSKRWNPEIQYTSNYYKSNNVEFAVNTEGVYSEPRPIGTRYLTRNL

SEQ ID NO: 728 - protein, 736 aa, synthetic construct
  REGION 1..736: note = Description of Artificial Sequence: Synthetic polypeptide
MAADGYLPDWLEDNLSEGIREWWALKPGAPQPKANQQHQDNARGLVLPGYKYLGPGNGLDKGEPVNAADAAALEHDKAYDQQLKAGDNPYLKYNHADAEFQERLKEDTSFGGNLGRAVFQAKKRLLEPLGLVEEAAKTAPGKKRPVEQSPQEPDSSAGIGKSGAQPAKKRLNFGQTGDTESVPDPQPIGEPPAAPSGVGSLTMASGGGAPVADNNEGADGVGSSSGNWHCDSQWLGDRVITTSTRTWALPTYNNHLYKQISNSTSGGSSNDNAYFGYSTPWGYFDFNRFHCHFSPRDWQRLINNNWGFRPKRLNFKLFNIQVKEVTDNNGVKTIANNLTSTVQVFTDSDYQLPYVLGSAHEGCLPPFPADVFMIPQYGYLTLNDGSQAVGRSSFYCLEYFPSQMLRTGNNFQFSYEFENVPFHSSYAHSQSLDRLMNPLIDQYLYYLSKTINGSGQNQQTLKFSVAGPSNMAVQGRNYIPGPSYRQQRVSTTVTQNNNSEFAWPGASSWALNGRNSLMNPGPAMASHKEGEDRFFPLSGSLISGKQGTGRDNVDANKVMITNEEEIKTTNPVATESYGQVATNHQSAQAQAQTGWVQNQGILPGMVWQDRDVYLQGPIWAKIPHTDGNFHPSPLMGGFEMKHPPPQILIKNTPVPADPPTAFNKDKLNSFITQYSTGQVSVEIEWELQKENSKRWNPEIQYTSNYYKSNNVEFAVNTEGVYSEPRPIGTRYLTRNL

SEQ ID NO: 729 - protein, 736 aa, synthetic construct
  REGION 1..736: note = Description of Artificial Sequence: Synthetic polypeptide
MAADGYLPDWLEDNLSEGIREWWALKPGAPQPKANQQHQDNARGLVLPGYKYLGPGNGLDKGEPVNAADAAALEHDKAYDQQLKAGDNPYLKYNHADAEFQERLKEDTSFGGNLGRAVFQAKKRLLEPLGLVEEAAKTAPGKKRPVEQSPQEPDSSAGIGKSGAQPAKKRLNFGQTGDTESVPDPQPIGEPPAAPSGVGSLTIASGGGAPVADNNEGADGVGSSSGNWHCDSQWLGDRVITTSTRTWALPTYNNHLYKRISNSTSGGSSNDNAYFGYSTPWGYFDFNRFHCHFSPRDWQRLINNNWGFRPKRLNFKLFNIRVKEVTDNNGVKTITNNLTSTVQVFTDSDYQLPYVLGSAHEGCLPPFPADVFMIPQYGYLTLNDGSQAVGRSSFYCLEYFPSQMLRTGNNFQFSYEFENVPFHSSYAHSQSLDRLMNPLIDQYLYYLSKTINGSGQNQQTLKFSVAGPSNMAVQGRNYIPGPSYRQQRVSTTVTRNNNSEFAWPGASSWALNGRNSLMNPGPAMASHKEGEDRFFPLSGSLIFGKQGTGRDNVDADKVMITNEEEIKTTNPVATESYGQVATNHQSAQAQAQTGWVQNQGILPGMVWQDRDVYLQGPIWAKIPHTDGNFHPSPLMGGFGVKHPPPQILIKNTPVPADPPTAFNKDKLNSFITQYSTGQVSVEIEWELQKENSKRWNPEIQYTSNYYKSNNVEFAVNTEGVYSEPRPIGTRYLTRNL

SEQ ID NO: 730 - protein, 736 aa, synthetic construct
  REGION 1..736: note = Description of Artificial Sequence: Synthetic polypeptide
MAADGYLPDWLEDNLSEGIREWWALKPGAPQPKANQQHQDNARGLVLPGYKYLGPGNGLDKGEPVNAADAAALEHDKAYDQQLKAGDNPYLKYNHADAEFQERLKEDTSFGGNLGRAVFQAKKRLLEPLGLVEEAAKTAPGKKRPVEQSPQEPDSSAGIGKSGAQPAKKRLNFGQTGDTEPVPDPQPIGEPPAAPSGVGSLTMASGGGAPVADNNEGADGVGSSSGNWHCDSQWLGDRVITTSTRTWALPTYNNHLYKQISNSTSGGSSNDNAYFGYSTPWGYFDFNRFHCHFSPRDWQRLINNNWGFRPKRLNFKLFNIQVKEVTDNNGVKTIANNLTSTVQVFTDSDYQLPYVLGSAHEGCLPPFPAGVFMIPQYGYLTLNDGSQAVGRSSFYCLEYFPSQMLRTGNNFQFSYEFENVPFHSSYAHSQSLDRLMNPLIDQYLYYLSKTINGSGQNQQTLKFSVAGPSNMAVQGRNYIPGPSYRQQRVSTTATQNNNSEFAWPGASSWALNGRNSLMNPGPAMASHKEGEDRFFPLSGSLIFGKQGTGRDNVDADKVMITNEEEIKTTNPVATESYGQVATNHQSAQAQAQTGWVQNQGILPGMVWQDRDVYLQGPIWAKIPHTDGNFHPSPLMGGFGMKHPPPQILIKNTPVPADPPTAFNKDKLNSFITQYSTGQVSVEIEWELQKENSKRWNPEIQYTSNYYKSNNVEFAVNTEGVYSEPRPIGTRYLTRNL

SEQ ID NO: 731 - protein, 736 aa, synthetic construct
  REGION 1..736: note = Description of Artificial Sequence: Synthetic polypeptide
MAADGYLPDWLEDNLSEGIREWWALKPGAPQPKANQQHQDNARGLVLPGYKYLGPGNGLDKGEPVNAADAAALEHDKAYDQQLKAGDNPYLKYNHADAGFQERLKEDTSFGGNLGRAVFQAKKRLLEPLGLVEEAAKTAPGKKRPVEQSPQEPDSSAGIGKSGAQPAKKRLNFGQTGDTESVPVPQPIGEPPAAPSGVGSLTMASGGGAPVADNNEGADGVGSSSGNWHCDSQWLGDRVITTSTRTWALPTYNNHLYKQISNSTSGGSSNDNAYFGYSTPWGYFDFNRFHCHFSPRDWQRLINNNWGFRPKRLNFKLFNIQVKEVTDNNGVKTIANNLTSTVQVFTDSDYQLPYVLGSAHEGCLPPFPADVFMIPQYGYLTLNDGSQAVGRSSFYCLEYFPSQMLRTGNNFQFSYEFENVPFHSSYAHSQSLDRLMNPLIDQYLYYLSKTINGSGQNQQTLKFSVAGPSNMAVQGRNYIPGPSYRQQRVSTTVTQNNNSEFAWPGASSWALNGRNSLMNPGPAMASHKEGEDRFFPLSGSLIFGKQGAGRDNVDADKVMITNEEEIKTTNPVATESYGQVATNHQSAQAQAQTGWVQNQGILPGMVWQDRDVYLQGPIWAKIPHTDGNFHPSPLMGGFGMKHPPPQILIKNTPVPADPPTAFNKDKLNSFITQYSTGQVSVEIEWELQKENSKRWNPEIQYTSNYYKSNNVEFAVNTEGVYSEPRPIGTRYLTRNL

SEQ ID NO: 732 - protein, 736 aa, synthetic construct
  REGION 1..736: note = Description of Artificial Sequence: Synthetic polypeptide
  VARIANT 126: note = Xaa = any amino acid
MAADGYLPDWLEDNLSEGIRERWALKPGAPQPKANQQHQDNARGLVLPGYKYLGPGNGLDKGEPVNAADAAALEHDKAYDQQLKAGDNPYLKYNHADAEFQERLKEDTSFGGNLGRAVFQAKKRLXEPLGLVEEAAKTAPGKKRPVEQSPQEPDSSAGIGKSGAQPAKKRLNFGQTGDTESVPDPQPIGEPPAAPSGVGSLTMASGGGAPVADNNEGADGVGSSSGNWHCDSQWLGDRVITTSTRTWALPTYNNHLYKQISNSTSGGSSNDNAYFGYSTPWGYFDFNRFHCHFSPRDWQRLINNNWGFRPKRLNFKLFNIQVKEVTDNNGVKTIANNLTSTVQVFTDSDYQLPYVLGSAHEGCLPPFPADVFMIPQYGYLTLNDGSQAVGRSSFYCLEYFPSQMLRTGNNFQFSYEFENVPFHSSYAHSQSPDRLMNPLIDQYLYYLSKTINGSGQNQQTLKFSVAGPSNMAVQGRNYIPGPSYRQQRVSTTVTQNNNSEFAWPGASSWALNGRNSLMNPGPAMASHKEGEDRFFPLSGSLIFGKQGTGRDNVDADKVMITNEEEIKTTNPVATESYGQVATNHQSAQAQAQTGWVQNQGILPGMVWQDRDVYLQGPIWAKIPHTDGNFHPSPLMGGFGVKHPPPQILIKNTPVPADPPTAFNKDKLNSFITQYSTGQVSVEIEWELQKENSKRWNPEIQYTSNYYKSNNVEFAVNTEGVYSEPRPIGTRYLTRNL

SEQ ID NO: 733 - protein, 736 aa, synthetic construct
  REGION 1..736: note = Description of Artificial Sequence: Synthetic polypeptide
MAADGYLPDWLEDNLSEGIREWWALKPGAPQPKANQQHQDNARGLVLPGYKYLGPGNGLDKGEPVNAADAAALEHDKAYDQQLKAGDNPYLKYNHADAEFQERLKEDTSFGGNLGRAVFQAKKRLLEPLGLVEEAAKTAPGKKRPVEQSPQEPDSSAGIGKSGAQPAKKRLNFGQTGDTESVPDPQPIGEPPAAPSGVGSLTMASGGGAPVADNNEGADGVGSSSGNWHCDSQWLGDRVITTSTRTWALPTYNNHLYKQISNSTSGGSSNDNAYLGYSTPWGYFDFNRFHCHFSPRDWQRLINNNWGFRPKRLNFKLFNIQVKEVTDNNGVKTIANNLTSTVQVFTDSDYQLPYVLGSAHEGCLPPFPADVFMIPQYGYLTLNDGSQAVGRSSFYCLEYFPSQMLRTGNNFQFSYEFENVPFHSSYAHSQSLDRLMNPLIDQYLYYLSKTINGSGQNQQTLKFSVAGPSNMAVQGRNYIPGPSYRQQRVSTTVTQNNNSEFAWPGASSWALNGRNSLMNPGPAMASHKEGEDRFFPLSGSLIFGKQGTGRDNVDADKVMITNEEEIKTTNPVATESYGQVATNHQSAQAQAQTGWVQNQGILPGMVWQDRDVYLQGPIWAKIPHTDGNFHPSPLMGGFGMKHPPPQILIKNTPVPADPPTAFNKDKLNSFITQYSTGQVSVEIEWELQKENSKRWNPEIQYTSNYYKSNNVEFAVNTEGVYSEPRPIGTRYLTRNL

SEQ ID NO: 734 - protein, 736 aa, synthetic construct
  REGION 1..736: note = Description of Artificial Sequence: Synthetic polypeptide
MAADGYLPDWLEDNLSEGIREWWALKPGAPQPKANQQHQDNARGLVLPGYKYLGPGNGLDKGEPVNAADAAALEHDKAYDQQLKAGDNPYLKYNHADAEFQERLKEDTSFGGNLGRAVFQAKKRLLEPLGLVEEAAKTAPGKKRPVEQSPQEPDSSAGIGKSGAQPAKKRLNFGQTGDTESVPDPQPIGEPPAAPSGVGSLTMASGGGAPVADNNEGADGVGSSSGNWHCDSQWLGDRVITTSTRTWALPTYNNHLYKQISNSTSGGSSNDNAYFGYSTPWGYFDFNRFHCHFSPRDWQRLINNNWGFRPKRLNFKLFNIQVKEVTDNNGVKTIANNLTSTVQVFTDSDYQLPYVLGSAHEGCLPPFPADVFMIPQYGYLTLNDGSQAVGRSSFYCLEYFPSQMLRTGNNFQFSYEFENVPFHSSYAHSQSLDRLMNPLIDQYLYYLSKTINGSGQNQQTLKFSVAGPSNMAVQGRNYIPGPSYRQQRVSTTVTQNNNSEFAWPGASSWALNGRNSLMNPGPAMASHKEGEDRFFPLSGSLIFGKQGTGRDNVDADKVMITNEEEIKTTNPVATESYGQVATNHQSAQAQAQTGWVQNQGILPGMVWQDRDVYLQGPIWAKIPHTDGNFHPSPLMGGFGMKHPPPQILIKNTPVPADPPTAFNKDKLDSFITQYSTGQVSVEIEWELQKENSKRWNPVIQYTSNYYKSNNVEFAVNTEGVYSEPRPIGTRYLTRNL

SEQ ID NO: 735 - protein, 736 aa, synthetic construct
  REGION 1..736: note = Description of Artificial Sequence: Synthetic polypeptide
MAADGYLPDWLEDNLSEGIREWWDLKPGAPKPKANQQKQDDGRGLVLPGYKYLGPFNGLDKGEPVNAADAAALEHDKAYDQQLKAGDNPYLRYNHADAEFQERLQEDTSFGGNLGRAVFQAKKRVLEPLGLVEEGAKTAPGKKRPVEQSPQEPDSSSGIGKTGQQPAKKRLNFGQTGDSESVPDPQPLGEPPATPAAVGPTTMASGGGAPMADNNEGVDGVGNASGNWHCDSTWLGDRVITTSTRTWALPTYNNHLYKQISSASTGASNDNHYFGYSTPWGYFDFNRFHCHFSPRDWQRLINNNWGFRPKRLNFKLFNIQVKEVTTNDGVTTIANNLTSTVQVFSDSEYQLPYVLGSAHQGCLPPFPADVFMIPQYGYLTLNNGSQAVGRSSFYCLEYFPSQMLRTGNNFTFSYTFEEVPFHSSYAHSQSLDRLMNPLIDQYLYYLNRTQNQSGSAQNKDLLFSRGSPAGMSVQPKNWLPGPCYRQQRVSKTKTDNNNSNFTWTGASKYNLNGRESIINPGTAMASHKDDEDKFFPMSGVMIFGKESAGASNTALDNVMITDEEEIKATNPVATERFGTVAVNFQSSSTDPATGDVHAMGALPGMVWQDRDVYLQGPIWAKIPHTDGHFHPSPLMGGFGLKNPPPQILIKNTPVPANPPAEFSATKLASFITQYSTGQVSVEIEWELQKENSKRWNPEVQYTSNYAKSANVDFTVDNNGLYTEPRPIGTRYLTRPL

SEQ ID NO: 736 - protein, 736 aa, synthetic construct
  REGION 1..736: note = Description of Artificial Sequence: Synthetic polypeptide
MAADGYLPDWLEDNLSEGIREWWDLKPGAPKPKANQQKQDDGRGLVLPGYKYLGPFNGLDKGEPVNAADAAALEHDKAYDQQLKAGDNPYLRYNHADAEFQERLQEDTSFGGNLGRAVFQAKKRVLEPLGLVEEGAKTAPGKRRPVEQSPQEPDSSSGIGKTGQQPAKKRLNFGQTGDSESVPDPQPLGEPPATPAAVGPTTMASGGGAPMADNNEGADGVGNASGNWHCDSTWLGDRVITTSTRTWALPTYNNHLYKQISSASTGASNDNHYFGYSTPWGYFDFNRFHCHFSPRDWQRLINNNWGFRPKRLNFKLFNIQVKEVTTNDGVTTIANNLTSTVQVFSDSEYQLPYVLGSAHQGCLPPFPADVFMIPQYGYLTLNNGSQAVGRSSFYCLEYFPSQMLRTGNNFTFSYTFEEVPFHSSYAHSQSLDRLMNPLIDQYLYYLNRTQNQSGSAQNKDLLFSRGSPAGMSVQPKNWLPGPCYRQQRVSKTKTDNNNSNFTWTGASKYNLNGRESIINPGTAMASHKDDEDKFFPMSGVMIFGKESAGASNTALDNVMITDEEEIKATNPVATERFGTVAVNFQSSSTDPATGDVHAMGALPGMVWQDRDVYLQGPIWAKIPHTDGHFHPSPLMGGFGLKNPPPQILIKNTPVPANPPAEFSATKFASFITQYSTGQVSVEIEWELQKENSKRWNPEVQYTSNYAKSANVDFTVDNNGLYTEPRPIGTRYLTRPL

SEQ ID NO: 737 - protein, 736 aa, synthetic construct
  REGION 1..736: note = Description of Artificial Sequence: Synthetic polypeptide
MAADGYLPDWLEDNLSEGIREWWDLKPGAPKPKANQQKQDDGRGLVLPGYKYLGPFNGLDKGEPVNAADAAALEHDKAYDQQLKAGDNPYPRYNHADAEFQERLQEDTSFGGNLGRAVFQAKKRVLEPLGLVGEGAKTAPGKKRPVEQSPQEPDSSSGIGKTGQQPAKKRLNFGQTGDSESVPDPQPLGEPPATPAAVGPTTMASGGGAPMADNNEGADGVGNASGNWHCDSTWLGDRVITTSTRTWALPTYNNHLYKQISSASTGASNDNHYFGYSTPWGYFDFNRFHCHFSPRDWQRLINNNWGFRPKRLNFKLFNIQVKEVTTNDGVTTIANNLTSTVQVFSDSEYQLPYVLGSAHQGCLPPFPADVFMIPQYGYLTLNNGSQAVGRSSFYCLEYFPSQMLRTGNNFTFSYTFEEVPFHSSYAHSQSLDRLMNPPIDQYLYYLNRTQNQSGSAQNKDLLFSRGSPAGMSVQPKNWLPGPCYRQQRVSKTKTDNNNSNFTWTGASKYNLNGRESIINPGTAMASHKDDEDKFFPMSGVMIFGKESAGASNTALDNVMITDEEEIKATNPVATERFGTVAVNFQSSSTDPATGDVHAMGALPGMVWQDRDVYLQGPIWAKIPHTDGHFHPSPLMGGFGLKNPPPQILIKNTPVPANPPAEFSATKFASFITQYSTGQVSVEIEWELQKENSKRWNPEVQYTSNYAKSANVDFTVDNNGLYTEPRPIGTRYLTRPL

SEQ ID NO: 738 - protein, 736 aa, synthetic construct
  REGION 1..736: note = Description of Artificial Sequence: Synthetic polypeptide
MAADGYLPDWLEDNLSEGIREWWDLKPGAPKPKANQQKQDDGRGLVLPGYKYLGPFNGLDKGEPVNAADAAALEHDKAYDQQLKAGDNPYLRYNHADAEFQERLQEDTSFGGNLGRAVFQAKKRVLEPLGLVEEGAKTAPGKKRPVEQSPQEPDSSSGIGKTGQQPAKKRLNFGQTGDSESVPDPRPLGEPPATPAAVGPTTMASGGGAPMADNNEGADGVGNASGNWHCDSTWLGDRVITTSTRTWALPTYNNHLYKQISSASTGASNDNHYFGYSTPWGYFDFNRFHCHFSPRDWQRLINNNWGFRPKRLNFKLFNIQVKEVTTNDGVTTIANNLTSTVQVFSDSEYQLPYVLGSAHQGCLPPFPADVFMIPQYGYLTLNNGSQAVGRSSFYCLEYFPSQMLRTGNNFTFSYTFEEVPFHSSYAHSQSLDRLMNPLIDQYLYYLNRTQNQSGSAQNKDLLFSRGPPAGMSVQPKNWLPGPCYRQQRVSKTKTDNNNSNFTWTGASKYNLNGRESIINPGTAMASHKDDEDKFFPMSGVMIFGKESAGASNTALDNVMITDEEEIKATNPVATERFGTVAVNFQSSSTDPATGDVHAMGALPGMVWQDRDVYLQGPIWAKIPHTDGHFHPSPLMGGFGLKNPPPQILIKNTPVPANPPAEFSATKFASFITQYSTGQVSVEIEWELQKENSKRWNPEVQYTSNYAKSANVDFTVDNNGLYTEPRPIGTRYLTRPL

SEQ ID NO: 739 - protein, 736 aa, synthetic construct
  REGION 1..736: note = Description of Artificial Sequence: Synthetic polypeptide
MAADGYLPDWLEDNLSEGIREWWDLKPGAPKPKANQQKQDDGRGLVLPGYKYLGPFNGLDKGEPVNAADAAALEHDKAYDQQLKAGDNPYLRYNHADAEFQERLQEDTSFGGNLGRAVFQAKKRVLEPLGLVEEGAKTAPGKKRPVEQSPQEPDSSSGIGKTGQQPAKKRLNFGQTGGSESVPDPQPLGEPPATPAAVGPTTMASGGGAPMADNNEGADGVGNASGNWHCDSTWLGDRVITTSTRTWALPTYNNHLYKQISSASTGASNDNHYFGYSTPWGYFDFNRFHCHFSPRDWQRLINNNWGFRPKRLNFKLFNIQVKEVTTNDGVTTIANNLTSTVQVFSDSEYQLPYVLGSAHQGCLPPFPADVFMIPQYGYLTLNNGSQAVGRSSFYCLEYFPSQMLRTGNNFTFSYTFEEVPFHSSYAHSQSLDRLMNPPIDQYLYYLNRTQNQSGSAQNKDLLFSRGSPAGMSVQPKNWLPGPCYRQQRVSKTKTDNNNSNFTWTGASKYNLNGRESIINPGTAMASHKDDEDKFFPMSGVMIFGKESAGASNTALDNVMITDEEEIKATNPVATERFGTVAVNFQSSSTDPATGDVHAMGALPGMVWQDRDVYLQGPIWAKIPHTDGHFHPSPLMGGFGLKNPPPQILIKNTPVPANPPAEFSATKFASFITQYSTGQVSVEIEWELQKENSKRWNPEVQYTSNYAKSANVDFTVDNNGLYTEPRPIGTRYLTRPL

SEQ ID NO: 740 - protein, 736 aa, synthetic construct
  REGION 1..736: note = Description of Artificial Sequence: Synthetic polypeptide
MAADGYLPDWLEDNLSEGIREWWDLKPGAPKPKANQQKQDDGRGLVLPGYKYLGPFNGLDKGEPVNAADAAALEHDKAYDQQLKAGDNPYLRYNHADAEFQERLQEDTSFGGNLGRAVFQAKKRVLEPLGLVEEGAKTAPGKKRPVEQSPQEPDSSSGIGKTGQQPAKKRLNFGQTGDSESVPDPQPLGEPPATPAAVGPTTMASGGGAPMADNNEGADGVGNASGNWHCDSTWLGDRVITTSTRTWALPTYNNHLYKQISSASTGASNDNHYFGYSTPWGYFDFNRFHCHFSPRDWQRLINNNWGFRPKRLNFKLFNIQVKEVTTNDGVTTIANNLTSTVQVFSDSEYQLPYVLGSAHQGCLPPFPADVFMIPQYGYLTLNNGSQAVGRSSFYCLEYFPSQMLRTGNNFTFSYTFEEVPFHSSYAHSQSLDRLMNPLIDQYLYYLNRTQNQSGSAQNKDLLFSRGSPAGMSVQPKNWLPGPCYRQQRVSKTKTDNNNSNFTWTGASKYNLNGRESIINPGTAVASHKDDEDKFFPMSGVMIFGKESAGASNTALDNVMITDEEEIKATNPVATERFGTVAVNFQSSSTDPATGDVHAMGALPGMVWQDRDVYLQGPIWAKIPHTDGHFHPSPLMGGFGLKNPPPQILIKNTPVPANPPAEFSATKFASFITQYSTGQVSVEIEWELQKENSKRWNPEVQYTSNYAKSANVDFTVDNNGLYTEPRPIGTRYLTRPL

SEQ ID NO: 741 - protein, 736 aa, synthetic construct
  REGION 1..736: note = Description of Artificial Sequence: Synthetic polypeptide
MAADGYLPDWLEDNLSEGIREWWDLKPGAPKPKANQQKQDDGRGLVLPGYKYLGPFNGLDKGEPVNAADAAALEHDKAYDQQLKAGDNPYLRYNHADAEFQERLQEDTSFGGNLGRAVFQAKKRVLEPLGLVEEGAKTAPGKKRPVEQSPQEPDSSSGIGKTGQQPAKKRLNFGQTGDSESVPDPQPLGEPPATPAAVGPTTMASGGGAPMADNNEGADGVGNASGNWHCDSTWLGDRVITTSTRTWALPTYNNHLYKQISSASTGASNDNHYFGYSTPWGYFDFNRFHCHFSPRDWQQLINNNWGFRPKRLNFKLFNIQVKEVTTNDGVTTIANNLTSTVQVFSDSEYQLPYVLGSAHQGCLPPFPADVFMIPQYGYLTLNNGSQAVGRSSFYCLEYFPSQMLRTGNNFTFSYTFEEVPFHSSYAHSQSLDRLMNPLIDQYLYYLNRTQNQSGSAQNKDLLFSRGSPAGMSVQPKNWLPGPCYRQQRVSKTKTDNNNSNFTWTGASKYNLNGRESIINPGTAMASHKDDEDKFFPMSGVMIFGKESAGASNTALDNVMITDEEEIKATNPVATERFGTVAVNFQSTSTDPATGDVHAMGALPGMVWQDRDVYLQGPIWAKIPHTDGHFHPSPLMGGFGLKNPPPQILIKNTPVPANPPAEFSATKFASFITQYSTGQVSVEIEWELQKENSKRWNPEVQYTSNYAKSADVDFTVDNNGLYTEPRPIGTRYLTRPL

SEQ ID NO: 742 - protein, 736 aa, synthetic construct
  REGION 1..736: note = Description of Artificial Sequence: Synthetic polypeptide
MAADGYLPDWLEDNLSEGIREWWDLKPGAPKPKANQQKQDDGRGLVLPGYKYLGPFNGLDKGEPVNAADAAALEHDKAYDQQLKAGDNPYLRYNHADAEFQERLQEDTSFGGNLGRAVFQAKKRVLEPLGLVEEGAKTAPGKKRPVEQSPQEPDSSSGIGKTGQQPAKKRLNFGQTGDSESVPDPQPLGEPPATPAAVGPTTMASGGGAPMADNNEGADGVGNASGNWHCDSTWLGDRVITTSTRTWALPTYNNHLYKQISSASTGASNDNHYFGYSTPWGYFDFNRFHCHFSPRDWQRLINNNWGFRPKRLNFKLFNIQVKEVTTNDGVTTIANNLTSTVQVFSDSEYQPPYVLGSAHQGCLPPFPADVFMIPQYGHLTLNNGSQAVGRSSFYCLEYFPSQMLRTGNNFTFSYTFEEVPFHSSYAHSQSLDRLTNPLIDQYLYYLNRTQNQSGSAQNKDLLFSRGSPAGMSVQPKNWLPGPCYRQQRVSKTKTDNNNSNFTWTGASKYNLNGRESIINPGTAMASHKDDEDKFFPMSGVMIFGKESAGASNTALDNVMITDEEEIKATNPVATERFGTVAVNFQSSSTDPATGDVHAMGALPGMVWQDRDVYLQGPIWAKIPHTDGHFHPSPLMGGFGLKNPPPQILIKNTPVPANPPAEFSATKFASFITQYSTGQVSVEIEWELQKENSKRWNPEVQYTSNYAKSANVDFTVDNNGLYTEPRPIGTRYLTRPL

SEQ ID NO: 743 - protein, 736 aa, synthetic construct
  REGION 1..736: note = Description of Artificial Sequence: Synthetic polypeptide
MAADGYLPDWLEDNLSEGIREWWDLKPGAPKPKANQQEQDDGRGLVLPGYKYLGPFNGLDKGEPVNAADAAALEHDKAYDQQLKAGDNPYLRYNHADAEFQERLQEDTSFGGNLGRAVFQAKKRVLEPLGLVEEGAKTAPGKKRPVEQSPQEPDSSSGIGKTGQQPAKKRLNFGQTGDSESVPDPQPLGEPPATPAAVGPTTMASGGGAPMADNNEGADGVGNASGNWHCDSTWLGDRVITTSTRTWALPTYNNHLYKQISSASTGASNDNHYFGYSTPWGYFDFNRFHCHFSPRDWQRLINNNWGFRPKRLNFKLFNIQVKEVTTNDGVTTIANNLTSTVQVFSDSEYQLPYVLGSAHQGCLPPFPADVFMIPQYGYLTLNNGSQAVGRSSFYCLEYFPSQMLRTGNNFTFSYTFEEVPFHSSYAHSQSLDRLMNPLIDQYLYYLNRTQNQSGSAQNKDLLFSRGSPAGMSVQPKNWLPGPCYRQQRVSKTKTDNNNSNFTWTGASKYNLNGRESIINPGTAMASHKDDEDKFFPMSGVMIFGKESAGASNTALDNVMITDEEEIKATNPVATERFGTVAVNFQSSSTDPATGDVHATGTLPGMVWQDRDVYLQGPIWAKIPHTDGHFHPSPLMGGFGLKNPPPQILIKTTPVPANPPAEFSATKFASFITQYSTGQVSVEIEWELQKENSKRWNPEVQYTSNYAKSANVDFTVDDNGLYTEPRPIGTRYLTRPL

SEQ ID NO: 744 - protein, 736 aa, synthetic construct
  REGION 1..736: note = Description of Artificial Sequence: Synthetic polypeptide
MAADGYLPDWLEDNLSEGIREWWDLKPGAPKPKANQQKQDDGRGLVLPGYKYLGPFNGLDKGEPVNAADAAALEHDKAYDQQLKAGDNPYLRYNHADAEFQERLQEDTSFGGNLGRAVFQAKKRVLEPLGLVEEGAKTAPGKKRPVEQSLQEPDSSSGIGKTGQQPAKKRLNFGQTGDSESVPDPQPLGEPPATPAAVGPTTMASGGGAPMADNNEGADGVGNASGNWHCDSTWLGDRVITTSTRTWALPTYNNHLYKQISSASTGASNDNHYFGYSTPWGYFDFNRFHCHFSPRDWQRLINNNWGFRPKRLNFKLFNIQVKEVTTNDGVTTIANNLTSTVQVFSDSEYQLPYVLGSAHQGCLPPFPADVFMIPQYGYLTLNNGSQAVGRSSFYCLEYFPSQMLRTGNNFTFSYTFEEVPFHSSYAHSQSLDRLMNPLIDQYLYYLNRTQNQSGSAQNKDLLFSRGSPAGMSVQPKNWLPGPCYRQQRVSKTKTDNDNSNFTWTGASKYNLNGRESIINPGTAMASHKDDEDKFFPMSGVMIFGKESAGASNTALDNVMITDEEEIKATNPVATERFGTVAVNFQSSSTDPATGDVHAMGALPGMVWQDRDVYLQGPIWAKIPHTDGHFHPSPLMGGFGLKNPPPQILIKNTPVPANPPAEFSATKFASFITQYSTGQVSVEIEWELQKENSKRWNPEVQYTSNYAKSANVDFTVDNNGLYTEPRPIGTRYLTRPL

SEQ ID NO: 745 - protein, 736 aa, synthetic construct
  REGION 1..736: note = Description of Artificial Sequence: Synthetic polypeptide
MAADGYLPDWLEDNLSEGIREWWDLKPGAPKPKANQQKQDDGRGLVLPGYKYLGPFNGLDKGEPVNAADAAALEHDKAYDQQLKAGDNPYLRYNHADAEFQERLQEDTSFGGNLGRAVFQAKKRVLEPLGLVEEGAKTAPGKKRPVEQSPQEPDSSSGIGKTGQQPAKKRLNFGQTGDSESVPDPQPLGEPPATPAAVGPTTMASGGGAPMADNNEGADGVGNASGNWHCDSTWLGDRVITTSTRTWALPTYNNHLYKQISSASTGASNDNHYFGYSTPWGYFDFNRFHCHFSPRDWQRLINNNWGFRPKRLNFKLFNIQVKEVTTNDGVTTIANNLTSTVQVFSDSEYQLPYVLGSAHQGCLPPFPADVFMIPQYGYLTLNNGSQAVGRSSFYCLEYFPSQMLRTGNNFTFSYTFEEAPFHSSYAHSQSLDRLMNPLIDQYLYYLNRTQNQSGSAQNKDLLFSRGSPAGMSVQPKNWLPGPCYRQQRVSKTKTDNNNSNFTWTGASKYNLNGRESIINPGTAMASHKDDEDKFFPMSGVMIFGKESAGASNTALDNVMITDEEEIKATNPVATERFGTVAVNFQSSSTDPATGDVHAMGALPGMVWQDRDVYLQGPIWAKIPHTDGHFHPSPLMGGFGLKNPPPQILIKNTPVPANPPAEFSATKFASFITQYSTGQVSVEIEWELQKENSKRWNPEVQYTSNYAKSANVDFTVDNNGLYTEPRPVGTRYLTRPL

SEQ ID NO: 746 - protein, 736 aa, synthetic construct
  REGION 1..736: note = Description of Artificial Sequence: Synthetic polypeptide
MAADGYLPDWLEDNLSEGIREWWDLKPGAPKPKANQQKQDDGRGLVLPGYKYLGPFNGLDKGEPVNAADAAALEHDKAYDQQLKAGDNPYLRYNHADAEFQERLQENTSFGGNLGRAVFQAKKRVLEPLGLVEEGAKTAPGKKRPVEQSPQEPDSSSGIGKTGQQPAKKRLNFGQTGDSESVPDPQPLGEPPATPAAVGPTTMASGGGAPMADNNEGADGVGNASGNWHCDSTWLGDRVITTSTRTWALPTYNNHLYKQISSASTGASNDNHYFGYSTPWGYFDFNRFHCHFPPRDWQRLINNNWGFRPKRLNFKLFNIQVKEVTSNDGVTTIANNLTSTVQVFSDSEYQLPYVLGSAHQGCLPPFPADVFMIPQYGYLTLNNGSQAVGRSSFYCLEYFPSQMLRTGNNFTFSYTFEEVPFHSSYAHSQSLDRLMNPLIDQYLYYLNRTQNQSGSAQNKDLLFSRGSPAGMSVQPKNWLPGPCYRQQRVSKTKTDNNNSNFTWTGASKYNLNGRESIINPGTAMASHKDDEDKFFPMSGVMIFGKESAGASNTALDNVMITDEEEIKATNPVATERFGTVAVNFQSSSTDPATGDVHAMGALPGMVWQDRDVYLQGPIWAKIPHTDGHFHPSPLMGGFGLKNPPPQILIKNTPVPANPPAEFSATKFASFITQYSTGQVSVEIEWELQKENSKRWNPEVQYTSNYAKSANVDFTVDNNGLYTEPRPIGTRYLTRPL

SEQ ID NO: 747 - protein, 736 aa, synthetic construct
  REGION 1..736: note = Description of Artificial Sequence: Synthetic polypeptide
MAADGYLPDWLEDNLSEGIREWWDLKPGAPKPKANQQKQDDGRGLVLPGYKYLGPFNGLDKGEPVNAADAAALEHDKAYDQQLKAGDNPYLRYNHADAEFQERLQEDTSFGGNLGRAVFQAKKRVLEPLGLVEEGAKTAPGKKRPVEQSPQEPDSSSGIGKTGQQPAKKRLNFGQTGDSESVPDPQPLGEPPATPAAVGPTTMASGGGAPMADNNEGADGVGNASGNWHCDSTWLGDRVITTSTRTWALPTYNNHLYKQISSASTGASNDNHYFGYSTPWGYFDFNRFHCHFSPRDWQRLINNNWGFRPKRLNFKLFNIQVKEVTTNDGVTTIANNLTSTVQVFSDSEYQLPYVLGSAHQGCLPPFPADVFMIPQYGYLTLNNGSQAVGRSSFYCLEYFPSQMLRTGNNFTFSYTFEEVPFHSSYAHSQSLDRLMNPLIDQYLYYLNRTQNQSGSAQNKDLLFSRGSPAGTSVQPKNWLPGPCYRQQRVSKTKTDNNNSNFTWTGASKYNLNGRESIINPGTAMASHKDDEDKFFPMSGVMIFGKESAGASNTALDNVMITDEEEIKATNPVATERFGTVAVNFQSSSTDPATGDVHAMGALPGMVWQDRDVYLQGPIWAKIPHTDGHFHPSPLMGGFGLKNPPPQILIKNTPVPANPPAEFSATKFASFITQYSTGQVSVEIEWELQKENSKRWNPEVQYTSNYAKSANVDFTVDNNGLYTGPRPIGTRYLTRPL

SEQ ID NO: 748 - protein, 736 aa, synthetic construct
  REGION 1..736: note = Description of Artificial Sequence: Synthetic polypeptide
MAADGYLPDWLEDNLSEGIREWWDLKPGAPKPKANQQKQDDGRGLVLPGYKYLGPFNGLDKGEPVNAADAAALEHDKAYDQQLKAGDNPYLRYNHADAEFQERLQEDTSFGGNLGRAVFQAKKRVLEPLGLVEEGAKTAPGKKRPVEQSPQEPDSSSGIGKTGQQPAKKRLNFGQTGDSESVPDPQPLGEPPATPAAVGPTTMASGGGAPMADNNEGADGVGNAPGNWHCDSTWLGDRVITTSTRTWALPTYNNHLYKQISSASTGASNDNHYFGYSTPWGYFDFNRFHCHFSPRDWQRLINNNWGFRPKRLNFKLFNIQVKEVTTNDGVTTIANNLTSTVQVFSDSEYQLPYVLGSAHQGCLPPFPADVFMIPQYGYLTLNNGSQAVGRSSFYCLEYFPSQMLRTGNNFTFSYTFEEVPFHSSYAHSQSLDRLMNPLIDQYLYYLNRTQNQSGSAQNKDLLFSRGSPAGMSVQPKNWLPGPCYRQQRVSKTKTDNNNSNFTWTGASKYNLNGRESIINPGTAMASHKDDEDKFFPMSGVMIFGKESAGASNTALDNVMITGEEEIKATNPVATERFGTVAVNFQSSSTDPATGDVHAMGALPGMVWQDRDVYLQGPIWAKIPHTDGHFHPSPLMGGFGLKNPPPQILIKNTPVPANPPAEFSATKFASFITQYSTGQVSVEIEWELQKENSKRWNPEVQYTSNYAKSANVDFTVDNNGLYTEPRPIGTRYLTRPL

SEQ ID NO: 749 - protein, 736 aa, synthetic construct
  REGION 1..736: note = Description of Artificial Sequence: Synthetic polypeptide
MAADGYLPDWLEDNLSEGIREWWDLKPGAPKPKANQQKQDDGRGLVLPGYKYLGPFNRLDKGEPVNAADAAALEHDKAYDQQLKAGDNPYLRYNHADAEFQERLQEDTSFGGNLGRAVFQAKKRVLEPLGLVEEGAKTAPGRKRPVEQSPQEPDSSSGIGKTGQQPAKKRLNFGQTGDSESVPDPQPLGEPPATPAAVGPTTMASGGGAPMADNNEGADGVGNASGNWHCDSTWLGDRVITTSTRTWALPTYNNHLYKQISSASTGASNDNHYFGYSTPWGYFDFNRFHCHFSPRDWQRLINNNWGFRPKRLNFKLFNIQVKEVTTNDGVTTIANNLTSTVQVFSDSEYQLPYVLGSAHQGCLPPFPADVFMIPQYGYLTLNNGGQAVGRSSFYCLEYFPSQMLRTGNNFTFSYTFEEVPFHSSYAHSQSLDRLMNPLIDQYLYYLNRTQNQSGSAQNKDLLFSRGSPAGMSVQPKNWLPGPCYRQQRVSKTKTDNNNSNFTWTGASKYSLNGRESIINPGTAMASHKDDEDKFFPMGGVMIFGKESAGASNTALDNAMITDEEEIKATNPVATERFGTVAVNFQSSSTDPATGDVHAMGALPGMVWQDRDVYLQGPIWAKIPHTDGHFHPSPLMGGFGLKNPPPQILIKNTPVPANPPAEFSATKFASFITQYSTGQVSVEIEWELQKENSKRWNPEVQYTSNYAKSANVDFTVDNNGLYTEPRPIGTRYLTRPL

SEQ ID NO: 750 - protein, 736 aa, synthetic construct
  REGION 1..736: note = Description of Artificial Sequence: Synthetic polypeptide
MAADGYLPDWLEDNLSEGIREWWDLKPGAPKPKANQQKQDDGRGLVLPGYKYLGPFNGLDKGEPVNAADAAALEHDKAYDQQLKAGDNPYLRYNHADAEFQERLQEDTSFGGNLGRAVFQAKKRVLEPLGLVEEGAKTAPGKKRPVEQSPQEPDSSSGIGKTGQQPAKKRLNFGQTGDSESVPDPQPLGEPPATPAAVGPTTMASGGGAPMADNNEGADGVGNASGNWHCDSTWLGGRVITTSTRTWALPTYNNHLYKQISSASTGASNDNHYFGYSTPWGYFDFNRFHCHFSPRDWQRLINNNWGFRPKRLNFKLFNIQVKEVTTNDGVTTIANNLTSTVQVFSDSEYQLPYVLGSAHQGCLPPFPADVFMIPQYGYLTLNNGSQAVGRSSFYCLEYFPSQMLRTGNNSTFSYTFEEVPFHSSYAHSQSLDRLMNPLIDQYLYYLNRTQNQSGSAQNKDLLFSRGSPAGMSVQPKNWLPGPCYRQQRVSKTKTDNNNSNFTWTGASKYNLNGRESIINPGTAMASHKDDEDKFFPMSGVMIFGKESAGASNTALDNVMITDEEEIKATNPVATERFGTVAVNFQSSSTDPATGDVHAMGTLPGMVWQDRDVYLQGPIWAKIPHTDGHFHPSPLMGGFGLKNPPPQILIKNTPVPANPPAEFSATKFASFITQYSTGQVSVEIEWELQKENSKRWNPEVQYTSNYAKSANVDFTVDNNGLYTEPRPIGTRYLTRPL

SEQ ID NO: 751 - protein, 736 aa, synthetic construct
  REGION 1..736: note = Description of Artificial Sequence: Synthetic polypeptide
MAADGYLPDWLEDNLSEGIREWWDLKPGAPKPKANQQKQDDGRGLVLPGYKYLGPFNGLDKGEPVSAADAAALEHDKAYDQQLKAGDNPYLRYNHADAEFQERLQEDTSFGGNLGRAVFQAKKRVLEPLGLVEEGAKTAPGKKRPVEQSPQEPDSSSGIGKTGQQPAKERLNFGQTGDSESVPDPQPLGEPPATPAAVGPTTMASGGGAPMADNNEGADGVGNASGNWHCDSTWLGDRVITTSTRTWALPTYNNHLYKQISSASTGASNDNHYFGYSTPWGYFDFNRFHCHFSPRDWQRLINNNWGFRPKRLNFKLFNIQVKEVTTNDGVTTIANNLTSTVQVFSDSEYQLPYVLGSAHQGCLPPFPADVFMIPQYGYLTLNNGSQAVGRSSFYCLEYFPSQMLRTGNNFTFSYTFEEVPFHSSYAHSQSLDRLMNPLIDQYLYYLNRTQNQSGSAQNKDLLFSRGSPAGMSVQPKNWLPGPCYRQQRVSKTKTDNNNSNFTWTGASKYNLNGRESIINPGTAMASHKDDEDKFFPMSGVMIFGKESAGASNTALDNVMITDEEEIKATNPVATERFGTVAVNFQSSSTDPATGDVHAMGALPGMVWQDRDVYLQGPIWAKIPHTDGHFHPSPLMGGFGLKNPPPQILIKNTPVPANPPAEFSATKFASFITQYSTGQVSVEIEWELQKENSKRWNPEVQYTSNYAKSANVDFTVDNNGLYTEPRPIGTRYLTRPL

SEQ ID NO: 752 - protein, 736 aa, synthetic construct
  REGION 1..736: note = Description of Artificial Sequence: Synthetic polypeptide
MAADGYLPDWLEDNLSEGIREWWDLKPGAPKPKANQQKQDDGRGLVLPGYKYLGPFNGLDKGEPVNAADAAALEHDKAYDQQLKAGDNPYLRYNHADAEFQERLQEDTSFGGNLGRAVFQAKKRVLEPLGLVEEGAKTAPGKKRPVEQSPQEPDSSSGIGKTGQQPAKKRLNFGQTGDSESVPDPQPLGEPPATPAAVGPTTMASGGGAPMADNNEGADGVGNASGNWHCDSTWLGDRVITTSTRTWALPTYNNHLYKQISSASTGASNDNHYFGYSTPWGYFDFNRFHCHFSPRDWQRLINNNWGFRPKRLNFKLFNIQVKEVTTNDGVTTIANNLTSTVQVFSDSEYQLPYVLGSAHQGCLPPFPADVFMIPQYGYLTLNNGSQAVGRSSFYCLEYFPSQMLRTGNNFTFSYTFEEVPFHSSYAHSQSLDRLMNPLIDQYLYYLNRTQNQSGSAQNKDLLFSRGSPAGMSVQPKNWLPGPCYRQQRVSKTKTDNNNSNFTWTGASKYNLNGRESIINPGTAMASHKDDEDKFFPMSGVMIFGKESAGASNTALDNVMITDEGEIKATNPVATERFGTVAVNFQSSSTDPATGDVHAMGALPGMVWQDRDVYLQGPIWAKIPHTDGHFHPSPLMGGFGLKNPPPQILIKNTPVPANPPAEFSATKFASFITQYSTGQVSVEIEWELQKENSKRWNPEVQYTSNYAKSANVDFTVDNNGLYTEPRPIGTRYLTRPL

SEQ ID NO: 753 - protein, 736 aa, synthetic construct
  REGION 1..736: note = Description of Artificial Sequence: Synthetic polypeptide
MAADGYLPDWLEDNLSEGIREWWDLKPGAPKPKANQQKQDDGRGLVLPGYKYLGPFNGLDKGEPVNAADAAALEHDKAYDQQLKAGDNPYLRYNHADAEFQERLQEDTSFGGNLGRAVFQAKKRVLEPFGLVEEGAKTAPGKKRPVEQSPQEPDSSSGIGKTGQQPAKKRLNFGQTGDSESVPDPQPLGEPPATPAAVGPTTMASGGGAPMADNNEGADGVGNASGNWHCDSTWLGDRVITTSTRTWALPTYNNHLYKQISSASTGASNDNHYFGYSTPWGYFDFNRFHCHFSPRDWQRLINNNWGFRPKRLNFKLFNIQVKEVTTNDGVTTIANNLTSTVQVFSDSEYQLPYVLGSAHQGCLPPFPADVFMIPQYGYLTLNNGSQAVGRSSFYCPEYFPSQMLRTGNNFTFSYTFEEVPFHSSYAHSQSLDRLMNPLIDQYLYYLNRTQNQSGSAQNKDLLFSRGSPAGMSVQPKNWLPGPCYRQQRVSKTKTDNNNSNFTWTGASKYNLNGRESIINPGTAMASHKDDKDKFFPMSGVMIFGKESAGASNTALDNVMITDEEEIKATNPVATERFGTVAVNFQSSNTDPATGDVHVMGALPGMVWQDRDVYLQGPIWAKIPHTDGHFHPSPLMGGFGLKHPPPQILIKNTPVPANPPAEFSATKFASFITQYSTGQVSVEIEWELQKENSKRWNPEVQYTSNYAKSANVDFTVDNNGLYTEPRPIGTRYLTRPL

SEQ ID NO: 754 - protein, 736 aa, synthetic construct
  REGION 1..736: note = Description of Artificial Sequence: Synthetic polypeptide
MAADGYLPDWLEDNLSEGIREWWDLKPGAPKPKANQQKQDDGRGLVLPGYKYLGPFNGLDKGEPVNAADAAALEHDKAYDQQLKAGDNPYLRYNHADAEFQERLQEDTSFGGNLGRAVFQAKKRVLEPFGLVEEGAKTAPGKKRPVEQSPQEPDSSSGIGKTGQQPAKKRLNFGQTGDSESVPDPQPLGEPPATPAAVGPTTMASGGGAPMADNNEGADGVGNASGNWHCDSTWLGDRVITTSTRTWALPTYNNHLYKQISSASTGASNDNHYFGYSTPWGYFDFNRFHCHFSPRDWQRLINNNWGFRPKRLNFKLFNIQVKEVTTNDGVTTIANNLTSTVQVFSDSEYQLPYVLGSAHQGCLPPFPADVFMIPQYGYLTLNNGSQAVGRSSFYCLEYFPSQMLRTGNNFTFSYTFEEVPFHSSYAHSQSLDRLMNPLIDQYLYYLNRTQNQSGSAQNKDLLFSRGSPAGMSVQPKNWLPGPCYRQQRVSKTKTDNNNSNFTWTGASKYNLNGRESIINPGTAMASHKDDKDKFFPMSGVMIFGKESAGASNTALDNVMITDEEEIKATNPVATERFGTVAVNFQSSDTDPATGDVHVMGALPGMVWQDRDVYLQGPIWAKIPHTDGHFHPSPLMGGFGLKHPPPQILIKNTPVPANPPAEFSATKFASFITQYSTGQVSVEIEWELQKENSKRWNPEVQYTSNYAKSANVDFTVDNNGLYTEPRPIGTRYLTRPL

SEQ ID NO: 755 - protein, 736 aa, synthetic construct
  REGION 1..736: note = Description of Artificial Sequence: Synthetic polypeptide
MAADGYLPDWLEDNLSEGIREWWDLKPGAPKPKANQQKQGDGRGLVLPGYKYLGPFNGLDKGEPVNAADAAALEHDKAYDQQLKAGDNPYLRYNHADAEFQERLQEDTSFGGNLGRAVFQAKKRVLEPFGLVEEGAKTAPGKKRPVEQSPQEPDSSSGIGKTGQQPAKKRLNFGQTGDSESVPDPQPLGEPPATPAAVGPTTMASGGGAPMADNNEGADGVGNASGNWHCDSTWLGDRVITTNTRTWALPTYNNHLYKQISSASTGASNDNHYFGYSTPWGYFDFNRFHCHFSPRDWQRLINNNWGFRPKRLNFKLFNIQVKEVTTNDGVTTIANNLTSTVQVFSDSEYQLPYVLGSAHQGCLPPFPADVFMIPQYGYLTLNNGSQAVGRSSFYCLEYFPSQMLRTGNNFTFSYTFEEVPFHSSYGHSQSLDRLMNLLIDQYLYYLNRTQNQSGSAQNKDLLFSRGSPAGMFVQPKNWLPGPCYRQQRVSKTKTDNNNSNFTWTGASKYNLNGRESIINPGTAMASHKDDEDKFFPMSGVMIFGKESAGASNTALDNVMITDEEEIKATNPVATERFGTVAVNFQSSSTDPATGDVHVMGALPGMVWQDRDVYLQGPIWAKIPHTDGHFHPSPLMGGFGLKHPPPQILIKNTPVPANPPAEFSATKFASFITQYSTGQVSVEIEWELQKENSKRWNPEVQYTSNYAKSANVDFTVDNNGLYTEPRPIGTRYLTRPL

SEQ ID NO: 756 - protein, 736 aa, synthetic construct
  REGION 1..736: note = Description of Artificial Sequence: Synthetic polypeptide
MAADGYLPDWLEDNLSEGIREWWDLKPGAPKPKANQQKQDDGRGLVLPGYKYLGPFNGLDKGEPVNAADAAALEHDKAYDQQLKAGDNPYLRYNHADAEFQERLQEDTSFGGNLGRAVFQAKKRVLEPFGLVEEGAKTAPGKKRPVEQSPQEPDSSSGIGKTGQQPAKKRLNFGQTGDSESVPDPQPLGEPPATPAAVGPTTMASGGGAPMADNNEGADGVGNASGNWHCDSTWLGDRVITTNTRTWALPTYNNHLYKQISSASTGASNDNHYFGYSTPWGYFDFNRFHCHFSPRDWQRLINNNWGFRPKRLNFKLFNIQVKEVTTNDGVTTIANNLTSTVQVFSDSEYQLPYVLGSAHQGCLPPFPADVFMIPQYGYLMLNNGSQAVGRSSFYCLEYFPSQMLRTGNNFTFSYTFEEVPFHSSYAHSQSLDRLMNPLIDQYLYYLNRTQNQSGSAQNKDLLFSRGSPAGMSVQPKNWLPGPCYRQQRVSKTKTDNNNSNFTWTGASKYNLNGRESIINPGTAMASHKDDEDKFFPMSGVMIFGKESAGASNTALDNVMITDEEEIKATNPAATERFGTVAVNFQSSSTDPATGDVHVMGALPGMVWQDRDVYLQGPIWAKIPHTDGHFHPSPLMGGFGLKHPPPQILIKNTPVPANPPAEFSATKFASFITQYSTGQVSVEIEWELQKENSKRWNPEVQYTSNYAKSANVDFTVDNNGLYTEPRPIGTRYLTRPL

SEQ ID NO: 757 - protein, 736 aa, synthetic construct
  REGION 1..736: note = Description of Artificial Sequence: Synthetic polypeptide
MAADGYLPDWLEDNLSEGIREWWDLKPGAPKPKANQQKQDDGRGLVLPGYKYLGPFNGLDKGEPVNAADAAALEHDKAYDQQLKAGDNPYLRYNHADAEFQERLQEDTSFGGNLGRAVFQAKKRVLEPFGLVEEGAKTAPGKKRPVEQSPQEPDSSSGIGKTGQQPAKKRLNFGQTGDSESVPDPQPLGEPPATPAAVGPTTMASGGGAPMADNNEGADGVGNASGNWHCDSTWLGDRVITTSTRTWALPTYNNHLYKQISSASTGASNDNHYFGYSTPWGYFDFNRFHCHFSPRDWQRLINNNWGFRPKRLNFKLFNIQVKEVTTNDGVTTIANNLTSTVQVFSDSEYQLPYVLGSAHQGCLPPFPADVFMIPQYGYLTLNNGSQAVGRSSFYCLEYFPSQMLRTGNNFTFSYTFEEVPFHSSYAHSQSLDRLMNPLIDQYLYYLNRTQNQSGSAQNKDLLFSRGSPAGMSVQPKNWLPGPCYRQQRVSKTKTDNNNSNFTWTGASKYNLNGRESIINPGTAMASHKDDEDKFFPMSGVMIFGKESAGASNTALDNVMITDEEEIKATNPVATERFGTVAVNFQSSSTDPATGDVHVMGALPGMVWQDRDVYLQGPIWAKIPHTDGHFHPSPLMGGFGLKHPPPQILIKNTPVPANPPAEFSATKFASFITQYSTGQVSVEIEWELQKENSKRWNPEVQYTSNYAKSANVDFTVDNNGLYTEPRPIGTRYLTRPL

SEQ ID NO: 758 - protein, 736 aa, synthetic construct
  REGION 1..736: note = Description of Artificial Sequence: Synthetic polypeptide
  VARIANT 102: note = Xaa = any amino acid
MAADGYLPDWLEDNLSEGIREWWDLKPGAPKPKANQQKQDDGRGLVLPGYKYLGPFNGLDKGEPVNAADAAALEHDKAYDQQLKAGDNPYLRYNHADAEFQXRLQEDTSFGGNLGRAVFQAKKRVLEPFGLVEEGAKTAPGKKRPVEQSPQEPDSSSGIGKTGQQPAKKRLNFGQTGDSESVPDPQPLGEPPATPAAVGPTTMASGGGAPMADNNEGADGVGNASGNWHCDSTWLGGRVITTSTRTWALPTYNNHLYKQISSASTGASNDNHYFGHSTPWGYFDFNRFHCHFSPRDWQRLINNNWGFRPKRLNFKLFNIQVKEVTTNDGVTTIANNLTSTVQVFSDSEYQLPYVLGSAHQGCLPPSPADVFMIPQYGYLTLNNGSQAVGRSSFYCLEYFPSQMLRTGNNFTFSYTFEEVPFHSSYAHSQSLDRLMNPLIDQYLYYLNRTQNQSGSAQNKDLLFSRGSPAGMSVQPKNWLPGPCYRQQRVSKTKTDNNNSNFTWTGASKYNLNGRESIINPGTAMASHKDDKDKFFPMSGVMIFGKESAGASNTALDNVMITDEEEIKATNPVATERFGTVAVNFQSSNTDPATGDVHVMGALPGMVWQDRDVYLQGPIWAKIPHTDGHFHPSPLMGGFGLKHPPPQILIKNTPVPANPPAEFSATKFASFITQYSTGQVSVEIEWELQKENSKRWNPEVQYTSNYAKSANVDFTVDNNGLYTEPRPIGTRYLTRPL

SEQ ID NO: 759 - protein, 736 aa, synthetic construct
  REGION 1..736: note = Description of Artificial Sequence: Synthetic polypeptide
MAADGYFPDWLEDNLSEGIREWWDLKPGAPKPKANQQKQDDGRGLVLPGYKYLGPFNGLDKGEPVNAADAAALEHDKAYDQQLKAGDNPYLRYNHADAEFQERLQEDTSFGGNLGRAVFQAKKRVLEPFGLVEEGAKTAPGKKRPVEQSPQEPDSSSGIGRTGQQPAKKRLNFGQTGDSESVPDPQPLGEPPATPAAVGPTTMASGGGAPMADNNEGADGVGNASGNWHCDSTWLGDRVITTSTRTWALPTYNNHLYKQISSASTGASNDNHYFGYSTPWGYFDFNRFHCHFSPRDWQRLINNNWGFRPKRLNFKLFNIQVKEVTTNDGVTTIANNLTSTVQVFSDSEYQLPYVLGSAHQGCLPPFPADVFMIPQYGYLTLNNGSQAVGRSSFYCLEYFPSQMLRTGNNFTFSYTFEEVPFHSSYAHSQSLDRLMNPLIDQYLYYLNRTQNQSGSAQNKDLLFSRGSPAGMSVQPKNWLPGPCYRQQRVSKTKTDNNNSNFTWTGASKYNLNGRESIINPGTAMASHKDDEDKFFPMSGVMIFGKESAGASNTALDNVMITDEEEIKATNPVATERFGTVAVNFQSSSPDPATGDVHVMGALPGMVWQDRDVYLQGPIWAKIPHTDGHFHPSPLMGGFGLKHPPPQILIKNTPVPANPPAEFSATKFASFITQYSTGQVSVEIEWELQKENSKRWNPEVQYTSNYAKSANVDFTVDNNGLYSEPRPIGTRYLTRPL

SEQ ID NO: 760 - protein, 736 aa, synthetic construct
  REGION 1..736: note = Description of Artificial Sequence: Synthetic polypeptide
MAADGYLPDWLEDNLSEGIREWWDLKPGAPKPKANQQKQDDGRGLVLPGYKYLGPFNGLDKGEPVNAADAAALEHDKAYDQQLKAGDNPYLRYNHADAEFQERLQEDTSFGGNLGRAVFQAKKRVLEPFGLVEEGAKTAPGKKRPVEQSPQEPDSSSGIGKTGQQPAKKRLNFGQTGDSESVPDPQPLGEPPATPAAVGPTTMASGGGAPMADNNEGADGVGNASGNWHCDSTWLGDRVITTSTRTWALPTYNNHLYKQTSSASTGASNDNHYFGYSTPWGYFDFNRFHCHFSPRDWQRLINNNWGFRPKRLNFKLFNIQVKEVTTNDGVTTIANNLTSTVQVFSDSEYQLPYVLGSAHQGCLPPFPADVFMIPQYGYLTLNNGSQAVGRSSFYCLEYFPSQMLRTGNNFTFSYTFEEVPFHSSYAHSQSLDRLMNPLIDQYLYYLNRTQNQSGSAQNKDLLFSRGSPAGMSVQPKNWLPGPCYRQQRVSKTKTDYNNSNFTWTGASKYNLNGRESIINPGTAMASHKDDEDKFFPMSGVMIFGKESAGASNTALDNVMITDEEEIKATNPVATERFGTVAVNFQSSSTDPATGDVHVMGALPGMVWQDRDVYLQGPIWAKIPHTDGHFHPSPLMGGFGLKHPPPQILIKNTPVPANPPAEFSATKFASFITQYSTGQVSVEIEWELQKENSKRWNPEVQYTSNYAKSANVDFTVDNNGLYTEPRPIGTRYLTRPL

SEQ ID NO: 761 - protein, 736 aa, synthetic construct
  REGION 1..736: note = Description of Artificial Sequence: Synthetic polypeptide
MAADGYPPDWLEDNLSEGIREWWDLKPGVPKPKANQQKQDDGRGLVLPGYKYLGPFNGLDKGEPVNAADAAALEHDKAYDQQLKAGDNPYLRYNHADAEFQERLQEDTSFGGNLGRAVFQAKKRVLEPFGLVEEGAKTAPGKKRPVEQSPQEPDSSSGIGKTGQQPAKKRLNFGQTGDSESVPDPQPLGEPPATPAAVGPTTMASGGGAPMADNNEGADGVGNASGNWHCDSTWLGDRVITTSTRTWALPTYNNHLYKQISSASTGASNDNHYFGYSTPWGYFDFNRFHCHFSPRDWQRLINNNWGFRPKRLNFKLFNIQVKEVTTNDGVTTIANNLTSTVQVFSDSEYQLPYVLGSAHQGCLPPFPADVFMIPQYGYLTLNNGSQAVGRSSFYCLEYFPSQMLRTGNNFTFSYTFEEVPFHSSYAHSQSLDRLMNPLIDQYLYYLNRTQNQSGSAQNKDLLFSRGSPAGMSVQPKNWLPGPCYRQQRVSKTKTDNNNSNFTWTGASKYNLNGRESIINPGTAMASHKDDEDKFFPMSGVMIFGKESAGASNTALDNVMITDEEEIKATNPVATERFGTVAVNFQSSSTDPATGDVHVMGALPGMVWQDRDVYLQGPIWAKIPHTDGHFHPSPLMGGFGLKHPPPQILIKNTPVPANPPAEFSATKFASFITQYSTGQVSVEIEWELQKENSKRWNPEVQYTSNYAKSANVDFTVDNNGLYTEPRPIGTRYLTRPL

SEQ ID NO: 762 - protein, 732 aa, synthetic construct
  REGION 1..732: note = Description of Artificial Sequence: Synthetic polypeptide
MAADGYLPDWLEDNLSEGIREWWDLKPGAPKPKANQQKQDDGRGLVLPGYKYLGPFNGLDKGEPVNAADAAALEHDKAYDQQLKAGDNPYLRYNHADAEFQERLQEDTSFGGNLGRAVFQAKKRVLEPFGLVEEGAKTAPGKKRPVEQSPQEPDSSSGIGKTGQQPAKKRLNFGQTGDSESVPDPQPLGEPPATPAAVGPTTMASGGGAPMADNNEGADGVGNASGNWHCDSTWLGDRVITTSTRTWALPTYNNHLYKQISSASTGASNDNHYFGYSTPWGYFDFNRFHCHFSPRDWQRLINNNWGFRPKRLNFKLFNIQVKEVTTNDGVTTIANNLTSTVQAFSDSEYQLPYVLGSAHQGCLPPFPADVFMIPQYGYLTLNNGSQAVGRSSFYCLEYFPSQMLRTGNNFTFSYTFEEVPFHSSYAHSQSLDRLMNPLIDPYLYYLNRTQNQSGSAQNKDLLFSRGSPAGMSVQPKNWLPGPCYRQQRVSKTKTDNNNSNFTWTGASKYNLNGRESIINPGTAMASHKDDEDKFFPMSGVMIFGKESAGASNTALDNVMITDEEEIKATNPVATERFGTVAVNFQSSSTDPATGDVHVMGALPGMVWQDRDVYLQGPIWAKIPHTDGHFHPSPLMGGFGLKHPPPQILIKNTPVPANPPAEFSATKFASFITQYSTGQVSVEIEWELQKENSKRWNPEVQYTSNYAKSANVDFTVDNNGLYTEPRPIGTRYL

SEQ ID NO: 763 - protein, 736 aa, synthetic construct
  REGION 1..736: note = Description of Artificial Sequence: Synthetic polypeptide
MAADGYLPDWLEDNLSEGIREWWDLKPGAPKPKANQQKQDDGRGLVLPGYKYLGPFNGLDKGEPVNAADAAALEHDKAYDQQLKAGDNPYLRYNHADAEFQERLQEDTSFGGNLGRAVFQAKKRVLEPFGLVEEGAKTAPGKKRPVEQSPQEPDSSSGIGKTGQQPAKKRLNFGQTGDSESVPDPQPLGEPPATPAAVGPTTMASGGGAPMADNNEGADGVGNASGNWHCDSTWLGDRVITTSTRTWALPTYNNHLYKQISSASTGASNDNHYFGYSTPWGYFDFNRFHCHFSPRDWQRLINNNWGFRPKRLNFKLFNIQVKEVTTNDGVTTIANNLTSTVQVFSDSEYQLPYVLGSAHQGCLPPFPADVFMIPQYGYLTLNNGSQAVGRSSFYCLEYFPSQMLRTGNNFTFSYTFEEVPFHSSYAHSQSLDRLMNPLIDQYLYYLNRTQNQSGSAQNKDLLFSRGSPAGMSVQPKNWLPGPCYRQQRVSKTKTDNNNSNFTWTGASKYNLNGRESIINPGTAMASHKDDEDKFFPMSGVMIFGKESAGASNTALDNVMITDEEEIKATNPVATERFGTVAVNFQSSSTDPATGDVHVMGALPGMVWQDRDVYLQGPIWAKIPHTDGHSHPSPLMGGFGLKHPPPQILIKNTPVPANPPAEFSATKFASFITQYSTGQVSVEIEWELQKENSKRWNPEVQYTSNYAKSANVDFTVDNNGLYTEPRPIGTRYLTRPL

SEQ ID NO: 764 - protein, 736 aa, synthetic construct
  REGION 1..736: note = Description of Artificial Sequence: Synthetic polypeptide
MAADGYLPDWLEDNLSEGIREWWDLKPGAPKPKANQQKQDDGRGLVLPGYKYLGPFNGLDKGEPVNAADAAALEHDKAYDQQLKAGDNPYLRYNHADAEFQERLQEDTSFGGNLGRAVFQAKKRVLEPFGLVEEGAKTAPGKKRPVEQSPQEPDSSSGIGKTGQQPAKKRLNFGQTGDSESVPDPQPLGEPPATPAAVGPTTMASGGGAPMADNNEGADGVGNASGNWHCDSTWLGDRVITTSTRTWALPTYNNHLYKQISSASTGASNDNHYFGYSTPWGYFDFNRFHCHFSPRDWQRLINNNWGFRPKRLNFKLFNIQVKEVTTNDGVTTIANNLTSTVQVFSDSEYQLPYVLGSAHQGCLPPFPADVFMIPQYGYLTLNNGSQAVGRSSFYCLEYFPSQMLRTGNNFTFSYTFEEVPFHSSYAHSQSLDRLMNPLIDLYLYYLNRTQNQSGSAQNKDLLFSRGSPAGMSVQPKNWLPGPCYRQQRVSKTKTDNNNSNFTWTGASKYNLNGRESIINPGTAMASHKDDEDKFFPMSGVMIFGKESAGTSNTALDNVMITDEEEIKATNPVATERFGTVAVNFQSSSTDPATGDVHVMGALPGMVWQDRDVYLQGPIWAKIPHTDGHFHPSPLMGGFGLKHPPPQILIKNTPVPANPPAEFSATKFASFITQYSTGQVSVEIEWELQKENSKRWNPEVQYTSNYAKSANVDFTVDNNGLYTEPRPIGTRYLTRPL

SEQ ID NO: 765 - protein, 736 aa, synthetic construct
  REGION 1..736: note = Description of Artificial Sequence: Synthetic polypeptide
MAADGYLPDWLEDSLSEGIREWWDLKPGAPKPKANQQKQDDGRGLVLPGYKYLGPFNGLDKGEPVNAADAAALEHDKAYDQQLKAGDNPYLRYNHADAEFQERLQEDTSFGGNLGRAVFQAKKRVLEPFGLVEEGAKTAPGKKRPVEQSPQEPDSSSGIGKTGQQPAKKRLNFGQTGDSESVPDPQPLGEPPATPAAVGPTTMASGGGAPMADNNEGADGVGNASGNWHCDSTWLGDRVITTSTRTWALPTYNNHLYKQISSASTGASNDNHYFGYSTPWGYFDFNRFHCHFSPRDWQRLINNNWGFRPKRLNFKLFNIQVKEVTTNDGVTTIANNLTSTVQVFSDSEYQLPYVLGSAHQGCLPPFPADVFMIPQYGYLTPNNGSQAVGRSSFYCLEYFPSQMLRTGNNFTFSYTFEEVPFHSSYAHSQSLDRLMNPLIDQYQYYLNRTQNQSGSAQNKDLLFSRGSPAGMSVQPKNWLPGPCYRQQRVSKTKTDNNNSNFTWTGASKYNLNGRESIINPGTAMASHKDDEDKFFPMSGVMIFGKESAGASNTALDNVMITDEEEIKATNPVATERFGTVAVNFQSSSTDPATGDVHVMGALPGMVWQDRDVYLQGPIWAKIPHTDGHFHPSPLMGGFGLKHPPPQILIKNTPVPANPPAEFSATKFASFITQYSTGQVSVEIEWELQKENSKRWNPEVQYTSNYAKSANVDFTVDNNGLYTEPRPIGTRYLTRPL

SEQ ID NO: 766 - protein, 736 aa, synthetic construct; identical to SEQ ID NO: 757
  REGION 1..736: note = Description of Artificial Sequence: Synthetic polypeptide

SEQ ID NO: 767 - protein, 735 aa, synthetic construct
  REGION 1..735: note = Description of Artificial Sequence: Synthetic polypeptide
MAADGYLPDWLEDTLSEGIRQWWKLKPGPPPPKPAERHKDDSRGLVLPGYKYLGPFNGLDKGEPVNEADAAALEHDKAYDRQLDSGDNPYLKYNHADAEFQERLKEDTSFGGNLGRAVFQAKKRVLEPLGLVEEPVKTAPGKKRPVEHSPVEPDSSSGTGKAGQQPARKRLNFGQTGDADSVPDPQPLGQPPAAPSGLGTNTMATGSGAPMADNNEGADGVGNSSGNWHCDSTWMGDRVITTSTRTWALPTYNNHLYKQISSQSGASNDNHYFGYSTPWGYFDFNRFHCHFSPRDWQRLINNNWGFRPKRLNFKLFNIQVKEVTQNDGTTTIANNLTSTVQVFTDSEYQLPYVLGSAHQGCLPPFPADVFMVPQYGYLTLNNGSQAVGRSSFYCLEYFPSQMLRTGNNFTFSYTFEDVPFHSSYAHSQSLDRLMNPLIDQYLYYLSRTNTPSGTTTQSRLQFSRAGASDIRDQSRNWLPGPCYRQQRVSKTSADNNNSEYSWTGATKYHLNGRDSLVNPGPAMASHKDDEEKFFPQSGVLIFGKQGSEKTNVDIEKVMITDEEEIRTTNPVATEQYGSVSTNLQRGNRQAATADVNTQGVLPGMVWQDRDVYLQGPIWAKIPHTDGHFHPSPLMGGFGLKHPPPQILIKNTPVPANPSTTFSAAKFASFITQYSTGQVSVEIEWELQKENSKRWNPEIQYTSNYNKSVNVDFTVDTNGVYSEPRPIGTRYLTRNL

SEQ ID NO: 768 - DNA, 2211 bp, synthetic construct
  misc_feature 1..2211: note = Description of Artificial Sequence: Synthetic polynucleotide
  source 1..2211: mol_type = other DNA
atggctgctgacggttatcttccagattggctcgaggacaacctttctgaaggcattcgtgagtggtgggctctgaaacctggagtccctcaacccaaagcgaaccaacaacaccaggacaaccgtcggggtcttgtgcttccgggttacaaatacctcggacccggtaacggactcgacaaaggagagccggtcaacgaggcggacgcggcagccctcgaacacgacaaagcttacgaccagcagctcaaggccggtgacaacccgtacctcaagtacaaccacgccgacgccgagtttcaggagcgtcttcaagaagatacgtcttttgggggcaaccttggcagagcagtcttccaggccaaaaagaggatccttgagcctcttggtctggttgaggaagcagctaaaacggctcctggaaagaagaggcctgtagatcagtctcctcaggaaccggactcatcatctggtgttggcaaatcgggcaaacagcctgccagaaaaagactaaatttcggtcagactggcgactcagagtcagtcccagaccctcaacctctcggagaaccaccagcagcccccacaagtttgggatctaatacaatggcttcaggcggtggcgcaccaatggcagacaataacgagggtgccgatggagtgggtaattcctcaggaaattggcattgcgattcccaatggctgggcgacagagtcatcaccaccagcaccagaacctgggccctgcccacttacaacaaccatctctacaagcaaatctccagccaatcaggagcttcaaacgacaaccactactttggctacagcaccccttgggggtattttgactttaacagattccactgccacttctcaccacgtgactggcagcgactcattaacaacaactggggattccggcccaagaaactcagcttcaagctcttcaacatccaagttaaagaggtcacgcagaacgatggcacgacgactattgccaataaccttaccagcacggttcaagtgtttacggactcggagtatcagctcccgtacgtgctcgggtcggcgcaccaaggctgcctcccgccgtttccagcggacgtcttcatggtccctcagtatggatacctcaccctgaacaacggaagtcaagcggtgggacgctcatccttttactgcccggagtacttcccttcgcagatgctaaggactggaaataacttccaattcagctataccttcgaggatgtaccttttcacagcagctacgctcacagccagagtttggatcgcttgatgaatcctcttattgatcagtatctgtactacctgaacagaacgcaaggaacaacctctggaacaaccaaccaatcacggctgctttttagccaggctgggcctcagtctatgtctttgcaggccagaaattggctacctgggccctgctaccggcaacagagactttcaaagactgctaacgacaacaacaacagtaactttccttggacagcggccagcaaatatcatctcaatggccgcgactcgctggtgaatccaggaccagctatggccagtcacaaggacgatgaagaaaaatttttccctatgcacggcaatctaatatttggcaaagaagggacaacggcaagtaacgcagaattagataatgtaatgattacggatgaagaagagattcgtaccaccaatcctgtggcaacagagcagtatggaactgtggcaaataacttgcagagctcaaatacagctcccacgactagaactgtcaatgatcagggggccttacctggcatggtgtggcaagatcgtgacgtgtaccttcaaggacctatctgggcaaagattcctcacacggatggacactttcatccttctcctctgatgggaggctttggactgaaacatccgcctcctcaaatcatgatcaaaaatactccggtaccggcaaatcctccgacgactttcagcccggccaagtttgcttcatttatcactcagtactccactggacaggtcagcgtggaaattgagtgggagctacagaaagaaaacagcaaacgttggaatccagagattcagtacacttccaactacaacaagtctgttaatgtggactttactgtagacactaatggtgtttatagtgaacctcaccctattggaacccggtatctcacacgaaacttgtaa

SEQ ID NO: 769 - DNA, 2211 bp, synthetic construct
  misc_feature 1..2211: note = Description of Artificial Sequence: Synthetic polynucleotide
  source 1..2211: mol_type = other DNA
atggctgctgatggttatcttccagattggctcgaggacaacctttctgaaggcattcgtgagtggtgggctctgaaacctggagtccctcaacccaaagcgaaccaacaacaccaggacaaccgtcggggtcttgtgcttccgggttacaaatacctcggacccggtaacggactcgacaaaggagagccggtcaacgaggcggacgcggcagccctcgaacacgacaaagcttacgaccagcagctcaaggccggtgacaacccgtacctcaagtacaaccacgccgacgccgagtttcaggagcgtcttcaagaagatacgtcttttgggggcaaccttggcagagcagtcttccaggccaaaaagaggatccttgagcctcttggtctggttgaggaagcagctaaaacggctcctggaaagaagaggcctgtagatcagtctcctcaggaaccggactcatcatctggtgttggcaaatcgggcaaacagcctgccagaaaaagactaaatttcggtcagactggcgactcagagtcagtcccagaccctcaacctctcggagaaccaccagcagcccccacaagtttgggatctaatacaatggcttcaggcggtggcgcaccaatggcagacaataacgagggtgccgatggagtgggtaattcctcaggaaattggcattgcgattcccaatggctgggcgacagagtcatcaccaccagcaccagaacctgggccctgcccacttacaacaaccatctctacaagcaaatctccagccaatcaggagcttcaaacgacaaccactactttggctacagcaccccttgggggtattttgactttaacagattccactgccacttctcaccacgtgactggcagcgactcattaacaacaactggggattccggcccaagaaactcagcttcaagctcttcaacatccaagttaaagaggtcacgcagaacgatggcacgacgactgttgccaataaccttaccagcacggttcaagtgtttacggactcggagtatcaactcccgtacgtgctcgggtcggcgcaccaaggctgtctcccgccgtttccagcggacgtcttcatggtccctcagtatggatacctcaccctgaacaacggaagtcaagcggtgggacgctcatccttttactgcctggagtacttcccttcgcagatgctaaggactggaaataacttccaattcagctataccttcgaggatgtaccttttcacagcagctacgctcacagccagagtttggatcgcttgatgaatcctcttattgatcagtatctgtactacctgaacagaacgcaaggaacaacctctggaacaaccaaccaatcacggctgctttttagccaggctgggcctcagtctatgtctttgcaggccagaaattggctacctgggccctgctaccggcaacagagactttcaaagactgctaacgacaacaacaacagtaactttccttggacagcggccagcaaatatcatctcaatggccgcgactcgctggtgaatccaggaccagctatggccagtcacaaggacgatgaagaaaaatttttccctatgcacggcaatctaatatttggcaaagaagggacaacggcaagtaacgcagaattagataatgtaatgattacggatgaagaagagattcgtaccaccaatcctgtggcaacagagcagtatggaactgtggcaaataacttgcagagctcaaatacagctcccacgactagaactgtcaatgatcagggggccttacctggcatggtgtggcaagatcgtgacgtgtaccttcaaggacctatctgggcaaagattcctcacacggatggacactttcatccttctcctctgatgggaggctttggactgaaacatccgcctcctcaaatcatgatcaaaaatactccggtaccggcaaatcctccgacgactttcagcccggccaagtttgcttcatttatcactcagtactccactggacaggtcagcgtggaaattgagtgggagctacagaaagaaaacagcaaacgttggaatccagagattcagtacacttccaactacaacaagtctgttaatgtggactttactgtagacactaatggtgtttatagtgaacctcgccctattggaacccggtatctcacacgaaacttgtaa

SEQ ID NO: 770 - DNA, 2211 bp, synthetic construct
  misc_feature 1..2211: note = Description of Artificial Sequence: Synthetic polynucleotide
  source 1..2211: mol_type = other DNA
atggctgctgacggttatcttccagattggctcgaggacaacctttctgaaggcattcgtgagtggtgggctctgaaacctggagtccctcaacccaaagcgaaccaacaacaccaggacaaccgtcggggtcttgtgcttccgggttacaaatacctcggacccggtaacggactcgacaaaggagagccggtcaacgaggcggacgcggcagccctcgaacacgacaaagcttacgaccagcagctcaaggccggtgacaacccgtacctcaagtacaaccacgccgacgccgagtttcaggagcgtcttcaagaagatacgtcttttgggggcaaccttggcagagcagtcttccaggccaaaaagaggatccttgagcctcttggtctggttgaggaagcagctaaaacggctcctggaaagaagaggcctgtagatcagtctcctcaggaaccggactcatcatctggtgttggcaaatcgggcaaacagcctgccagaaaaagactaaatttcggtcagactggcgactcagagtcagtcccagaccctcaacctctcggagaaccaccagcagcccccacaagtttgggatctaatacaatggcttcaggcggtggcgcaccaatggcagacaataacgagggtgccgatggagtgggtaattcctcaggaaattggcattgcgattcccaatggctgggcgacagagtcatcaccaccagcaccagaacctgggccctgcccacttacaacaaccatctctacaagcaaatctccggccaatcaggagcttcaaacgacaaccactactttggctacagcaccccttgggggtattttgactttaacagattccactgccacttctcaccacgtgactggcagcgactcattaacaacaactggggattccggcccaagaaactcagcttcaagctcttcaacatccaagttaaagaggtcacgcagaacgatggcacgacgactattgccaataaccttaccagcacggttcaagtgtttacggactcggagtatcagctcccgtacgtgctcgggtcggcgcaccaaggctgtctcccgccgtttccagcggacgtcttcatggtccctcagtatggatacctcaccctgaacaacggaagtcaagcggtgggacgctcatccttttactgcctggagtacttcccttcgcagatgctaaggactggaaataacttccaattcagctataccttcgaggatgtaccttttcacagcagctacgctcacagccagagtttggatcgcttgatgaatcctcttattgatcagtatctgtactacctgaacagaacgcaaggaacaacctctggaacaaccaaccaatcacggctgctttttagccaggctgggcctcagtctatgtctttgcaggccagaaattggctacctgggccctgctaccggcaacagagactttcaaagactgctaacggcaacaacaacagtaactttccttggacagcggccagcaaatatcatctcaatggccgcgactcgctggtgaatccaggaccagctatggccagtcacaaggacgatgaagaaaaatttttccctatgcacggcaatctaatatttggcaaagaagggacaacggcaagtaacgcagaattagataatgtaatgattacggatgaagaagagattcgtaccaccaatcctgtggcaacagagcagtgtggaactgtggcaaataacttgcagagctcaaatacagctcccacgactagaactgtcaatgatcagggggccttacctggcatggtgtggcaagatcgtgacgtgtaccttcaaggacctatctgggcaaagattcctcacacggatggacactttcatccttctcctctgatgggaggctttggactgaaacatccgcctcctcaaatcatgatcaaaaatactccggtaccggcaaatcctccgacgactttcagcccggccaagtttgcttcatttatcactcagtactccactggacaggtcagcgtggaaattgagtgggagctacagaaagaaaacagcaaacgttggaatccagagattcagtacacttccaactacaacaagtctgttaatgtggactttactgtagacactaatggtgtttatagtgaacctcgccctattggaacccggtatctcacacgaaacttgtaa

SEQ ID NO: 771 - DNA, 2212 bp, synthetic construct
  misc_feature 1..2212: note = Description of Artificial Sequence: Synthetic polynucleotide
  variation 1283: note = n is a, c, t, or g
  source 1..2212: mol_type = other DNA
atggctgctgacggttatcttccagattggctcgaggacaacctttctgaaggcattcgtgagtggtgggctctgaaacctggagtccctcaacccaaagcgaaccaacaacaccaggacaaccgtcggggtcttgtgcttccgggttacaaatacctcggaccgggtaacggactcgacaaaggagagccggtcaacgaggcggacgcggcagccctcgaacacgacaaagcttacgaccagcagctcaaggccggtgacaacccgtacctcaagtacaaccacgccgacgccgagtttcaggagcgtcttcaagaagatacgtcttttgggggcaaccttggcagagcagtcttccaggccaaaaagaggatccttgagcctcttggtctggttgagggagcagctaaaacggctcctggaaagaagaggcctgtagatcagtctcctcaggaaccggactcatcatctggtgttggcaaatcgggcaaacagcctgccagaaaaagactaaatttcggtcagactggcgactcagagtcagtcccagaccctcaacctctcggagaaccaccagcagcccccacaagtttgggatctaatacaatggcttcaggcggtggcgcaccaatggcagacaataacgagggtgccgatggagtgggtaattcctcaggaaattggcattgcgattcccaatggctgggcgacagagtcatcaccaccagcaccagaacctgggccctgcccacttacaacagccatctctacaagcaaatctccagccaatcaggagcttcaaacgacaaccactactttggctacagcaccccttgggggtattttgactttaacagattccactgccacttctcaccacgtgactggcagcgactcattaacaacaactggggattccggcccaagaaactcagcttcaagctcttcaacatccaagttaaagaggtcacgcagaacgatggcacgacgactattgccaataaccttaccagcacggtccaagtgtttacggactcggagtatcagctcccgtacgtgctcgggtcggcgcaccaaggctgtctcccgccgtttccagcggacgccttcatggtccctcagtatggatacctcaccctgaacaacggaagtcaagcggtgggacgctcatccttttactgcctggagtacttcccttcgcagatgctaaggactggaaataacttccaattcagctataccttcgaggatgtaccttttcacggcagctacgctcacagccngagtttggatcgcttgatgaatcctcttattgatcagtatctgtactacctgaacagaacgcaaggaacaacctctggaacaaccaaccaatcacggctgctttttagccaggctgggcctcagtctatgtctttgcaggccagaaattggctacctgggccctgctaccggcaacagagacttttcaaagactgctaacgacaacaacaacagtaactttccttggacagcggccagcaaatatcatctcaatggccgcgactcgctggtgaatccaggaccagctatggccagtcacaaggacgatgaagaaaaatttttccctatgcacggcaatctaatatttggcaaagaagggacaacggcaagtaacgcagaattagataatgtaatgattacggatgaagaagagattcgtaccaccaatcctgtggcaacagagcagtatggaactgtggcaaataacttgcagagctcaaatacagctcccacgactagaactgtcaatgatcagggggccttacctggcatggtgtggcaagatcgtgacgtgtaccttcaaggacctatctgggcaaagattcctcacacggatggacactttcatccttctcctctgatgggaggctttggactgaaacatccgcctcctcaaatcatgatcaaaaatactccggtaccggcaaatcctccgacgactttcagcccggccaagtttgcttcatttatcactcagtactccactggacaggtcagcgtggaaattgagtgggagctacagaaagaaaacagcaaacgttggaatccagagattcagtacacttccaactacaacaagtctgttaatgtggactttactgtagacactaatggtgtttatagtgaacctcgccctattggaacccggtatctcacacgaaactcgtaa

SEQ ID NO: 772 - DNA, 2212 bp, synthetic construct
  misc_feature 1..2212: note = Description of Artificial Sequence: Synthetic polynucleotide
  source 1..2212: mol_type = other DNA
atggctgctgacggttatcttccagattggctcgaggacaacctttctgaaggcattcgtgagtggtgggctctgaaacctggagtccctcaacccaaagcgaaccaacaacaccaggacaaccgtcggggtcttgtgcttccgggttacaaatacctcggacccggtaacggactcgacaaaggagagccggtcaacgaggcggacgcggcagccctcgaacacgacaaagcttacgaccagcagctcaaggccggtgacaacccgtacctcaagtacaaccacgccgacgccgagtttcaggagcgtcttcaagaagatacgtcttttgggggcaaccttggcagagcagtcttccaggccaaaaagaggatccttgagcctcttggtctggttgagggagcagctaaaacggctcctggaaagaagaggcctgtagatcagtctcctcaggaaccggactcatcatctggtgttggcaaatcgggcaaacagcttgccagaaaaagactaaatttcggtcagactggcgactcagagtcagtcccagaccctcaacctctcggagaaccaccagcagcccccacaagtttgggatctaatacaatggcttcaggcggtggcgcaccaatggcagacaataacgagggtgccgatggagtgggtaattcctcaggaaattggcattgcgattcccaatggctgggcgacagagtcatcaccaccagcaccagaacctgggccctgcccacttacaacagccatctctacaagcaaatctccggccaatcaggagcttcaaacgacaaccactactttggctacagcaccccctgggggtattttgactttaacagattccactgccacttctcaccacgtgactggcagcgactcattaacaacaactggggattccggcccaagaaactcagcttcaagctcttcaacatccaagttaaagaggtcacgcagaacgatggcacgacgactattgccaataaccttaccagcacggttcaagtgtttacggactcggagtatcagctcccgtacgtgctcgggtcggcgcaccaaggctgtctcccgccgtttccagcggacgtcttcatggtccctcagtatggatacctcaccctgaacaacggaagtcaagcggtgggacgctcatccttttactgcctggagtacttcccttcgcagatgctaaggactggaaataacttccaattcagctataccttcgaggatgtaccttttcacagcagctacgctcacagccagagtttggatcgcttgatgaatcctcttattgatcagtatctgtactacctgaacagaacgcaaggaacaacctctggaacaaccaaccaatcacggctgctttttagccaggctgggcctcagtctatgtctttgcaggccagaaattggctacctgggccctgctaccggcaacagagactttcaaagactgctaacgacaacaacaacagtaactttccttggacagcggccagcaaatatcatctcaatggccgcgactcgctggtgaatcccaggaccagctatggccagtcacaaggacgatgaagaaaaatttttccctatgcacggcaatctaatatttggcaaagaagggacaacggcaagtaacgcagaattagataatgtaatgattacggatgaagaagagattcgtaccaccaatcctgtggcaacagagcagtatggaactgtggcaaataacttgcagagctcaaatacagctcccacgactagaactgtcaatgatcagggggccttacctggcatggtgtggcaagatcgtgacgtgtaccttcaaggacctatctgggcaaagattcctcacacggatggacactttcatccttctcctctgatgggaggctttggactgaaacatccgcctcctcaaatcatgatcaaaaatactccggtaccggcaaatcctccgacgactttcagcccggccaagtttgcttcatttatcactcagtactccactggacaggtcagcgtggaaattgagtgggagctacagaaagaaaacagcaaacgttggaatccagagattcagtacacttccaactacaacaagtctgttaatgtggactttactgtagacactaatggtgtttatagtgaacctcgccctattggaacccggtatctcacacgaaacttgtaa

SEQ ID NO: 773 - DNA, 2212 bp, synthetic construct
  misc_feature 1..2212: note = Description of Artificial Sequence: Synthetic polynucleotide
  source 1..2212: mol_type = other DNA
atggctgctgacggttatcttccagattggctcgaggacaacctttctgaaggcattcgtgagtggtgggctctgaaacctggagtccctcaacccaaagcgaaccaacaacaccaggacgaccgtcggggtcttgtgcttccgggttacaaatacctcggacccggtaacggactcgacaaaggagagccggtcaacgaggcggacgcggcagccctcgaacacgacaaagcttacgaccagcagctcaaggccggtgacaacccgtgcctcaagtacaaccacgccgacgccgagtttcaggagcgtcttcaagaagatacgtcttttgggggcaaccttggcagagcagtcttccaggccaaaaagaggatccttgagcctcttggtctggttgaggaagcagctaaaacggctcctggaaagaagaggcctgtagatcagtctcctcaggaaccggactcatcatctggtgttggcaaatcgggcaaacagcctgccagaaaaagactaaatttcggtcagactggcgactcagagtcagtcccagaccctcaacctctcggagaaccaccagcagcccccacaagtttgggatctaatacaatggcttcaggcggtagcgcaccaatggcagacaataacgagggtgccgatggagtgggtaattcctcaggaaattggcattgcgattcccaatggctgggcgacagagtcatcaccaccagcaccagaacctgggccctgcccacttacaacaaccatctctacaagcaaatctccagccaatcaggagcttcaaacgacaaccactactttggctacagcaccccttgggggtattttgactttaacagattccactgccacttctcaccacgtgactggcagcgactcattaacaacaactggggattccggcccaagaaactcagcttcaagctcttcaacatccaagttaaagaggtcacgcagaacgatggcacgacgactattgccaataaccttaccagcacggttcaagtgtttacggactcggagtatcagctcccgtacgtgctcgggtcggcgcaccaaggctgtctcccgccgtttccagcggacgtcttcatggtccctcagtatggatacctcaccctgaacaacggaagtcaagcggtgggacgctcatccttttactgcctggagtacttcccttcgcagatgctaaggactggaaataacttccaattcagctataccttcgaggatgtaccttttcacagcagctacgctcacagccagagtttggatcgcttgatggatcctcttattgatcagtatctgtactacctgaacagaacgcaaggaacaacctctggaacaaccaaccaatcacggctgctttttagccaggctgggcctcagtctatgtctttgcaggccagaaattggctacctgggccctgctaccggcaacagagactttcaaagactgctaacgacaacaacaacagtaactttccttggacagcggccagcaaatatcatctcaatggccgcgactcgctggtgaatccaggaccagctatggccagtcacaaaggacgatgaagaaaaatttttccctatgcacggcaatctaatatttggcaaagaagggacaacggcaagtaacgcagaattagataatgtaatgattacggatgaagaagagattcgtaccaccaatcctgtggcaacagagcagtatggaactgtggcaaataacttgcagagctcaaatacagctcccacgactagaactgtcaatgatcagggggccttacctggcatggtgtggcaagatcgtgacgtgtaccttcaaggacctatctgggcaaagattcctcacacggatggacactttcatccttctcctctgatgggaggctttggactgaaacatccgcctcctcaaatcatgatcaaaaatactccggtaccggcaaatcctccgacgactttcagcccggccaagtttgcttcatttatcactcagtactccactggacaggtcagcgtggaaattgagtgggagctacagaaagaaaacagcaaacgttggaatccagagattcagtacacttccaactacaacaagtctgttaatgtggactttactgtagacactaatggtgtttatagtgaacctcgccctattggaacccggtatctcacacgaaacctgtaa

SEQ ID NO: 774 - DNA, 2211 bp, synthetic construct
  misc_feature 1..2211: note = Description of Artificial Sequence: Synthetic polynucleotide
  source 1..2211: mol_type = other DNA
atggctgctgacggttatcttccagattggctcgaggacaacctttctgaaggcattcgtgagtggtgggctctgaaacctggagtccctcaacccaaagcgaaccaacaacaccaggacgaccgtcggggtcttgtgcttccgggttacaaatacctcggacccggtaacggactcgacaaaggagagccggtcaacgaggcggacgcggcagccctcgaacacgacaaagcttacgaccagcagctcaaggccggtgacaacccgtacctcaagtacaaccacgccgacgccgagtttcaggagcgtcttcaagaagatacgtcttttgggggcaaccttggcagagcagtcttccaggccaaaaagaggatccttgagcctcttggtctggttgaggaagcagctaaaacggctcctggaaagaagaggcctgtagatcagtctcctcaggaaccggactcatcatctggtgttggcaaatcgggcaaacagcctgccagaaaaagactaaatttcggtcagactggcgactcagagtcagtcccagaccctcaacctctcggagaaccaccagcagcccccacaagtttgggatctaatacaatggcttcaggcggtggcgcaccaatggcagacaataacgagggtgccgatggagtgggtaattcctcaggaaattggcattgcgattcccaatggctgggcaacagagtcatcaccaccagcaccagaacctgggccctgcccacttacaacaaccatctctacaagcaaatctccagccaatcaggagcttcaaacgacaaccactactttggctacagcaccccttgggggtattttgactttaacagattccactgccacttctcaccacgtgactggcagcgactcattaacaacaactggggattccggcccaagaaactcagcttcaagctcttcaacatccaagttaaagaggtcacgcagaacgatggcacgacgactattgccaataaccttaccagcacggttcaagtgtttacggactcggagtatcagctcccgtacgtgctcgggtcggcgcaccaaggctgtctcccgccgtttccagcggacgtcttcatggtccctcagtatggatacctcaccctgaacaacggaagtcaagcggtgggacgctcatccttttactgcctggagtacttcccttcgcagatgctaaggactggaaataacttccaattcagctataccttcgaggatgtaccttttcacagcagctacgctcacagccagagtttggatcgcttgatgaatcctcttattgatcagtatctgtactacctgaacagaacgcaaggaacaacctctggaacaaccaaccaatcacggctgctttttagccaggctgggcctcagtctatgtctttgcaggccagaaattggctacctgggccctgctaccggcaacagagactttcaaagactgctaacgacaacaacaacagtaactttccttggacagcggccagcaaatatcatctcaatggccgcgactcgctggtgaatccaggaccagctatggccagtcacaaggacgatgaagaaaaatttttccctatgcacggcaatctaatatttggcaaagaagggacaacggcaagtaacgcagaattagataatgtaatgattacggatgaagaagagattcgtaccaccaatcctgtggcaacagagcagtatggaactgtggcaaataacttgcagagctcaaatacagctcccacgactagaactgtcaatgatcagggggccttacctggcatggtgtggcaagatcgtgacgtgtaccttcaaggacctatctgggcaaagattcctcacacggatggacactttcatccttctcctctgatgggaggctttggactgaaacatccgcctcctcaaatcatgatcaaaaatactccggtaccggcaaatcctccgacgactttcagcccggccaagtttgcttcatttatcactcagtactccactggacaggtcagcgtggaaattgagtgggagctacagaaagaaaacagcaaacgttggaatccagagattcagtacacttccaactacaacaagtctgttaatgtggactttactgtagacactaatggtgtttatagtgaacctcgccctattggaacccggtatctcacacgaaacttgtaa

SEQ ID NO: 775 - DNA, 2211 bp, synthetic construct
  misc_feature 1..2211: note = Description of Artificial Sequence: Synthetic polynucleotide
  source 1..2211: mol_type = other DNA
atggctgctgacggttatcttccagattggctcgaggacaacctttctgaaggcattcgtgagtggtgggctctgaaacctggagtccctcaacccaaagcgaaccaacaacaccaggacgaccgtcggggtcttgtgcttccgggttacaaatacctcggacccggtaacggactcgacaaaggagagccggtcaacgaggcggacgcggcagccctcgaacacgacaaagcttacgaccagcagctcaaggccggtgacaacccgtacctcaagtacaaccacgccgacgccgagtttcaggagcgtcttcaagaagatacgtcttttgggggcaaccttggcagagcagtcttccaggccaaaaagaggatccttgagcctcttggtctggttgaggaagcagctaaaacggctcctggaaagaagaggcctgtagatcagtctcctcaggaaccggactcatcatctggtgttggcaaatcgggcaaacagcctgccagaaaaagactaaatttcggtcagactggcgactcagagtcagtcccagaccctcaacctctcggagaaccaccagcagcccccacaagtttgggatctaatacaatggcttcaggcggtggcgcaccaatggcggacaataacgagggtgccgatggagtgggtaattcctcaggaaattggcattgcgattcccaatggctgggcgacagagtcatcaccaccagcaccagaacctgggccctgcccacttacaacaaccatctctacaagcaaatctccagccaatcaggagcttcaaacgacaaccactactttggctacagcaccccttgggggtattttgactttaacagattccactgccacttctcaccacgtgactggcagcgactcattaacaacaactggggattccggcccaagaaactcagcttcaagctcttcaacatccaagttaaagaggtcacgcagaacgatggcacgacgactattgccaataaccttaccagcacggttcaagtgtttacggactcggagtatcagctcccgtacgtgctcgggtcggcgcaccaaggctgtctcccgccgtttccagcggacgtcttcatggtccctcagtatggatacctcaccctgaacaacggaagtcaagcggtgggacgctcatccttttactgcctggagtacttcccttcgcagatgctaaggactggaaataacttccaattcagctataccttcgaggatgtaccttttcacagcagctacgctcacagccagagtttggatcgcttgatgaatcctcttattgatcagtatctgtactacctgaacagaacgcaaggaacaacctctggaacaaccaaccaatcacggctgctttttagccaggctgggcctcagtctatgtctttgcaggccagaaattggctacctgggccctgctaccggcaacagagactttcaaagactgctaacgacaacaacaacagtaactttccttggacagcggccagcaaatatcatctcaatggccgcgactcgctggtgaatccaggaccagctatggccagtcacaaggacgatgaagaaaaatttttccctatgcacggcaatctaatatttggcaaagaagggacaacggcaagtaacgcagaattagataatgtaatgattacggatgaagaagagattcgtaccaccaatcctgtggcaacagtgcagtatggaactgtggcaaataacttgcagagctcaaatacagctcccacgactagaactgtcaatgatcagggggccttacctggcatggtgtggcaagatcgtgacgtgtaccttcaaggacctatctgggcaaagattcctcacacggatggacactttcatccttctcctctgatgggaggctttggactgaaacatccgcctcctcaaatcatgatcaaaaatactccggtaccggcaaatcctccgacgactttcagcccggccaagtttgcttcatttatcactcagtactccactggacaggtcagcgtggaaattgagtgggagctacagaaagaaaacagcaaacgttggaatccagagattcagtacacttccaactacaacaagtctgttaatgtggactttactgtagacactaatggtgtttatagtgaacctcgccctattggaacccggtatctcacacgaaacttgtaa

SEQ ID NO: 776 - DNA, 2211 bp, synthetic construct
  misc_feature 1..2211: note = Description of Artificial Sequence: Synthetic polynucleotide
  source 1..2211: mol_type = other DNA
atggctgctgacggttatcttccagattggctcgaggacaacctttctgaaggcattcgtgagtggtgggctctgaaacctggagtccctcaacccaaagcgaaccaacaacaccaggacaaccgtcggggtcttgtgcttccgggttacaaatacctcggacccggtaacggactcgacaaaggagagccggtcaacgaggcggacgcggcagccctcgaacacgacaaagcttacgaccagcagctcaaggccggtgacaacccgtacctcaagtacaaccacgccgacgccgagtttcaggagcgtcttcaagaagatacgtcttttgggggcaaccttggcagagcagtcttccaggccaaaaaggggatccttgagcctcttggtctggttgaggaagcagctaaaacggctcctggaaagaagaggcctgtagatcagtctcctcaggaaccggactcatcatctggtgttggcaaatcgggcaaacagcctgccagaaaaagactaaatttcggtcagactggcgactcagagtcagtcccagaccctcaacctctcggagaaccaccagcagcccccacaagtttgggatctaatacaatggcttcaggcggtggcgcaccaatggcagacaataacgagggtgccgatggagtgggtaattcctcaggaaattggcattgcgattcccaatggctgggcgacagagtcatcaccaccagcaccagaacctgggccctgcccacttacaacaaccatctctacaagcaaatctccagccaatcaggagcttcaaacgacaaccactactttggctacagcaccccttgggggtattttgactttaacagattccactgccacttctcaccacgtgactggcagcgactcattaacaacaactggggattccggcccaagaaactcagcttcaagctcttcaacatccaagttaaagaggtcacgcagaacgatggcacgacgactattgccaataaccttaccagcacggttcaagtgtttacggactcggagtatcagctcccgtacgtgttcgggtcggcgcaccaaggctgtctcccgccgtttccagcggacgtcttcatggtccctcagtatggatacctcaccctgaacaacggaagtcaagcggtgggacgctcatccttttactgcctggagtacttcccttcgcagatgctaaggactggaaataacttccaattcagctataccttcgaggatgtaccttttcacagcagctacgctcacagccagagttcggatcgcttgatgaatcctcttattgatcagtatctgtactacctgaacagaacgcaaggaacaacctctggaacaaccaaccaatcacggctgctttttagccaggctgggcctcagtctatgtctttgcaggccagaaattggctacctgggccctgctaccggcaacagagactttcaaagactgctaacgacaacaacaacagtaactttccttgaacagcggccagcaaatatcatctcaatggccgcgactcgctggtgaatccaggaccagctatggccagtcacaaggacgatgaagaaaaatttttccctatgcacggcaatctaatatttggcaaagaagggacaacggcaagtaacgcagaattagataatgtaatgattacggatgaagaagagattcgtaccaccaatcctgtggcaacagagcagtatggaactgtggcaaataacttgcagagctcaaatacagctcccacgactagaactgtcaatgatcagggggccttacctggcatggtgtggcaagatcgtgacgtgtaccttcaaggacctatctgggcaaagattcctcacacggatggacactttcatccttctcctctgatgggaggctttggactgaaacatccgcctcctcaaatcatgatcaaaaatactccggtaccggcaaatcctccgacgactttcagcccggccaagtttgcttcatttatcactcagtactccactggacaggtcagcgtggaaattgagtgggagctacagaaagaaaacagcaaacgttggaatccagagattcagtacacttccaactacaacaagtctgttaatgtggactttactgtagacactaatggtgtttatagtgaacctcgccctattggaacccggtatctcacacgaaacttgtaa

SEQ ID NO: 777 - DNA, 2211 bp, synthetic construct
  misc_feature 1..2211: note = Description of Artificial Sequence: Synthetic polynucleotide
  source 1..2211: mol_type = other DNA
atggctgctgacggttatcttccagattggctcgaggacaacctttctgaaggcattcgtgagtggtgggctctgaaacctggagtccctcaacccaaagcgaaccaacaacaccaggacaaccgtcggggtcttgtgcttccgggttacaaatacctcggacccggtaacggactcgacgaaggagagccggtcaacgaggcggacgcggcagccctcgaacacgacaaagcttacgaccagcagctcaaggccggtgacaacccgtacctcaagtacaaccacgccgacgccgagtttcaggagcgtcttcaagaagatacgtcttttgggggcaaccttggcagagcagtcttccaggccaaaaagaggatccttgagcctcttggtctggttgagggagcagctaaaacggctcctggaaagaagaggcctgtagatcagtctcctcaggaaccggactcatcatctggtgttggcaaatcgggcaaacagcctgccagaaaaagactaaatttcggtcagactggcgactcagagtcagtcccagaccctcaacctctcggagaaccaccagcagcccccacaagtttgggatctaatacaatggcttcaggcggtggcgcaccaatggcagacaataacgagggtgccgatggagtgggtaattcctcaggaaattggcattgcgattcccaatggctgggcgacagagtcatcaccaccagcaccagaacctgggccctgcccacttacaacagccacctctacaagcaaatctccagccaatcaggagcttcaaacgacaaccactactttggctacagcaccccttgggggtattttgactttaacagattccactgccacttctcaccacgtgactggcagcgactcattaacaacaactggggattccggcccaagaaactcagcttcaagctcttcaacatccaagttaaagaggtcacgcagaacgatggcacgacgactattgccaataaccttaccagcacggttcaagtgtttacggactcggagtatcagctcccgtacgtgctcgggtcggcgcaccaaggctgtctcccgccgtttccagcggacgtcttcatggtccctcagtatggatacctcaccctgaacaacggaagtcaagcggtgggacgctcatccttttactgcctggagtacttcccttcgcagatgctaaggactggaaataacttccaattcagctataccttcgaggatgtaccttttcacagcagctacgctcacagccagagtttggatcgcttgatgaatcctcttattgatcagtatctgtactacctgaacagaacgcaaggaacaacctctggaacaaccaaccaatcacggctgctttttagccaggctgggcctcagtctatgtctttgcaggccagaaattggctacctgggccctgctaccggcaacagagactttcaaagactgctaacgacaacaacaacagtaactttccttggacagcggccagcaaatatcatctcaatggccgcgactcgctggtgaatccaggaccagctatggccagtcacaaggacgatgaagaaaaatttttccctatgcacggcaatctaatatttggcaaagaagggacaacggcaagtaacgcagaattagataatgtaatgattacggatgaagaagagattcgtaccaccaatcctgtggcaacagagcagtatggaactgtggcaaataacttgcagagctcaaatacagctcccacgactagaactgtcaatgatcagggggccttacctggcatggtgtggcaagatcgtgacgtgtaccttcaaggacctatctgggcaaagattcctcacacggatggacactttcatccttctcctctgatgggaggctttggactgaaacatccgcctcctcaaatcatgatcaaaaatactccggtaccggcaaatcctccgacgactttcagcccggccaagtttgcttcatttatcactcagtactccactggacaggtcagcgtggaaattgagtgggagctacagaaagaaaacagcaaacgttggaatccagagattcagtacacttccaactacaacaagtctgttaatgtggactttactgtagacactaatggtgtttatagtgaacctcgccctattggaacccggtatctcacacgaaacttgtaa

SEQ ID NO: 778 - DNA, 2211 bp, synthetic construct
  misc_feature 1..2211: note = Description of Artificial Sequence: Synthetic polynucleotide
  source 1..2211: mol_type = other DNA
atggctgctgacggttatcttccagattggctcgaggacaacctttctgaaggcattcgtgagtggtgggctctgaaacctggagtccctcaacccaaagcgaaccaacaacaccaggacaaccgtcggggtcttgtgcttccgggttacaaatacctcggacccggtaacggactcgacaaaggagagccggtcaacgaggcggacgcggcagccctcgaacacgacaaagcttacgaccagcagctcaaggccggtgacaacccgtacctcaagtacaaccacgccgacgccgagtttcaggagcgtcttcaagaagatacgtcttttgggggcaaccttggcagagcagtcttccaggccaaaaagaggatccttgagcctcttggtctggttgagggagcagctaaaacggctcctggaaagaagaggcctgtagatcagtctcctcaggaaccggactcatcatctggtgttggcaaatcgggcaaacagcctgccagaaaaagactaaatttcggtcagactggcgactcagagtcagtcccagaccctcaacctctcggagaaccaccagcagcccccacaagtttgggatctaatacaatggcttcaggcggtggcgcaccaatggcagacaataacgagggtgccgatggagtgggtaattcctcaggaaattggcattgcgattcccaatggctgggcgacagagtcatcaccaccagcaccagaacctgggccctgcccacttacaacagccatctctacaagcaaatctccagccaatcaggagcttcaaacgacaaccactactttggctacagcaccccttggggtattttgactttaacagattccactgccacttctcaccacgtgactggcagcgactcattaacaacaactggggattccggcccaagaaactcagcttcaagctcttcaacatccaagttaaagaggtcacgcagaacgatggcacgacgactattgccaataaccttaccagcacggttcaagtgtttacggactcggagtatcagctcccgtacgtgctcgggtcggcgcaccaaggctgtctcccgccgtttccagcggacgccttcatggtccctcagtatggatacctcaccctgaacaacggaagtcaagcggtgggacgctcatccttttactgcctggagtacttcccttcgcagatgctaaggactggaaataacttccaattcagctataccctcgaggatgtaccttttcacagcagctacgctcacagccagagtttggatcgcttgatgaatcctcttattgatcagtatctgtactacctgaacagaacgcaaggaacaacctctggaacaaccaaccaatcacggctgctttttagccaggctgggcctcagtctatgtctttgcaggccagaaattggctacctgggccctgctaccggcaacagagactttcaaagactgctaacgacaacaacaacagtaactttccttggacagcggccagcaaatatcatctcaatggccgcgactcgctggtgaatccaggaccagctatggccagtcacaaaggacgatgaagaaaaatttttccctatgcacggcaatctaatatttggcaaagaagggacaacggcaagtaacgcagaattagatagtgtaatgattacggatgaagaagagattcgtaccaccaatcctgtggcaacagagcagtatggaactgtggcaaataacttgcagagctcaaatacagctcccacgactagaactgtcaatgatcagggggccttacctggcatggtgtggcaagatcgtgacgtgtaccttcaaggacctatctgggcaaagattcctcacacggatggacactttcatccttctcctctgatgggaggctttggactgaaacatccgcctcctcaaatcatgatcaaaaatactccggtaccggcaaatcctccgacgactttcagcccggccaagtttgcttcatttatcactcagtactccactggacaggtcagcgtggaaattgagtgggagctacagaaagaaaacagcaaacgttggaatccagagattcagtacacttccaactacaacaagtctgttaatgtggactttactgtagacactaatggtgtttatagtgaacctcgccctattggaacccggtatctcacacgaaacttgtaa

SEQ ID NO: 779 - DNA, 2205 bp, synthetic construct
  misc_feature 1..2205: note = Description of Artificial Sequence: Synthetic polynucleotide
  source 1..2205: mol_type = other DNA
atgactgacggttaccttccagattggctagaggacaacctctctgagggcgttcgagagtggtgggcgctgcaacctggagcccctaaacccaaggcaaatcaacaacatcaggacaacgctcggggtcttgtgcttccgggttacaaatacctcggacccggcaacggactcgacaagggggaacccgtcaacgcagcggacgcggcagccctcgagcacgacaaggcctacgaccagcagctcaaggccggtgacaacccctacctcaagtacaaccacgccgacgcggagttccagcagcggcttcagggcgacacatcgtttgggggcaacctcggcagagcagtcttccaggccaaaaagagggttcttgaacctcttggtctggttgagcaagcgggtgagacggctcctggaaagaagagaccgttgattgaatccccccagcagcccgactcctccacgggtatcggcaaaaaaggcaagcagccggctaaaaagaagctcgttttcgaagacgaaactggagcaggcgacggaccccctgagggatcaacttccggagccatgtctgatgacagtgagatgcgtgcagcaactggcggagctgcagtcgagggcggacaaggtgccgatggagtgggtaatgcctcgggtgattggcattgcgattccacctggtctgagggccacgtcacgaccaccagcaccagaacctgggtcttgcccacctacaacaaccacctctacaagcgactcggagagagcctgcagtccaacacctacaacggattctccaccccctggggatactttgacttcaaccgcttccactgccacttctcaccacgtgactggcagcgactcatcaacaacaactggggcatgcgacccaaagccatgcgggtcaaaatcttcaacatccaggtcaaggaggtcacgacgtcgaacggcgagacaacggtggctaataaccttaccagcacggttcagatctttgcggactcgtcgtacgaactgccgtacgtgatggatgcgggtcaagagggcagcctgcctccttttcccaacgacgtctttatggtgccccagtacggctactgtggactggtgaccggcaacacttcgcagcaacagactgacagaaatgccttctactgcctggagtactttccttcgcagatgctgcggactggcaacaactttgaaattacgtacagttttgagaaggtgcctttccactcgatgtacgcgcacagccagagcctggaccggctgatgaaccctctcatcgaccagtacctgtggggactgcaatcgaccaccaccggaaccaccctgaatgccgggactgccaccaccaactttaccaagctgcggcctaccaacctttccaactttaaaaagaactggctgcccgggccttcaatcaagcagcagggcttctcaaagactgccaatcaaaactacaagatccctgccaccgggtcagacagtctcatcaaatacgagacgcacagcactctggacggaagatggagtgccctgacccccggacctccaatggccacggctggacctgcggacagcaagttcagcaacagccagctcatctttgcggggcctaaacagaacggcaacacggccaccgtacccgggactctgatcttcacctctgaggaggagctggcagccaccaacgctaccgatacggacatgtggggcaacctacctggcggtgaccagagcaacagcaacctgccgaccgtggacagactgacagccttgggagccgtgcctggaatggtctggcaaaacagagacatttactaccagggtcccatttgggccaagattcctcataccgatggacactttcacccctcaccgctgattggtgggtttgggctgaaacacccgcctcctcaaatttttatcaagaacaccccggtacctgcgaatcctgcgacgaccttcagctctactccggtaaactccttcattactcagtacagcactggccaggtgtcggtgcagattgactgggagatccagaaggagcggtccaaacgctggaaccccgaggtccagtttacctccaactacggacagcaaaactctctgttgtgggctcccgatgcggctgggaaatacactgagcctagggctatcggtacccgctacctcacccaccacctgtaa

SEQ ID NO: 780 - DNA, 2205 bp, synthetic construct
  misc_feature 1..2205: note = Description of Artificial Sequence: Synthetic polynucleotide
  source 1..2205: mol_type = other DNA
atgactgacggttaccttccagattggctagaggacaacctctctgaaggcgttcgagagtggtgggcgctgcaacctggagcccctaaacccaaggcaaatcaacaacatcaggacaacgctcggggtcttgtgcttccgggttacaaatacctcggacccggcaacggactcgacaagggggaacccgtcaacgcagcggacgcggcagccctcgagcacgacaaggcctacgaccagcagctcaaggccggtgacaacccctacctcaagtacaaccacgccgacgcggagttccagcagcggcttcagggcgacacatcgtttgggggcaacctcggcagagcagtcttccaggccaaaaagagggttcttgaacctcttggtctggttgagcaagcgggtgagacggctcctggaaagaagagaccgttgattgaatccccccagcagcccgactcctccacgggtatcggcaaaaaaggcaagcagccggctaaaaagaagctcgttttcgaagacgaaactggagcaggcgacggaccccctgagggatcaacttccggagccatgtctgatgacagtgagatgcgtgcagcagctggcggagctgcagtcgagggcggacaaggtgccgatggagtgggtaatgcctcgggtgattggcattgcgattccacctggtctgagggccacgtcacgaccaccagcaccagaacctgggtcttgcccacctacaacaaccacctctacaagcgactcggagagagcctgcagtccaacacctacaacggattctccaccccctggggatactttgacttcaaccgcttccactgccacttcttaccacgtgactggcagcgactcatcaacaacaactggggcgtgcgacccaaagccatgcgggtcaaaatcttcaacatccaggtcaaggaggtcacgacgtcgaacggcgagacaacggtggctaataaccttaccagcacggttcagatctttgcggactcgtcgtacgaactgccgtacgtgatggatgcgggtcaagagggcagcctgcctccttttcccaacgacgtctttatggtgccccagtacggctactgtggactggtgaccggcgacacttcgcagcaacagactgacagaaatgccttctactgcctggagtactttccttcgcagatgctgcggactggcaacaactttgaaattacgtacagttttgagaaggtgcctttccactcgatgtacgcgcacagccagagcctggaccggctgatgaaccctctcatcgaccagtacctgtggggactgcaatcgaccaccaccggaaccaccctgaatgccgggactgccaccaccaactttaccaagctgcggcctaccaacttttccaactttaaaaagaactggctgcccgggccttcaatcaagcagcagggcttctcaaagactgccaatcaaaactacaagatccctgccaccgggtcagacagtctcatcaaatacgagacgcacagcactctggacggaagatggagtgccctgacccccggacctccaatggccacggctggacctgcggacagcaagttcagcaacagccagctcatctttgcggggcctaaacagaacggcaacacggccaccgtacccgggactctgatcttcacctctgaggaggagctggcagccaccaacgccaccgatacggacatgtggggcaacctacctggcggtgaccagagcaacagcaacctgccgaccgtggacagactgacagccttgggagccgtgcctggaatggtctggcaaaacagagacatttactaccagggtcccatttgggccaagattcctcataccgatggacactttcacccctcaccgctgattggtgggtttgggctgaaacacccgcctcctcaaatttttatcaagaacaccccggtacctgcgaatcctgcgacgaccttcagctctactccggtaaactccttcattactcagtacagcactggccaggtgtcggtgcagattgactgggagatccagaaggagcggtccaaacgctggaaccccgaggtccagtttacctccaactacggacagcaaaactctctgttgtgggctcccgatgcggctgggaaatacactgagcctagggctatcggtacccgctacctcacccaccacctgtaa

SEQ ID NO: 781 - DNA, 2205 bp, synthetic construct
  misc_feature 1..2205: note = Description of Artificial Sequence: Synthetic polynucleotide
  source 1..2205: mol_type = other DNA
atgactgacggttaccttccagattggctagaggacaacctctctgaaggcgttcgagagtggtgggcgctgcaacctggagcccctaaacccaaggcaaatcaacaacatcaggacaacgctcggggtcttgtgcttccgggttacaaatacctcggacccggcaacggactcgacgagggggaacccgtcaacgcagcggacgcggcagccctcgagcacgacaaggcctacgaccagcagctcaaggccggtgacaacccctacctcaagtacaaccacgccgacgcggagttccagcagcggcttcagggcgacacatcgtttgggggcaacctcggcagagcagtcttccaggccaaaaagagggttcttgaacctcttggtctggttgagcaagcgggtgagacggctcctggaaagaagagaccgttgattgaatccccccagcagcccgactcctccacgggtatcggcaaaaaaggcaagcagccggctaaaaagaagctcgttttcgaagacgaaactggagcaggcgacggaccccctgagggatcaacttccggagccatgtctgatgacagtgagatgcgtgcagcagctggcggagctgcagtcgagggcggacaaggtgccgatggagtgggtaatgcctcgggtgattggcattgcgattccacctggtctgagggccacgtcacgaccaccagcaccagaacctgggtcttgcccacctacaacaaccacctctacaagcgactcggagagagcctgcagtccaacacctacaacggattctccaccccctggggatactttgacttcaaccgcttccactgccacttctcaccacgtgactggcagcgactcatcaacaacaactggggcatgcgacccaaagccatgcgggtcaaaatcttcaacatccaggtcaaggaggtcacgacgtcgaacggcgagacaacggtggctaataaccttaccagcacggttcagatctttgcggactcgtcgtacgaactgccgtacgtgatggatgcgggtcaagagggcagcctgcctccttttcccaacgacgtctttatggtgccccagtacggctactgtggactggtgaccggcaacacttcgcagcaacagactgacagaaatgccttctactgcctggagtactttccttcgcagatgctgcggactggcaacaactttgaaattacgtacagttttgagaaggtgcctttccactcgatgtacgcgcacagccagagcctggaccggctgatgaaccctctcatcgaccagtacctgtggggactgcaatcgaccaccaccggaaccaccctgaatgccgggactgccaccaccaactttaccaagctgcggcctaccaacttttccaactttaaaaagaactggctgcccgggccttcaatcaagcagcagggcttctcaaagactgccaatcaaaactacaagatccctgccaccgggtcagacagtctcatcaaatacgagacgcacagcactctggacggaagatggagtgccctgacccccggacctccaatggccacggctggacctgcggacagcaagttcagcaacagccagctcatctttgcggggcctaaacagaacggcaacacggccaccgtacccgggactctgatcttcacctctgaggaggagctggcagccaccaacgctaccgatacggacatgtggggcaacctacctggcggtgaccagagcaacagcaacctgccgaccgtggacagactgacagccttgggagccgtgcctggaatggtctggcaaaacagagacatttactaccagggtcccatttgggccaagattcctcataccgatggacactttcacccctcaccgctgattggtgggtttgggctgaaacacccgcctcctcaaatttttatcaagaacaccccggtacctgcgaatcctgcgacgaccttcagctctactccggtaaactccttcattactcagtacagcactggccaggtgtcggtgcagattgactgggagatccagaaggagcggtccaaacgctggaaccccgaggtccagtttacctccaactacggacagcaaaactctctgttgtgggctcccgatgcggctgggaaatacactgagcctagggctatcggtacccgctacctcacccaccacctgtaa

SEQ ID NO: 782 - DNA, 2205 bp, synthetic construct
  misc_feature 1..2205: note = Description of Artificial Sequence: Synthetic polynucleotide
  source 1..2205: mol_type = other DNA
atgactgacggttaccttccagattggctagaggacaacctctctgaaggcgttcgagagtggtgggcgctgcaacctggagcccctaaacccaaggcaaatcaacaacatcaggacaacgctcggggtcttgtgcttccgggttacaaatacctcggacccggcaacggactcgacaagggggaacccgtcaacgcagcggacgcggcagccctcgagcacgacaaggcctacgaccagcagctcaaggccggtgacaacccctacctcaagtacaaccacgccgacgcggagttccagcagcggcttcagggcgacacatcgtttgggggcaacctcggcagagcagtcttccaggccaaaaagagggttcttgaacctcttggtctggttgagcaagcgggtgagacggctcctggaaagaagagaccgttgattgaatccccccagcagcccgactcctccacgggtatcggcaaaaaaggcaagcagccggctaaaaagaagctcgttttcgaagacggaactggagcaggcgacggaccccctgagggatcaacttccggagccatgtctgatgacagtgagatgcgtgcagcagctggcggagctgcagtcgagggcggacaaggtgccgatggagtgggtaatgcctcgggtgattggcattgcgattccacctggtctgagggccacgtcacgaccaccagcaccagaacctgggtcttgcccacctacaacaaccacctctacaagcgactcggagagagcctgcagtccaacacctacaacggattccccaccccctggggatactttgacttcaaccgcttccactgccacttctcaccacgtgactggcagcgactcatcaacaacaactggggcatgcgacccaaagccatgcgggtcaaaatcttcaacatccaggtcaaggaggtcacgacgtcgaacggcgagacaacggcggctaataaccttaccagcacggttcagatctttgcggactcgtcgtacgaactgccgtacgtgatggatgcgggtcaagagggcagcctgcctccttttcccaacgacgtctttatggtgccccagtacggctactgtggactggtgaccggcaacacttcgcagcaacagactgacagaaatgccttctactgcctggagtactttccttcgcagatgctgcggactggcaacaactttgaaattacgtacagttttgagaaggtgcctttccactcgatgtacgcgcacagccagagcctggaccggctgatgaaccctctcatcgaccagtacctgtggggactgcaatcgaccaccaccggaaccaccctgaatgccgggactgccaccaccaactttaccaagctgcggcctaccaacttttccaactttaaaaagaactggctgcccgggccttcaatcaagcagcagggcttctcaaagactgccaatcaaaactacaagatccctgccaccgggtcagacagtctcatcaaatacgagacgcacagcactctggacggaagatggagtgccctgacccccggacctccaatggccacggctggacctgcggacagcaagttcagcaacagccagctcatctttgcggggcctaaacagaacggcaacacggccaccgtacccgggactctgatcttcacctctgaggaggagctggcagccaccaacgccaccgatacggacatgtggggcaacctacctggcggtgaccagagcaacagcaacctgccgaccgtggacagactgacagccttgggagccgtgcctggaatggtctggcaaaacagagacatttactaccagggtcccatttgggccaagattcctcataccgatggacactttcacccctcaccgctgattggtgggtttgggctgaaacacccgcctcctcaaatttttatcaagaacaccccggtacctgcgaatcctgcgacgaccttcagctctactccggtaaactccttcattactcagtacagcactggccaggtgtcggtgcagattgactgggagatccagaaggagcggtccaaacgctggaaccccgaggtccagtttacctccaactacggacagcaaaactctctgttgtgggctcccgatgcggctgggaaatacactgagcctagggctatcggtacccgctacctcacccaccacctgtaa

SEQ ID NO: 783 - DNA, 2205 bp, synthetic construct
  misc_feature 1..2205: note = Description of Artificial Sequence: Synthetic polynucleotide
  source 1..2205: mol_type = other DNA
atgactgacggttaccttccagattggctagaggacaacctctctgaaggcgttcgagagtggtgggcgctgcaacctggagcccctaaacccaaggcaaatcaacaacatcaggacaacgctcggggtcttgtgcttccgggttacaaatacctcggacccggcaacggactcgacaagggggaacccgtcaacgcagcggacgcggcagccctcgagcacgacaaggcctacgaccagcagctcaaggccggtgacaacccctacctcaagtacaaccacgccgacgcggagttccagcagcggcttcagggcgacacatcgtttgggggcaacctcggcagagcagtcttccaggccaaaaagagggttcttgaacctcttggtctggttgagcaagcgggtgagacggctcctggaaagaagagaccgttgattgaatccccccagcagcccgactcctccacgggtatcggcaaaaaaggcaagcagccggctaaaaagaagctcgttttcgaagacgaaactggagcaggcgacggaccccctgagggatcaacttccggagccatgtctgatgacagtgagatgcgtgcagcagctggcggagctgcagtcgagggcggacaaggtgccgatggagtgggtaatgcctcgggtgattggcattgcgattccacctggtctgagggccacgtcacgaccaccagcaccagaacctgggtcttgcccacctacaacaaccacctctacaagcgactcggagagagcctgcagtccaacacctacaacggattctccaccccctggggatactttgacttcaaccgcttccactgccacttctcaccacgtgactggcagcgactcatcaacaacaactggggcatgcgacccaaagccatgcgggtcaaaatcttcaacatccaggtcaaggaggtcacgacgtcgaacggcgagacaacggtggctaataaccttaccagcacggttcagatctttgcggactcgtcgtacgaactgccgtacgtgatggatgcgggtcaagagggcagcctgcctccttttcccaacgacgtctttatggtgccccagtacggctaccgtggactggtgaccggcaacacttcgcagcaacagactgacagaaatgccttctactgcctggagtactttccttcgcagatgctgcggactggcaacaactttgaaattacgtacagttttgagaaggtgcctttccactcgatgtacgcgcacagccagagcctggaccggctgatgaaccctctcatcgaccagtacctgtggggactgcaatcgaccaccaccggaaccaccctgaatgccgggactgccaccaccaactttaccaagctgcggcctaccaacttttccaactttaaaaagaactggctgcccgggccttcaatcaagcagcagggcttctcaaagactgccaatcaaaactacaagatccctgccaccgggtcagacagtctcatcaaatacgagacgcacagcactctggacggaagatggagtgccctgacccccggacctccaatggccacggctggacctgcggacagcaagttcagcaacagccagctcatctttgcggggcctaaacagaacggcaacacggccaccgtacccgggactctgatcttcacctctgaggaggagctggcagccaccaacgccaccgatacggacatgtggggcaacctacctggcggtgaccagagcaacagcaacctgccgaccgtggacagactgacagccttgggagccgtgcctggaatggtctggcaaaacagagacatttactaccagggtcccatttgggccaagattcctcataccgatggacactttcacccctcaccgctgattggtgggtttgggctgaaacacccgcctcctcaaatttttatcaagaacaccccggtacctgcgaatcctgcgacgaccttcagctctactccggtaaactccttcattactcagtacagcactggccaggtgtcggtgcagattgactgggagatccagaaggagcggtccaaacgctggaaccccgaggtccagtttacctccaactacggacagcaaaactctctgttgtgggctcccgatgcggctgggaaatacactgagcctagggctatcggtacccgctacctcacccaccacctgtaa

SEQ ID NO: 784 - DNA, 2205 bp, synthetic construct
  misc_feature 1..2205: note = Description of Artificial Sequence: Synthetic polynucleotide
  source 1..2205: mol_type = other DNA
atgactgacggttaccttccagattggctagaggacaacctctctgaaggcgttcgagagtggtgggcgctgcaacctggagcccctaaacccaaggcaaatcaacaacatcaggacaacgctcggggtcttgtgcttcagggttacaaatacctcggacccggcaacggactcgacaagggggaacccgtcaacgcagcggacgcggcagccctcgagcacgacaaggcctacgaccagcagctcaaggccggtgacaacccctacctcaagtacaaccacgccgacgcggagttccagcagcggcttcagggcgacacatcgtttgggggcaacctcggcagagcagtcttccaggccaaaaagagggttcttgaaccccttggtctggttgagcaagcgggtgagacggctcctggaaagaagagaccgttgattgaatccccccagcagcccgactcctccacgggtatcggcaaaaaaggcaagcagccggctaaaaagaagctcgttttcgaagacgaaactggagcaggcgacggaccccctgagggatcaacttccggagccatgtctgatgacagtgagatgcgtgcagcagctggcggagctgcagtcgagggcggacaaggtgccgatggagtgggtaatgcctcgggtgattggcattgcgattccacccggtctgagggccacgtcacgaccaccagcaccagaacctgggtcttgcccacctacaacaaccacctctacaagcgactcggagagagcctgcagtccaacacctacaacggattctccaccccctggggatactttgacttcaaccgcttccactgccacttctcaccacgtgactggcagcgactcatcaacaataactggggcatgcgacccaaagccatgcgggtcaaaatcttcaacatccaggtcaaggaggtcacgacgtcgaacggcgagacaacggtggctaataaccttaccagcacggttcagatctttgcggactcgtcgtacgaactgccgtacgtgatggatgcgggtcaagagggcagcctgcctccttttcccaacgacgtctttatggtgccccagtacggctactgtggactggtgaccggcaacacttcgcagcaacagactgacagaaatgccttctactgcctggagtactttccttcgcagatgctgcggactggcaacaactttgaaattacgtacagttttgagaaggtgcctttccactcgatgtacgcgcacagccagagcctggaccggctgatgaaccctctcatcgaccagtacctgtggggactgcaatcgaccaccaccggaaccaccctgaatgccgggactgccaccaccaactttaccaagctgcggcctaccaacttttccaactttaaaaagaactggctgcccgggccttcaatcaagcagcagggcttctcaaagactgccaatcaaaactacaagatccctgccaccgggtcagacagtctcatcaaatacgagacgcacagcactctggacggaagatggagtgcccggacccccggacctccaatggccacggctggacctgcggacagcaagttcagcaacagccagctcatctttgcggggcctaaacagaacggcaacacggccaccgtacccgggactctgatcttcacctctgaggaggagctggcagccaccaacgccaccgatacggacatgtggggcaacctacctggcggtgaccagagcaacagcaacctgccgaccgtggacagactgacagccttgggagccgtgcctggaatggtctggcaaaacagagacatttactaccagggtcccatttgggccaagattcctcataccgatggacactttcacccctcaccgctgattggtgggtttgggctgaaacacccgcctcctcaaatttttatcaagaacaccccggtacctgcgaatcctgcgacgaccttcagctctactccggtaaactccttcattactcagtacagcactggccaggtgtcggtgcagattgactgggagatccagaaggagcggtccaaacgctggaaccccgaggtccagtttacctccaactacggacagcaaaactctctgttgtgggctcccgatgcggctgggaaatacactgagcctagggctatcggtacccgctacctcacccaccacctgtaa

SEQ ID NO: 785 - DNA, 2175 bp, synthetic construct
  misc_feature 1..2175: note = Description of Artificial Sequence: Synthetic polynucleotide
  source 1..2175: mol_type = other DNA
atgtcttttgttgatcaccctccagattggttggaagaagttggtgaaggtcttcgcgagtttttgggccttgaagcgggcccaccgaaaccaaaacccaatcagcagcatcaagatcaagcccgtggtcttgtgctgcctggttataactatctcggacccggaaacggtctcgatcgaggagagcctgtcaacagggcagacgaggtcgcgcgagagcacgacatctcgtacaacgagcagcttgaggcgggagacaacccctacctcaagtacaaccacgcggacgccgagtttcaggagaggctcgccgacgacacatccttcgggggaaacctcggaaaggcagtctttcaggccaagaaaagggttctcgaaccttttggcctggttgaagagggtgctaagacggcccctaccggaaagcggatagacgaccactttccaaaaagaaagaaggcccggaccgaagaggactccaagccttccacctcgtcagacgccgaagctggacccagcggatcccagcagctgcaaatcccagcccaaccagcctcaagtttgggagctgatacaatgtctgcgggaggtggcggcccattgggcgacaataaccaaggtgccgatggagtgggcaatgcctcgggagattggcattgcgattccacgtggatgggggacagagtcgtcaccaagtccacccgaacctgggtgctgcccagctacaacaaccaccagtaccgagagatcaaaagcggctccgtcgacggaagcaacgccaacgcctactttggatacagcaccccctgggggtactttgactttaaccgcttccacagccactggagcccccgagactggcaaagactcatcaacaactactggggcttcagaccccggtccctcagagtcaaaatcttcaacattcaagtcaaagaggtcacggtgcaggactccaccaccaccatcgccaacaacctcacctccaccgtccaagtgtttacggacgacgactaccagctgccctacgtcgtcggcaacgggaccgagggatgcctgccggccttccctccgcaggtctttacgctgccgcagtacggttacgcgacgctgaaccgcgacaacacagaaaatcccaccgagaggagcagcttcttctgcctagagtactttcccagcaagatgctgagaacgggcaacaactttgagtttacctacaactttgaggaggtgcccttccactccagcttcgctcccagtcagaacctcttcaagctggccaacccgctggtggaccagtacttgtaccgcttcgtgagcacaaataacactggcggagtccagttcaacaagaacctggccgggagatacgccaacacctacaaaaactggttcccggggcccatgggccgaacccagggctggaacctgggctccggggtcaaccgcgccagtgtcagcgccttcgccacgaccaataggatggagctcgagggcgcgagttaccaggtgcccccgcagccgaacggcatgaccaacaacctccagggcagcaacacctatgccctggagaacactatgatcttcaacagccagccggcgaacccgggcaccaccgccacgtacctcgagggcaacatgctcatcaccagcgagagcgagacgcagccggtgaaccgcgtggcgtacaacgtcggcgggcagatggccaccaacaaccagagctccaccactgcccccgcgaccggcacgtacaacctccaggaaatcgtgcccggcagcgtgtggatggagagggacgtgtacctccaaggacccatctgggccaagatcccagagacggaggcgcactttcacccctctccggccatgggcggattcggactcaaacacccaccgcccatgatgctcatcaagaacacgcctgtgcccggaaatatcaccagcttctcggacgtgcccgtcagcagcttcatcacccagtacagcaccgggcaggtcaccgtggagatggagtgggagctcaagaaggaaaactccaagaggtggaacccagagatccagtacacaaacaactacaacgacccccagtttgtggactttgccccggacagcaccggggaatacagaaccaccagacctatcggaacccgataccttacccgacccctttaa

SEQ ID NO: 786 - DNA, 2175 bp, synthetic construct
  misc_feature 1..2175: note = Description of Artificial Sequence: Synthetic polynucleotide
  source 1..2175: mol_type = other DNA
atgtcttttgttgatcaccctccagattggttggaagaagttggtgaaggtcttcgcgagtttttgggccttgaagcgggcccaccgaaaccaaaacccaatcagcagcatcaagatcaagcccgtggtcttgtgctgcctggttataactatctcggacccggaaacggtctcgatcgaggagagcctgtcaacagggcagacgaggtcgcgcgagagcacgacatctcgtacaacgagcagcttgaggcgggagacaacccctacctcaagtacaaccacgcggacgccgagtttcaggagaagctcgccgacgacacatcctccgggggaaacctcggaaaggcagtctttcaggccaagaaaagggttctcgaaccttttggcctggttgaagagggtgctaagacggcccctaccggaaagcggatagacgaccactttccaaaaagaaagaaggcccggaccgaagaggactccaagccttccacctcgtcagacgccgaagctggacccagcggatcccagcagctgcaaatcccagcccaaccagcctcaagtttgggagctgatacaatgtctgcgggaggtggcggcccattgggcgacaataaccaaggtgccgatggagtgggcaatgcctcgggagattggcattgcgattccacgtggatgggggacagagtcgtcaccaagtccacccgaacctgggtgctgcccagctacaacaaccaccagtaccgagagatcaaaagcggctccgtcgacggaagcaacgccaacgcctactttggatacagcaccccctgggggtactttgactttaaccgcttccacagccactggagcccccgagactggcaaagactcatcaacaactactggggcttcagaccccggtccctcagagtcaaaatcttcaacattcaagtcaaagaggtcacggtgcaggactccaccaccaccatcgccaacaacctcacctccaccgtccaagtgtttacggacgacgactaccagctgccctacgtcgtcggcaacgggaccgagggatgcctgccggccttccctccgcaggtctttacgctgccgcagtacggttacgcgacgctgaaccgcgacaacacagaaaatcccaccgagaggagcagcttcttctgcctagagtactttcccagcaagatgctgagaacgggcaacaactttgagtttacctacaactttgaggaggtgcccttccactccagcttcgctcccagtcagaacctcttcaagctggccaacccgctagtggaccagtacttgtaccgcttcgtgagcacaaataacactggcggagtccagttcaacaagaacctggccgggagatacgccaacacctacaaaaactggttcccggggcccatgggccgaacccagggctggaacctgggctccggggtcaaccgcgccagtgtcagcgccttcgccacgaccaataggatggagctcgagggcgcgagttaccaggtgcccccgcagccgaacggcatgaccaacaacctccagggcagcaacacctatgccctggagaacactatgatcttcaacagccagccggcgaacccgggcaccaccgccacgtacctcgagggcaacatgctcatcaccagcgagagcgagacgcagccggtgaaccgcgtggcgtacaacgtcggcgggcagatggccaccaacaaccagagctccaccactgcccccgcgaccggcacgtacaacctccaggaaatcgtgcccggcagcgtgtggatggagagggacgtgtacctccaaggacccatctgggccaagatcccagagacgggggcgcactttcacccctctccggccatgggcggattcggactcaaacacccaccgcccatgatgctcatcaagaacacgcctgtgcccggaaatatcaccagcttctcggacgtgcccgtcagcagcttcatcacccagtacagcaccgggcaggtcaccgtggagatggagtgggagctcaagaaggaaaactccaagaggtggaacccagagatccagtacacaaacaactacaacgacccccagtttgtggactttgccccggacagcaccggggaatacagaaccaccagacctatcggaacccgataccttacccgacccctttaa

SEQ ID NO: 787 - DNA, 2175 bp, synthetic construct
  misc_feature 1..2175: note = Description of Artificial Sequence: Synthetic polynucleotide
  source 1..2175: mol_type = other DNA
atgtcttttgttgatcaccctccagattggttggaagaagttggtgaaggtcttcgcgagtttttgggccttgaagcgggcccaccgaaaccaaaacccaatcagcagcatcaagatcaagcccgtggtcttgtgctgcctggttataactatctcggacccggaaacggtctcgatcgaggagagcctgtcaacagggcagacgaggtcgcgcgagagcacgacatctcgtacaacgagcagcttgaggcgggagacaacccctacctcaagtacaaccacgcggacgccgagtttcaggagaagctcgccgacgacacatccttcgggggaaacctcggaaaggcagtctttcaggccaagaaaagggttctcgaaccttttggcctggttgaagagggtgctaagacggcccctaccggaaagcggatagacgaccactttccaaaaagaaagaaggcccggaccgaagaggactccaagccttccacctcgtcagacgccgaagctggacccagcggatcccagcagctgcaaatcccagcccaaccagcctcaagtttgggagctgatacaatgtctgcgggaggtggcggcccattgggcgacaataaccaaggtgccgatggagtgggcaatgcctcgggagattggcattgcgattccacgtggatgggggacagagtcgtcaccaagtccacccgaacctgggtgctgcccagctacaacaaccaccagtaccgagagatcaaaagcggctccgtcgacggaagcaacgccaacgcctactttggatacagcaccccctgggggtactttgactttaaccgcttccacagccactggagcccccgagactggcaaagactcatcaacaactactggggcttcagaccccggtccctcagagtcaaaatcttcaacattcaagtcaaagaggtcacggtgcaggactccaccaccaccatcgccaacaacctcacctccaccgtccaagtgtttacggacgacgactaccagctgccctacgtcgtcggcaacgggaccgagggatgcctgccggccttccctccgcaggtctttacgctgccgcagtacggttacgcgacactgaaccgcgacaacacagaaaatcccaccgagaggagcagcttcttctgcctagagtactttcccagcaagatgctgagaacgggcaacaactttgagtttacctacaactttgaggaggtgcccttccactccagcttcgctcccagtcagaacctcttcaagctggccaacccgctggtggaccagtacttgtaccgcttcgtgagcacaaataacactggcggagtccagttcaacaagaacctggccgggagatacgccaacacctacaaaaactggttcccggggcccatgggccgaacccagggctggaacctgggctccggggtcaaccgcgccagtgtcagcgccttcgccacgaccaataggatggagctcgagggcgcgagttaccaggtgcccccgcagccgaacggcatgaccaacaacctccagggcagcaacacctatgccctggagaacactatgatcttcaacagccagccggcgaacccgggcaccaccgccacgtacctcgagggcaacatgctcatcaccagcgagagcgagacgcagccggtgaaccgcgtggcgtacaacgtcggcgggcagatggccaccaacaaccagagctccaccactgcccccgcgaccggcacgtacaacctccaggaaatcgtgcccggcagcgtgtggatggagagggacgtgtacctccaaggacccatctgggccaagatcccagagacgggggcgcactttcacccctctccggccatgggcggattcggactcaaacacccaccgcccatgatgctcatcaagagcacgcctgtgcccggaaatatcaccagcttctcggacgtgcccgtcagcagcttcatcacccagtacagcaccgggcaggtcaccgtggagatggagtgggagctcaagaaggaaaactccaagaggtggaacccagagatccagtacacaaacaactacaacgacccccagtttgtggactttgccccggacagcaccggggaatacagaaccaccagacctatcggaacccgataccttacccgacccctttaa

SEQ ID NO: 788 - DNA, 2175 bp, synthetic construct
  misc_feature 1..2175: note = Description of Artificial Sequence: Synthetic polynucleotide
  source 1..2175: mol_type = other DNA
atgtcttttgttgatcaccctccagattggttggaagaagttggtgaaggtcttcgcgagtttttgggccctgaagcgggcccaccgaaaccaaaacccaatcagcagcatcaagatcaagcccgtggtcttgtgctgcctggttataactatctcggacccggaaacggtctcgatcgaggagagcctgtcaacagggcagacgaggtcgcgcgagagcacgacatctcgtacaacgagcagcttgaggcgggagacaacccctacctcaagtacaaccacgcggacgccgagtttcaggagaagctcgccgacgacacatccttcgggggaaacctcggaaaggcagtctttcaggccaagaaaagggttctcgaaccttttggcctggttgaagagggtgctaagacggcccctaccggaaagcggatagacgaccactttccaaaaagaaagaaggtccggaccgaagaggactccaagccttccacctcgtcagacgccgaagctggacccagcggatcccagcagctgcaaatcccagcccaaccagcctcaagtttgggagctgatacaatgtctgcgggaggtggcggcccattgggcgacaataaccaaggtgccgatggagtgggcaatgcctcgggagattggcattgcgattccacgtggatgggggacagagtcgtcaccaagtccacccgaacctgggtgccgcccagctacaacaaccaccagtaccgagagatcaaaagcggctccgtcgacggaagcaacgccaacgcctactttggatacagcaccccctgggggtactttgactttaaccgcttccacagccactggagcccccgagactggcaaagactcatcaacaactactggggcttcagaccccggtccctcagagtcaaaatcttcaacattcaagtcaaagaggtcacggtgcaggactccaccaccaccatcgccaacaacctcacctccaccgtccaagtgtttacggacgacgactaccagctgccctacgtcgtcggcaacgggaccgagggatgcctgccggccttccctccgcaggtctttacgctgccgcagtacggttacgcgacgctgaaccgcgacaacacagaaaatcccaccgagaggagcagcttcttctgcctagagtactttcccagcaagatgctgagaacgggcaacaactttgagtttacctacaactttgaggaggtgcccttccactccagcttcgctcccagtcagaacctcttcaagctggccaacccgctggtggaccagtacttgtaccgcttcgtgagcacaaataacactggcggagtccagttcaacaagaacctggccgggagatacgccaacacctacaaaaactggttcccggggcccatgggccgaacccagggctggaacctgggctccggggtcaaccgcgccagtgtcagcgccttcgccacgaccaataggatggagctcgagggcgcgagttaccaggtgcccccgcagccgaacggcatgaccaacaacctccagggcagcaacacctatgccctggagaacactatgatcttcaacagccagccggcgaacccgggcaccaccgccacgtacctcgagggcaacatgctcatcaccagcgagagcgagacgcagccggtgaaccgcgtggcgtgcaacgtcggcgggcagatggccaccaacaaccagagctccaccactgcccccgcgaccggcacgtacaacctccaggaaatcgtgcccggcagcgtgtggatggagagggacgtgtacctccaaggacccatctgggccaagatcccagagacgggggcgcactttcacccctctccggccatgggcggattcggactcaaacacccaccgcccatgatgctcatcaagaacacgcctgtgcccggaaatatcaccagcttctcggacgtgcccgtcagcagcttcatcacccagtacagcaccgggcaggtcaccgtggagatggagtgggagctcaagaaggaaaactccaagaggtggaacccagagatccagtacacaaacaactacaacgacccccagtttgtggactttgccccggacagcaccggggaatacagaaccaccagacctattggaacccgataccttacccgacccctttaa

SEQ ID NO: 789 - DNA, 2175 bp, synthetic construct
  misc_feature 1..2175: note = Description of Artificial Sequence: Synthetic polynucleotide
  source 1..2175: mol_type = other DNA
atgtcttttgttgatcaccctccagattggttggaagaagttggtgaaggtcttcgcgagtttttgggccttgaagcgggcccaccgaaaccaaaacccaatcagcagcatcaagatcaagcccgtggtcttgtgctgcctggttataactatctcggacccggaaacggtctcgatcgaggagagcctgtcaacagggcagacgaggtcgcgcgagagcacgacatctcgtacaacgagcagcttgaggcgggagacaacccctacctcaagtacaaccacgcggacgccgagtttcaggagaagctcgccgacgacacatccttcgggggaaacctcggaaaggcagtctttcaggccaagaaaagggttctcgaaccttttggcctggttgaagagggtgctaagacggcccctaccggaaagcggatagacgaccactttccaaaaagaaagaaggcccggaccgaagaggactccaagccttccacctcgtcagacgccgaagctggacccagcggatcccagcagctgcaaatcccagcccaaccagcctcaagtttgggagctgatacaatgtctgcgggaggtggcggcccattgggcgacaataaccaaggtgccgatggagtgggcaatgcctcgggagattggcattgcgattccacgtggatgggggacagagtcgtcaccaagtccacccgaacctgggtgctgcccagctacaacaaccaccagtaccgagagatcaaaagcggctccgtcgacggaagcaacgccaacgcctactttggatacagcaccccctgggggtactttgactttaaccgcttccacagccactggagcccccgagactggcaaagactcatcaacaactactggggcttcagaccccggtccctcagagtcaaaatcttcaacattcaagtcaaagaggtcacggtgcaggactccaccaccaccatcgccaacaacctcacctccaccgtccaagtgtttacggacgacgactaccagctgccctacgtcgtcggcaacgggaccgagggatgcctgccggccttccctccgcaggtctttacgctgccgcagtacggttacgcgacgctgaaccgcgacaacaccgaaaatcccaccgagaggagcagcttcttctgcctagagtactttcccagcaagatgctgagaacgggcaacaactttgagtttacctacaactttgaggaggtgcccttccactccagcttcgctcccagtcagaacctcttcaagctggccaacccgctggtggaccagtacttgtaccgcttcgtgagcacaaataacactggcggagtccagttcaacaagaacctggccgggagatacgccaacacctacaaaaactggttcccggggcccatgggccgaacccagggctggaacctgggctccggggtcaaccgcgccagtgtcagcgccttcgccacgaccaataggatggagctcgagggcgcgagttaccaggtgcccccgcagccgaacggcatgaccaacaacctccagggcagcaacacctatgccctggagaacactatgatcttcaacagccagccggcgaacccgggcaccaccgccacgtacctcgagggcaacatgctcatcaccagcgagagcgagacgcagccggtgaaccgcgtggcgtacaacgtcggcgggcagatggccaccaacaaccagagctccaccactgcccccgcgaccggcgcgtacaacctccaggaaatcgtgcccggcagcgtgtggatggagagggacgtgtacctccaaggacccatctgggccaagatcccagagacgggggcgcactttcacccctctccggccatgggcggattcggactcaaacacccaccgcccatgatgctcatcaagaacacgcctgtgcccggaaatatcaccagcttctcggacgtgcccgtcagcagcttcatcacccagtacagcaccgggcaggtcaccgtggagatggagtgggagctcaagaaggaaaactccaagaggtggaacccagagatccagtacacaaacaactacaacgacccccagtttgtggactttgccccggacagcaccggggaatacagaaccaccagacctatcggaacccgataccttacccgacccctttaa

SEQ ID NO: 790 - DNA, 2175 bp, synthetic construct
  misc_feature 1..2175: note = Description of Artificial Sequence: Synthetic polynucleotide
  source 1..2175: mol_type = other DNA
atgtcttttgttgatcaccctccagattggttggaagaagttggtgaaggtcttcgcgagtttttgggccttgaagcgggcccaccgaaaccaaaacccaatcagcagcatcaagatcaagcccgtggtcttgtgctgcctggttataactatctcggacccggaaacggtctcgatcgaggagagcctgtcaacagggcagacggggtcgcgcgagagcacgacatctcgtacaacgagcagcttgaggcgggagacaacccctacctcaagtacaaccacgcggacgccgagtttcaggagaagctcgccgacgacacatccttcgggggaaacctcggaaaggcagtctttcaggccaagaaaagggttctcgaaccttttggcctggttgaagagggtgctaagacggcccctaccggaaagcggatagacgaccactttccaaaaagaaagaaggcccggaccgaagaggactccaagccttccacctcgtcagacgccgaagctggacccagcggatcccagcagctgcaaatcccagcccaaccagcctcaagtttgggagctgatacaatgtctgcgggaggtggcggcccattgggcgacaataaccaaggtgccgatggagtgggcaatgcctcgggagattggcattgcgattccacgtggatgggggacagagtcgtcaccaagtccacccgaacctgggtgctgcccagctacaacaaccaccagtaccgagagatcaaaagcggctccgtcgacggaagcaacgccaacgcctactttggatacagcaccccctgggggtactttgactttaaccgcttccacagccactggagcccccgagactggcaaagactcatcaacaactactggggcttcagaccccggtccctcagagtcaaaatcttcaacattcaagtcaaagaggtcacggtgcaggactccaccaccaccatcgccaacaacctcacctccaccgtccaagcgtttacggacgacgactaccagctgccctacgtcgtcggcaacgggaccgagggatgcctgccggccttccctccgcaggtctttacgctgccgcagtacggttacgcgacgctgaaccgcgacaacacagaaaatcccaccgagaggagcagcttcttctgcctagagtactttcccagcaagatgctgagaacgggcaacaactttgagtttacctacaactttgaggaggtgcccttccactccagcttcgctcccagtcagaacctcttcaagctggccaacccgctggtggaccagtacttgtaccgcttcgtgagcacaaataacactggcggagtccagttcaacaagaacctggccgggagatacgccaacacctacaaaaactggttcccggggcccatgggccgaacccagggctggaacctgggctccggggtcaaccgcgccagtgtcagcgccttcgccacgaccaataggatggagctcgagggcgcgagttaccaggtgcccccgcagccgaacggcatgaccaacaacctccagggcagcaacacctatgccctggagaacactatgatcttcaacagccagccggcgaacccgggcaccaccgccacgtacctcgagggcaacatgctcatcaccagcgagagcgagacgcagccggtgaaccgcgtggcgtacaacgtcggcgggcagatggccaccaacaaccagagctccaccactgcccccgcgaccggcacgtacaacctccaggaaatcgtgcccggcagcgtgtggatggagagggacgtgtacctccaaggacccatctgggccaagatcccagagacgggggcgcactttcacccctctccggccatgggcggattcggactcaaacacccaccgcccatgatgctcatcaagaacacgcctgtgcccggaaatatcaccagcttctcggacgtgcccgtcagcagcttcatcacccagtacagcaccgggcaggtcaccgtggagatggagtgggagctcaagaaggaaaactccaagaggtggaacccagagatccagtacacaaacaactacaacgacccccagtttgtggactttgccccggacagcaccggggaatacagaaccaccagacctatcggaacccgataccttacccgacccctttaa

SEQ ID NO: 791 - DNA, 2175 bp, synthetic construct
  misc_feature 1..2175: note = Description of Artificial Sequence: Synthetic polynucleotide
  source 1..2175: mol_type = other DNA
atgtcttttgttgatcaccctccagattggttggaagaagttggtgaaggtcttcgcgagtttttgggccttgaagcgggcccaccgaaaccaaaacccaatcagcagcatcaagatcaagcccgtggtcttgtgctgcctggttataactatctcggacccggaaacggtctcgatcgaggagagcctgtcaacagggcagacgaggtcgcgcgagagcacgacatctcgtacaacgagcagcttgaggcgggagacaacccctacctcaagtacaaccacgcggacgccgagtttcaggagaagctcgccgacgacacatccttcgggggaaacctcggaaaggcagtctttcaggccaagaaaagggttctcgaaccttttggcctggttgaagagggtgctaagacggcccctaccggaaagcggatagacgaccactttccaaaaagaaagaaggcccggaccgaagaggactccaagccttccacctcgtcagacgccgaagctggacccagcggatcccagcagctgcaaatcccagcccaaccagcctcaagtttgggagctgatacaatgtctgcgggaggtggcggcccattgggcgacaataaccaaggtgccgatggagtgggcaatgcctcgggagattggcattgcgattccacgtggatgggggacagagtcgtcaccaagtccacccgaacctgggtgctgcccagctacaacaaccaccagtaccgagagatcaaaagcggctccgtcgacggaagcaacgccaacgcctactttggatacagcaccccctgggggtactttgactttaaccgcttccacagccactggagcccccgagactggcaaagactcatcaacaactactggggcttcagaccccggtccctcagagtcaaaatcttcaacattcaagtcaaagaggtcacggtgcaggactccaccaccaccatcgccaacaacctcacctccaccgtccaagtgtttacggacgacgactaccagctgccctacgtcgtcggcaacgggaccgagggatgcctgccggccttccctccgcaggtctttacgctgccgcagtacggttacgcgacgctgaaccgcgacaacacagaaaatcccaccgagaggagcagcttcttctgcctagagtactttcccagcaagatgctgagaacgggcaacaactttgagtttacctacaactttgaggaggtgcccttccactccagcttcgctcccagtcagaacctcttcaagctggccaacccgctggtggaccagtacttgtaccgcttcgtgagcacaaataacactggcggagtccagttcaacaagaacctggccgggagatacgccaacacctacaaaaactggttcccggggcccatgggccgaacccagggctggaacctgggctccggggtcaaccgcgccagtgtcagcgccttcgccacgaccaataggatggagctcgagggcgcgagttactaggtgcccccgcagccgaacggcatgaccaacaacctccagggcagcaacacctatgccctggagaacactatgatcttcaacagccagccggcgaacccgggcaccaccgccacgtacctcgagggcaacatgctcatcaccagcgagagcgagacgcagccggtgaaccgcgtggcgtacaacgtcggcgggcagatggccaccaacaaccagagctccaccactgcccccgcgaccggcacgtacaacctccaggaaatcgtgcccggcagcgtgtggatggagggggacgtgtacctccaaggacccatctgggccaagatcccagagacgggggcgcactttcacccctctccggccatgggcggattcggactcaagcacccaccgcccatgatgctcatcaagaacacgcctgtgcccggaaatatcaccagcttctcggacgtgcccgtcagcagcttcatcacccagtacagcaccgggcaggtcaccgtggagatggagtgggagctcaagaaggaaaactccaagaggtggaacccagagatccagtacacaaacaactacaacgacccccagtttgtggactttgccccggacagcaccggggaatacagaaccaccagacctatcggaacccgataccttacccgacccctttaa

SEQ ID NO: 792 - DNA, 2175 bp, synthetic construct
  misc_feature 1..2175: note = Description of Artificial Sequence: Synthetic polynucleotide
  source 1..2175: mol_type = other DNA
atgtcttttgttgatcaccctccagattggttggaagaagttggtgaaggtcttcgcgagtttttgggccttgaagcgggcccaccgaaaccaaaacccaatcagcagcatcaagatcaagcccgtggtcttgtgctgcctggttataactatctcggacccggaaacggtctcgatcgaggagagcctgtcaacagggcagacgaggtcgcgcgagagcacgacatctcgtacaacgagcagcttgaggcgggagacaacccctacctcaagtacaaccacgcggacgccgagtttcaggagaagctcgccgacgacacatccttcgggggaaacctcggaaaggcagtctttcaggccaagaaaagggttctcgaaccttttggcctggttgaagagggtgctaagacggcccctaccggaaagcggatagacgaccactttccaaaaagaaagaaggtccggaccgaagaggactccaagccttccacctcgtcagacgccgaagctggacccagcggatcccagcagctgcaaatcccagcccaaccagcctcaagtttgggagctgatacaatgtctgcgggaggtggcggcccattgggcgacaataaccaaggtgccgatggagtgggcaatgcctcgggagattggcattgcgattccacgtggatgggggacagagtcgtcaccaagtccacccgaacctgggtgctgcccagctacaacaaccaccagtaccgagagatcaaaagcggctccgtcgacggaagcaacgccaacgcctactttggatacagcaccccctgggggtactttgactttaaccgcttccacagccactggagcccccgagactggcaaagactcatcaacaactactggggcttcagaccccggtccctcagagtcaaaatcttcaacattcaagtcaaagaggtcacggtgcaggactccaccaccaccatcgccaacaacctcacctccaccgtccaagtgtttacggacgacgactaccagctgccctacgtcgtcggcaacgggaccgagggatgcctgccggccttccctccgcaggtctttacgctgccgcagtacggttacgcgacgctgaaccgcgacaacacagaaaatcccaccgagaggagcagcttcttctgcctagagtactttcccagcaagatgctgagaacgggcaacaactttgagtttacctacaactttgaggaggtgcccttccactccagcttcgctcccagtcagaacctcttcaagctggccaacccgctggtggaccagtacttgtaccgcttcgtgagcacaaataacactggcggagtccagttcaacaagaacctggccgggagatacgccaacacctacaaaaactggttcccggggcccatgggccgaacccagggctggaacctgggctccggggtcaaccgcgccagtgtcagcgccttcgccacgaccaataggatggagctcgagggcgcgagttaccaggtgcccccgcagccgaacggcatgaccaacaacctccagggcagcaacacctatgccctggagaacactatgatcttcaacagccagccggcgaacccgggcaccaccgccacgtacctcgagggcaacatgctcatcaccagcgagagcgagacgcagccggtgaaccgcgtggcgtacaacgtcggcgggcagatggccaccaacaaccagagctccaccactgcccccgcgaccggcacgtacaacctccaggaaatcgtgcccggcagcgtgtggatggagagggacgtgtacctccaaggacccatctgggccaagatcccagagacgggggcgcactttcacccctctccggccatgggcggattcggactcaaacacccaccgcccatgatgctcatcaagaacacgcctgtgcccggaaatatcaccagcttctcggacgtgcccgtcagcagcttcatcacccagtacagcaccgggcaggtcaccgtggagatggagtgggagctcaagaaggaaaactccgagaggtggaacccagagatccagtacacaaacaactacaacgacccccagtttgtggactttgccccggacagcaccggggaatacagaaccaccagacctattggaacccgataccttacccgacccctttaa

SEQ ID NO: 793 - DNA, 2175 bp, synthetic construct
  misc_feature 1..2175: note = Description of Artificial Sequence: Synthetic polynucleotide
  source 1..2175: mol_type = other DNA
atgtcttttgttgatcaccctccagattggttggaagaagttggtgaaggtcttcgcgagtttttgggccttgaagcgggcccaccgaaaccaaaacccaatcagcagcatcaagatcaagcccgtggtcttgtgctgcctggttataactatctcggacccggaaacggtctcgatcgaggagagcctgtcaacagggcagacgaggtcgcgcgagagcacgacatctcgtacagcgagcagcttgaggcgggagacaacccctacctcaagtacaaccacgcggacgccgagtttcaggagaagctcgccgacgacacatccttcgggggaaacctcggaaaggcagtctttcaggccaagaaaagggttctcgaaccttttggcctggttgaagagggtgctaagacggcccctaccggaaagcggatagacgaccactttccaaaaagaaagaaggcccggaccgaagaggactccaagccttccacctcgtcagacgccgaagctggacccagcggatcccagcagctgcaaatcccagcccaaccagcctcaagtttgggagctgatacaatgtctgcgggaggtggcggcccattgggcgacaataaccaaggtgccgatggagtgggcaatgcctcgggagattggcattgcgattccacgtggatgggggacagagtcgtcaccaagtccacccgaacctgggtgctgcccagctacaacaaccaccagtaccgagagatcaaaagcggctccgtcgacggaagcaacgccaacgcctactttggatacagcaccccctgggggtactttgactttaaccgcttccacagccactggagcccccgagactggcaaagactcatcaacaactactggggcttcagaccccggtccctcagagtcaaaatcttcaacattcaagtcaaagaggtcacggtgcaggactccaccaccaccatcgccaacaacctcacctccaccgtccaagtgtttacggacgacgactaccagctgccctacgtcgtcggcaacgggaccgagggatgcctgccggccttccctccgcaggtctttacgctgccgcagtacggttacgcgacgctgaaccgcgacaacacagaaaatcccaccgagaggagcagcttcttctgcctagagtactttcccagcaagatgctgagaacgggcaacaactttgagtttacctacaactttgaggaggtgcccttccactccagcttcgctcccagtcagaacctcttcaagctggccaacccgctggtggaccagtacttgtaccgcttcgtgagcacaaataacactggcggagtccagttcaacaagaacctggccgggagatacgccaacacctacaaaaactggttcccggggcccatgggccgaacccagggctggaacctgggctccggggtcaaccgcgccagtgtcagcgccttcgccacgaccaataggatggagctcgagggcgcgagttaccaggtgcccccgcagccgaacggcatgaccaacaacctccagggcagcaacacctatgccctggagaacactatgatcttcaacagccagccggcgaacccgggcaccaccgccacgtacctcgagggcaacatgctcatcaccagcgagagcgagacgcagccggtgaaccgcgtggcgtacaacgtcggcgggcagatggccaccaacaaccagagctccaccactgcccccgcgaccggcacgtacaacctccaggaaatcgtgcccggcagcgtgtggatggagagggacgtgtacctccaaggacccatctgggccaagatcccagagacgggggcgcactttcacccctctccggccatgggcggattcggactcaaacacccaccgcccatgatgctcatcaagaacacgcctgtgcccggaaatatcaccagcttctcggacgtgcccgtcagcagcttcatcacccagtacagcaccgggcaggtcaccgtggagatggagtgggagctcaagaaggaaaactccaagaggtggaacccagagatccagtacacaaacaactacaacgacccccagtttgtggactttgccccggacagcaccggggaatacagaaccgccagacctatcggaacccgataccttacccgacccctttaa

SEQ ID NO: 794 - DNA, 2175 bp, synthetic construct
  misc_feature 1..2175: note = Description of Artificial Sequence: Synthetic polynucleotide
  source 1..2175: mol_type = other DNA
atgtcttttgttgatcaccctccagattggttggaagaagttggtgaaggtcttcgcgagtttttgggccctgaagcgggcccaccgaaaccaaaacccaatcagcagcatcaagatcaagcccgtggtcttgtgctgcctggttataactatctcggacccggaaacggtctcgatcgaggagagcctgtcaacagggcagacgaggtcgcgcgagagcacgacatctcgtacaacgagcagcttgaggcgggagacaacccctacctcaagtacaaccacgcggacgccgagtttcaggagaagctcgccgacgacacatccttcgggggaaacctcggaaaggcagtctttcaggccaagaaaagggttctcgaaccttttggcctggttgaagagggtgctaagacggcccctaccggaaagcggatagacgaccactttccaaaaagaaagaaggcccggaccgaagaggactccaagccttccacctcgtcagacgccgaagctggacccagcggatcccagcagctgcaaatcccagcccaaccagcctcaagtttgggagctgatacaatgtctgcgggaggtggcggcccattgggcgacaataaccaaggtgccgatggagtgggcaatgcctcgggagattggcattgcgattccacgtggatgggggacagagtcgtcaccaagtccacccgaacctgggtgctgcccagctacaacaaccaccagtaccgagagatcaaaagcggctccgtcgacggaagcaacgccaacgcctactttggatacagcaccccctgggggtactttgactttaaccgcttccacagccactggagcccccgagactggcaaagactcatcaacaactactggggcttcagaccccggtccctcagagtcaaaatcttcaacattcaagtcaaagaggtcacggtgcaggactccaccaccaccatcgccaacaacctcacctccaccgtccaagtgtttacggacgacgactaccagctgccctacgtcgtcggcaacgggaccgagggatgcctgccggccttccctccgcaggtctttacgctgccgcagtacggttacgcgacgctgaaccgcgacaacacagaaaatcccaccgagaggagcagcttcttctgcctagagtactttcccagcaagatgctgagaacgggcaacaactttgagtttacctacaactttgaggaggtgcccttccactccagcttcgctcccagtcagaacctcttcaagctggccaacccgctggtggaccagtacttgtaccgcttcgtgagcacaaataacactggcggagtccagttcaacaagaacctggccgggagatacgccaacacctacaaaaactggttcccggggcccatgggccgaacccagggctggaacctgggctccggggtcaaccgcgccagtgtcagcgccttcgccacgaccaataggatggagctcgagggcgcgagttaccaggtgcccccgcagccgaacggcatgaccaacaacctccagggcagcaacacctatgccctggagaacactatgatcttcaacagccagccggcgaacccgggcaccaccgccacgtacctcgagggcaacatgctcatcaccagcgagagcgagacgcagccggtgaaccgcgtggcgtacaacgtcggcgggcagatgaccaccaacaaccagagctccaccactgcccccgcgaccggcacgtacaacctccaggaaatcgtgcccggcagcgtgtggatggagagggacgtgtacccccaaggacccatctgggccaagatcccagagacgggggcgcactttcacccctctccggccatgggcggattcggactcaaacacccaccgcccatgatgctcatcaagaacacgcctgtgcccggaaatatcaccagcttctcggacgtgcccgtcagcagcttcatcacccagtacagcaccgggcaggtcaccgtggagatggagtgggagctcaagaaggaaaactccaagaggtggaacccagagatccagtacacaaacaactacaacgacccccagtttgtggactttgccccggacagcaccggggaatacaggaccaccagacctatcggaacccgataccttacccgacccctttaa

SEQ ID NO: 795 - DNA, 2175 bp, synthetic construct
  misc_feature 1..2175: note = Description of Artificial Sequence: Synthetic polynucleotide
  source 1..2175: mol_type = other DNA
atgtcttttgttgatcaccctccagattggttggaagaagttggtgaaggtcttcgcgagtttttgggccttgaagcgggcccaccgaaaccaaaacccaatcagcagcatcaagatcaagcccgtggtcttgtgctgcctggttataactatctcggacccggaaacggtctcgatcgaggagagcctgtcaacagggcagacgaggtcgcgcgagagcacgacatctcgtacaacgagcagcttgaggcgggagacaacccctacctcaagtacaaccacgcggacgccgagtttcaggagaagctcgccgacgacacatccttcgggggaaacctcggaaaggcagtctttcaggccaagaaaagggttctcgaaccttttggcctggttgaagagggtgctaagacggcccctaccggaaagcggatagacgaccactttccaaaaagaaagaaggcccggaccgaagaggactccaagccttccacctcgtcagacgccgaagctggacccagcggatcccagcagctgcaaatcccagcccaaccagcctcaagtttgggagctgatacaatgtctgcgggaggtggcggcccattgggcgacaataaccaaggtgccgatggagtgggcaatgcctcgggagattggcattgcgattccacgtggatgggggacagagtcgtcaccaagtccacccgaacctgggtgctgcccagctacaacaaccaccagtaccgagagatcaaaagcggctccgtcgacggaagcaacgccaacgcctactttggatacagcaccccctgggggtactttgactttaaccgcttccacagccactggagcccccgagactggcaaagactcatcaacaactactggggcttcagaccccggtccctcagagtcaaaatcttcaacattcaagtcaaagaggtcacggtgcaggactccaccaccaccatcgccaacaacctcacctccaccgtccaagtgtttacggacgacgactaccagctgccctacgtcgtcggcaacgggaccgagggatgcctgccggccttccctccgcaggtctttacgctgccgcagtacggttacgcgacgctgaaccgcgacaacacagaaaatcccaccgagaggagcagcttcctctgcctagagtactttcccagcaagatgctgagaacgggcaacaactttgagtttacctacaactttgaggaggtgcccttccactccagcttcgctcccagtcagaacctcttcaagctggccaacccgctggtggaccagtacttgtaccgcttcgtgagcacaaataacactggcggagtccagttcaacaagaacctggccgggagatacgccaacacctacaaaaactggttcccggggcccatgggccgaacccagggctggaacctgggctccggggtcaaccgcgccagtgtcagcgccttcgccacgaccaataggatggagctcgagggcgcgagttaccaggtgcccccgcagccgaacggcatgaccaacaacctccagggcagcaacacctatgccctggagaacactatgatcttcaacagccagccggcgaacccgggcaccaccgccacgtacctcgagggcaacatgctcatcaccagcgagagcgagacgcagccggtgaaccgcgtggcgtacaacgtcggcgggcagatggccaccaacaaccagagctccaccactgcccccgcgaccggcacgtacaacctccaggaaatcgtgcccggcagcgtgtggatgaagagggacgtgtacctccaaggacccatctgggccaagatcccagagacgggggcgcactttcacccctctccggccatgggcggattcggactcaaacacccaccgcccatgatgctcatcaagaacacgcctgtgcccggaaatatcaccagcttctcggacgtgcccgtcagcagcttcatcacccagtacagcaccgggcaggtcaccgtggagatggagtgggagctcaagaaggaaaactccaagaggtggaacccagagatccagtacacaaacaactacaacgacccccagtttgtggactttgccccggacagcaccggggaatacagaaccaccagacctatcggaacccgataccttacccgacccctttaa

SEQ ID NO: 796 - DNA, 2175 bp, synthetic construct
  misc_feature 1..2175: note = Description of Artificial Sequence: Synthetic polynucleotide
  source 1..2175: mol_type = other DNA
atgtcttttgttgatcaccctccagattggttggaagaagttggtgaaggtcttcgcgagtttttgggccttgaggcgggcccaccgaaaccaaaacccaatcagcagcatcaagatcaagcccgtggtcttgtgctgcctggttataactatctcggacccggaaacggtctcgatcgaggagagcctgtcaacagggcagacgaggtcgcgcgagagcacgacatctcgtacaacgagcagcttgaggcgggagacaacccctacctcaagtacaaccacgcggacgccgagtttcaggagaagctcgccgacgacacatccttcgggggaaacctcggaaaggcagtctttcaggccaagaaaagggttctcgaaccttttggcctggttgaagagggtgctaagacggcccctaccggaaagcggatagacgaccactttccaaaaagaaagaaggcccggaccgaagaggactccaagccttccaccccgtcagacgccgaagctggacccagcggatcccagcagctgcaaatcccagcccaaccagcctcaagtttgggagctgatacaatgtctgcgggaggtggcggcccattgggcgacaataaccaaggtgccgatggagtgggcaatgcctcgggagattggcattgcgattccacgtggatgggggacagagtcgtcaccaagtccacccgaacctgggtgctgcccagctacaacaaccaccagtaccgagagatcaaaagcggctccgtcgacggaagcaacgccaacgcctactttggatacagcaccccctgggggtactttgactttaaccgcttccacagccactggagcccccgagactggcaaagactcatcaacaactactggggcttcagaccccggtccctcagagtcaaaatcttcaacattcaagtcaaagaggtcacggtgcaggactccaccaccaccatcgccaacaacctcacctccaccgtccaagtgtttacggacgacgactaccagctgccctacgtcgtcggcaacgggaccgagggatgcctgccggccttccctccgcaggtctttacgctgccgcagtacggttacgcgacgctgaaccgcgacaacacagaaaatcccaccgagaggagcagcttcttctgcctagagtactttcccagcaagatgctgagaacgggcaacaactttgagtttacctacaactttgaggaggtgcccttccactccagcttcgctcccagtcagaacctcttcaagctggccaacccgctggtggaccagtacttgtaccgcttcgtgagcacaaataacactggcggagtccagttcaacaagaacctggccgggagatacgccaacacctacaaaaactggttcccggggcccatgggccgaacccagggctggaacctgggctccggggtcaaccgcgccagtgtcagcgccttcgccacgaccaataggatggagctcgagggcgcgagttaccaggtgcccccgcagccgaacggcatgaccaacaacctccagggcagcaacacctatgccctggagaacactatgatcttcaacagccagccggcgaacccgggcaccaccgccacgtacctcgagggcaacatgctcatcaccagcgagagcgagacgcagccggtgaaccgcgtggcgtacaacgtcggcgggcagatggccaccaacaaccagagctccaccactgcccccgcgaccggcacgtacaacctccaggaaatcgtgcccggcagcgtgtggatggagagggacgtgtacctccaaggacccatctgggccaagatcccagagacgggggcgcactttcacccctctccggccatgggcggattcggactcaaacacccaccgcccatgatgctcatcaagaacacgcctgtgcccggaaatatcaccagcttctcggacgtgcccgtcagcagcttcatcacccagtacagcaccgggcaggtcaccgtggagatggagtgggagctcaagaaggaaaactccaagaggtggaacccagagatccagtacacaaacaactacaacgacccccagtttgtggactttgccccggacagcaccggggaatacagaaccaccagacctatcggaacccgataccttacccgacccctttaa

SEQ ID NO: 797 - DNA, 2175 bp, synthetic construct
  misc_feature 1..2175: note = Description of Artificial Sequence: Synthetic polynucleotide
  source 1..2175: mol_type = other DNA
atgtcttttgttgatcaccctccagattggttggaagaagttggtgaaggtcttcgcgagtttttgggccttgaagcgggcccaccgaaaccaaaacccaatcagcagcatcaagatcaagcccgtggtcttgtgctgcctggttataactatctcggacccggaaacggtctcgatcgaggagagcctgtcaacagggcagacgaggtcgcgcgagagcacgacatctcgtacaacgagcagcttgaggcgggagacaacccctacctcaagtacaaccacgcggacgccgagtttcaggagaagctcgccgacgacacatccttcgggggaaacctcggaaaggcagtctttcaggccaagaaaagggttctcgaaccttttggcctggttgaagagggtgctaagacggcccctaccggaaagcggatagacgaccactttccaaaaagaaagaaggcccggaccgaagaggactccaagccttccacctcgtcagacgccgaagctggacccagcggatcccagcagctgcaaatcccagcccaaccagcctcaagtttgggagctgatacaatgtctgcgggaggtggcggcccattgggcgacaataaccaaggtgccgatggagtgggcaatgcctcgggagattggcattgcgattccacgtggatgggggacagagtcgtcaccaagtccacccgaacctgggtgctgcccagctacaacaaccaccagtaccgagagatcaaaagcggctccgtcgacggaagcaacgccaacgcctactttggatacagcaccccctgggggtactttgactttaaccgcttccacagccactggagcccccgagactggcaaagactcatcaacaactactggggcttcagaccccggtccctcagagtcaaaatcttcaacattcaagtcaaagaggtcacggtgcaggactccaccaccaccatcgccaacaacctcacctccaccgtccaagtgtttacggacgacgactaccagctgccctacgtcgtcggcaacgggaccgagggatgcctgccggccttccctccgcaggtctttacgctgccgcagtacggttacgcgacgctgaaccgcgacaacacagaaaatcccaccgagaggagcagcttcttctgcctagagtactttcccagcaagatgctgagaacgggcaacaactttgagtttacctacaactttgaggaggtgcccttccactccagcttcgctcccagtcagaacctcttcaagctggccaacccgctggtggaccagtacttgtaccgcttcgtgagcacaaataacactggcggagtccagttcaacaagaacctggccgggagatacgccaacacccacaaaaactggttcccggggcccatgggccgaacccagggctggaacctgggctccggggtcaaccgcgccagtgtcagcgccttcgccacgaccaataggatggagctcgagggcgcgagttaccaggtgcccccgcagtcgaacggcatgaccaacaacctccggggcagcaacacctatgccctggagaacactatgatcttcaacagccagccggcgaacccgggcaccaccgccacgtacctcgagggcaacatgctcatcaccagcgagagcgagacgcagccggtgaaccgcgtggcgtacaacgtcggcgggcagatggccaccaacaaccagagctccaccactgcccccgcgaccggcacgtacaacctccaggaaatcgtgcccggcagcgtgtggatggagagggacgtgtacctccaaggacccatctgggccaagatcccagagacgggggcgcactttcacccctctccggccatgggcggattcggactcaaacacccaccgcccatgatgctcatcaagaacacgcctgtgcccggaaatatcaccagcttctcggacgtgcccgtcagcagcttcatcacccagtacagcaccgggcaggtcaccgtggagatggagtgggagctcaagaaggaaaactccaagaggtggaacccagagatccagtacacaaacaactacaacgacccccagtttgtggactttgccccggacagcaccggggaatacagaaccaccagacctatcggaacccgataccttacccgacccctttaa

SEQ ID NO: 798 - DNA, 2175 bp, synthetic construct
  misc_feature 1..2175: note = Description of Artificial Sequence: Synthetic polynucleotide
  source 1..2175: mol_type = other DNA
atgtcttttgttgatcaccctccagattggttggaagaagttggtgaaggtcttcgcgagtttttgggccttgaagcgggcccaccgaaaccaaaacccaatcagcagcatcaagatcaagcccgtggtcttgtgctgcctggttataactatctcggacccggaaacggtctcgatcgaggagagcctgtcaacagggcagacgaggtcgcgcgagagcacgacatctcgtacaacgagcagcttgaggcgggagacaacccctacctcaagtacaaccacgcggacgccgagtttcaggagaagctcgccgacgacacatccttcgggggaaacctcggaaaggcagtctttcaggccaagaaaagggttctcgaaccttttggcctggttgaagagggtgctaagacggcccctaccggaaagcggatagacgaccactttccaaaaagaaagaaggcccggaccgaagaggactccaagccttccacctcgtcagacgccgaagctggacccagcggatcccagcagctgcaaatcccagcccaaccagcctcaagtttgggagctgatacaatgtctgcgggaggtggcggcccattgggcgacaataaccaaggtgccgatggagtgggcaatgcctcgggagattggcattgcgattccacgtggatgggggacagagtcgtcaccaagtccacccgaacctgggtgctgcccagctacaacaaccaccagtaccgagagatcaaaagcggctccgtcgacggaagcaacgccaacgcctactttggatacagcaccccctgggggtactttgactttaaccgcttccacagccactggagcccccgagactggcaaagactcatcaacaactactggggcttcagaccccggtccctcagagtcaaaatcttcaacattcaagtcaaagaggtcacggtgcaggactccaccaccaccatcgccaacaacctcacctccaccgtccaagtgtttacggacgacgactaccagctgccctacgtcgtcggcaacgggaccgagggatgcctgccggccttccctccgcaggtctttacgctgccgcagtacggttacgcgacgctgaaccgcgacaacacagaaaatcccaccgagaggagcagcttcttctgcctagagtactttcccagcaagatgctgagaacgggcaacaactttgagtttacctacaactttgaggaggtgcccttccactccagcttcgctcccagtcagaacctcttcaagctggccaacccgctggtggaccagtacttgtaccgcttcgtgagcacaaataacactggcggagtccagttcaacaagaacctggccgggagatacgccaacacctacaaaaactggttcccggggcccatgggccgaacccagggctggaacctgggctccggggtcaaccgcgccagtgtcagcgccttcgccacgaccaataggatggagctcgagggcgcgagttaccaggtgcccccgcagccgaacggcatgaccaacaacctccagggcagcaacacctatgccctggagaacactatgatcttcaacagccagccggcgaacccgggcaccaccgccacgtacctcgagggcaacatgctcatcaccagcgagagcgagacgcagccggtgaaccgcgtggcgtacagcgtcggcgggcagatggccaccaacaaccagagctccaccactgcccccacgaccggcacgtacaacctccaggaaatcgtgcccggcagcgtgtggatggagagggacgtgtacctccaaggacccatctgggccaagatcccagagacgggggcgcactttcacccctctccggccatgggcggattcagactcaaacacccaccgcccatgatgctcatcaagaacacgcctgtgcccggaaatatcaccagcttctcggacgtgcccgtcagcagcttcatcacccagtacagcaccgggcaggtcaccgtggagatggagtgggagctcaagaaggaaaactccaagaggtggaacccagagatccagtacacaaacaactacaacgacccccagtttgtggactttgccccggacagcaccggggaatacagaaccaccagacctatcggaacccgataccttacccgacccctttaa

SEQ ID NO: 799 - DNA, 2175 bp, synthetic construct
  misc_feature 1..2175: note = Description of Artificial Sequence: Synthetic polynucleotide
  source 1..2175: mol_type = other DNA
atgtcttttgttgatcaccctccagattggttggaagaagttggtgaaggtcttcgcgagtttttgggccttgaagcgggcccaccgaaaccaaaacccaatcagcagcatcaagatcaagcccgtggtcttgtgctgcctggttataactatctcggacccggaaacggtctcgatcgaggagagcctgtcaacagggcagacgaggtcgcgcgagagcacgacatctcgtacaacgagcagcttgaggcgggagacaacccctacctcaagtacaaccacgcggacgccgagtttcaggagaagctcgccgacgacacatccttcgggggaaacctcggaaaggcagtctttcaggccaagaaaagggttctcgaaccttttggcctggttgaagagggtgctaagacggcccctaccggaaagcggatagacgaccactttccaaaaagaaagaaggcccggaccgaagaggactccaagccttccacctcgtcagacgccgaagctggacccagcggatcccagcagctgcaaatcccagcccaaccagcctcaagtttgggagctgatacaatgtctgcgggaggtggcggcccattgggcgacaataaccaaggtgccgatggagtgggcaatgcctcgggagattggcattgcgattccacgtggatgggggacagagtcgtcaccaagtccacccgaacctgggtgctgcccagctacaacaaccaccagtaccgagagatcaaaagcggctccgtcgacggaagcaacgccaacgcctactttggatacagcaccccctgggggtactttgactttaaccgcttccacagccactggagcccccgagactggcaaagactcatcaacaactactggggcttcagaccccggtccctcagagtcaaaatcttcaacattcaagtcaaagaggtcacggtgcaggactccaccaccaccatcgccaacaacctcacctccaccgtccaagtgtttacggacgacgactaccagctgccctacgtcgtcggcaacgggaccgagggatgcctgccggccttccctccgcaggtctttacgctgccgcagtacggttacgcgacgctgaaccgcgacaacacagaaaatcccaccgagaggagcagcttcttctgcctagagtactttcccagcaagatgctgagaacgggcaacaactttgagtttacctacaactttgaggaggtgcccttccactccagcttcgctcccagtcagaacctcttcaagctggccaacccgctggtggaccagtacttgtaccgcttcgtgagcacaaataacactggcggagtccagttcaacaagaacctggccgggagatacgccaacacctacaaaaactggttcccggggcccatgggccgaacccagggctggaacctgggctccggggtcaaccgcgccagtgtcagcgccttcgccgcgaccaataggatggagctcgagggcgcgagttaccaggtgcccccgcagccgaacggcatgaccaacaacctccagggcagcaacacctatgccctggagaacactatgatcttcaacagccagccggcgaacccgggcaccaccgccacgtacctcgagggcaacatgctcatcaccagcgagagcgagacgcagccggtgaaccgcgtggcgtacaacgtcggcgggcagatggccaccaacaaccagagctccaccactgcccccgcgaccggcacgtacaacctccaggaaatcgtgcccggcggcgtgtggatggagagggacgtgtacctccaaggacccatctgggccaagatcccagagacgggggcgcactttcacccctctccggccatgggcggattcggactcaaacacccaccgcccatgatgctcatcaagaacacgcctgtgcccggaaataccaccagcttctcggacgtgcccgtcagcagcttcatcacccagtacagcaccgggcaggtcaccgtggagatggagtgggagctcaagaaggaaaactccaagaggtggaacccagagatccagtacacaaacaactacaacgacccccagtttgtggactttgccccggacagcaccggggaatacagaaccaccagacctatcggaacccgataccttacccgacccctttaa

SEQ ID NO: 800 - DNA, 2175 bp, synthetic construct
  misc_feature 1..2175: note = Description of Artificial Sequence: Synthetic polynucleotide
  source 1..2175: mol_type = other DNA
atgtcttttgttgatcaccctccagattggttggaagaagttggtgaaggtcttcgcgagtttttgggccttgaagcgggcccaccgaaaccaaaacccaatcagcagcatcaagatcaagcccgtggtcttgtgctgcctggttataactatctcggacccggaaacggtctcgatcgaggagagcctgtcaacagggcagacgaggtcgcgcgagagcacgacatctcgtacaacgagcagcttgaggcgggagacaacccctacctcaagtacaaccacgcggacgccgagtttcaggagaagctcgccgacgacacatccttcgggggaaacctcggaaaggtagtctttcaggccaagaaaagggttctcgaaccttttggcctggttgaagagggtgctaagacggcccctaccggaaagcggatagacgaccactttccaaaaagaaagaaggcccggaccgaagaggactccaagccttccacctcgtcagacgccgaagctggacccagcggatcccagcagctgcaaatcccagcccaaccagcctcaagtttgggagctgatacaatgtctgcgggaggtggcggcccattgggcggcaataaccaaggtgccgatggagtgggcaatgcctcgggagattggcattgcgattccacgtggatgggggacagagtcgtcaccaagtccacccgaacctgggtgctgcccagctacaacaaccaccagtaccgagagatcaaaagcggctccgtcgacggaagcaacgccaacgcctactttggatacagcaccccctgggggtactttgactttaaccgcttccacagccactggggcccccgagactggcaaagactcatcaacaactactggggcttcagaccccggtccctcagagtcaaaatcttcaacattcaagtcaaagaggtcacggtgcaggactccaccaccaccatcgccaacaacctcacctccaccgtccaagtgtttacggacgacgactaccagctgccctacgtcgtcggcaacgggaccgagggatgcctgccggccttccctccgcaggtctttacgctgccgcagtacggttacgcgacgctgaaccgcgacaacacagaaaatcccaccgagaggagcagcttcttctgcctagagtactttcccagcaagatgctgagaacgggcaacaactttgagtttacctacaactttgaggaggtgcccttccactccagcttcgctcccagtcagaacctcttcaagctggccaacccgctggtggaccagtacttgtaccgcttcgtgagcacaaataacactggcggagtccagttcaacaagaacctggccgggagatacgccaacacctacaaaaactggttcccggggcccatgggccgaacccagggctggaacctgggctccggggtcaaccgcgccagtgtcagcgccctcgccacgaccaataggatggagctcgagggcgcgagttaccaggtgcccccgcagccgaacggcatgaccaacaacctccagggcagcaacacctatgccctggagaacactatgatcttcaacagccagccggcgaacccgggcaccaccgccacgtacctcgagggcaacatgctcatcaccagcgagagcgagacgcagccggtgaaccgcgtggcgtacaacgtcggcgggcagatggccaccaacaaccagagctccaccactgcccccgcgaccggcacgtacaacctccaggaaatcgtgcccggcagcgtgtggatggagagggacgtgtacctccaaggacccatctgggccaagatcccagagacgggggcgcactttcacccctctccggccatgggcggattcggactcaaacacccaccgcccatgatgctcatcaagaacacgcctgtgcccggaaatatcaccagcttctcggacgtgcccgtcagcagcttcatcacccagtacagcaccgggcaggtcaccgtggagatggagtgggagctcaagaaggaaaactccaagaggtggaacccagagatccagtacacaaacaactacaacgacccccagtttgtggactttgccccggacagcaccggggaatacagaaccaccagacctatcggaacccgataccttacccgacccctttaa

SEQ ID NO: 801 - DNA, 2175 bp, synthetic construct
  misc_feature 1..2175: note = Description of Artificial Sequence: Synthetic polynucleotide
  source 1..2175: mol_type = other DNA
atgtcttttgttgatcaccctccagattggttggaagaagttggtgaaggtcttcgcgagtttttgggccttgaagcgggcccaccgaaaccaaaacccaatcagcagcatcaagatcaagcccgtggtcttgtgctgcctggttataactatctcggacccggaaacggtctcgatcgaggagagcctgtcaacagggcagacgaggtcgcgcgagagcacgacatctcgtacaacgagcagcttgaggcgggagacaacccctacctcaagtacaaccacgcggacgccgagtttcaggagaagctcgccgacgacacatccttcgggggaaacctcggaaaggcagtctttcaggccaagaaaagggttctcgaaccttttggcctggttgaagagggtgctaagacggcccctaccggaaagcggatagacgaccactttccaaaaagaaagaaggcccggaccgaagaggactccaagccttccacctcgtcagacgccgaagctggacccagcggatcccagcagctgcaaatcccagcccaaccagcctcaagtttgggagctgatacaatgtctgcgggaggtggcggcccattgggcgacaataaccaaggtgccgatggagtgggcaatgcctcgggagattggcattgcgattccacgtggatgggggacagagtcgtcaccaagtccacccgaacctgggtgctgcccagctacaacaaccaccagtaccgagagatcaaaagcggctccgtcgacggaagcaacgccaacgcctactttggatacagcaccccctgggggtactttgactttaaccgcttccacagccactggagcccccgagactggcaaagactcatcaacaactactggggcttcagaccccggtccctcagagtcaaaatcttcaacattcaagtcaaagaggtcacggtgcaggactccaccaccaccatcgccaacaacctcacctccaccgtccaagtgtttacggacgacgactaccagctgccctacgtcgtcggcaacgggaccgagggatgcctgccggccttccctccgcaggtctttacgctgccgcagtacggttacgcgacgctgaaccgcgacaacacagaaaatcccaccgagaggagcagcttcttctgcctagagtactttcccagcaagatgctgagaacgggcaacaactttgagtttacctacaactttgaggaggtgcccttccactccagcttcgctcccagtcagaacctcttcaagctggccaacccgctggtggaccagtacttgtaccgcttcgtgagcacaaataacactggcggagtccagttcaacaagaacctggccgggagatacgccaacacctacaaaaactggttcccggggcccatgggccgaacccagggctggaacctgggctccggggtcaaccgcgccagtgtcagcgccttcgccacgaccaataggatggagctcgagggcgcgagttaccaggtgcccccgcagccgaacggcatgaccaacaacctccagggcagcaacacctatgccctggagaacactatgatcttcaacagccagccggcgaacccgggcaccaccgccacgtacctcgagggcaacatgctcatcaccagcgagagcgagacgcagccggtgaaccgcgtggcgtacaacgtcggcgggcagatggccaccaacaaccagagctccaccactgcccccgcgaccggcacgtacaacctccaggaaatcgtgcccggcagcgtgtggatggagagggacgtgtacctccaaggacccatctgagccaagatcccagagacgggggcgcactttcacccctctccggccatgggcggattcggactcaaacacccaccgcccatgatgctcatcaagaacacgcctgtgcccggaaatatcaccagcttctcggacgtgcccgtcagcagcttcatcacccagtacagcaccgggcaggtcaccgtggagatggagtgggagctcaagaaggaaaactccaagaggtggaacccagagatccagtacacaaacaactacaacgacccccagtttgtggactttgccccggacagcaccggggaatgcagaaccaccagacctatcggaacccgataccttacccgacccctttaa

SEQ ID NO: 802 - DNA, 2175 bp, synthetic construct
  misc_feature 1..2175: note = Description of Artificial Sequence: Synthetic polynucleotide
  source 1..2175: mol_type = other DNA
atgtcttttgttgatcaccctccagattggttggaagaagttggtgaaggtcttcgcgagtttttgggccttgaagcgggcccaccgaaaccaaaacccaatcagcagcatcaagatcaagcccgtggtcttgtgctgcctggttataactatctcggacccggaaacggtctcgatcgaggagagcctgtcaacagggcagacgaggtcgcgcgagagcacgacatctcgtacaacgagcagcttgaggcgggagacaacccctacctcaagtacaaccacgcggacgccgagtttcaggagaagctcgccgacgacacatccttcgggggaaacctcggaaaggcagtctttcaggccaagaaaagggttctcgaaccttttggcctggttgaagagggtgctaagacggcccctaccggaaagcggatagacgaccactttccaaaaagaaagaaggcccggaccgaagaggactccaagccttccacctcgtcagacgccgaagctggacccagcggatcccagcagctgcaaatcccagcccaaccagcctcaagtttgggagctgatacaatgtctgcgggaggtggcggcccattgggcgacaataaccaaggtgccgatggagtgggcaatgcctcgggagattggcattgcgattccacgtggatgggggacagagtcgtcaccaagtccacccgaacctgggtgctgcccagctacaacaaccaccagtaccgagagatcaaaagcggctccgtcgacggaagcaacgccaacgcctactttggatacagcaccccctgggggtactttgactttaaccgcttccacagccactggagcccccgagactggcaaagactcatcaacaactactggggcttcagaccccggtccctcagagtcaaaatcctcaacattcaagtcaaagaggtcacggtgcaggactccaccaccaccatcgccaacaacctcacctccaccgtccaagtgtttacggacgacgactaccagctgccctacgtcgtcggcaacgggaccgagggatgcctgccggccttccctccgcaggtctttacgctgccgcagtacggttacgcgacgctgaaccgcgacaacacagaaaatcccaccgagaggagcagcttcttctgcctagagtactttcccagcaagatgctgagaacgggcaacaactttgagtttacctacaactttgaggaggtgcccttccactccagcttcgctcccagtcagaacctcttcaagctggccaacccgctggtgggccagtacttgtaccgcttcgtgagcacaaataacactggcggagtccagttcaacgagaacctggccgggagatacgccaacacctacaaaaactggttcccggggcccatgggccgaacccagggctggaacctgggctccggggtcaaccgcgccagtgtcagcgccttcgccacgaccaataggatggagctcgagggcgcgagttaccaggtgcccccgcagccgaacggcatgaccaacaacctccagggcagcaacacctatgccctggagaacactatgatcttcaacagccagccggcgaacccgggcaccaccgccacgtacctcgagggcaacatgctcatcaccagcgagagcgagacgcagccggtgaaccgcgtggcgtacaacgtcggcgggcagatggccaccaacaaccagagctccaccactgcccccgcgaccggcacgtacaacctccaggaaatcgtgcccggcagcgtgtggatggagagggacgtgtacctccaaggacccatctgggccaagatcccagagacgggggcgcactttcacccctctccggccatgggcggattcggactcaaacacccaccgcccatgatgctcatcaagaacacgcctgtgcccggaaatatcaccagcttctcggacgtgcccgtcagcagcttcatcacccagtacagcaccgggcaggccaccgtggagatggagtgggagctcaagaaggaaaactccaagaggtggaacccagagatccagtacacaaacaactacaacgacccccagtttgtggactttgccccggacagcaccggggaatacagaaccaccagacctatcggaacccgataccttacccgacccctttaa

SEQ ID NO: 803 - DNA, 2175 bp, synthetic construct
  misc_feature 1..2175: note = Description of Artificial Sequence: Synthetic polynucleotide
  source 1..2175: mol_type = other DNA
atgtcttttgttgatcaccctccagattggttggaagaagttggtgaaggtcttcgcgagtttttgggccttgaagcgggcccaccgaaaccaaaacccaatcagcagcatcaagatcaagcccgtggtcttgtgctgcctggttataactatctcggacccggaaacggcctcgatcgaggagagcctgtcaacagggcagacgaggtcgcgcgagagcacgacatctcgtacaacgagcagcttgaggcgggagacaacccctacctcaagtacaaccacgcggacgccgagtttcaggagaagctcgccgacgacacatccttcgggggaaacctcggaaaggcagtctttcaggccaagaaaagggttctcgaaccttttggcctggttgaagagggtgctaagacggcccctaccggaaagcggatagacgaccactttccaaaaagaaagaaggcccggaccgaagaggactccaagccttccacctcgtcagacgccgaagctggacccagcggatcccagcagctgcaaatcccagcccaaccagcctcaagtttgggagctgatacaatgtctgcgggaggtggcggcccattgggcgacaataaccaaggtgccgatggagtgggcaatgcctcgggagattggcattgcgattccacgtggatgggggacagagtcgtcaccaagtccacccgaacctgggtgctgcccagctacaacaaccaccagtaccgagagatcaaaagcggctccgtcgacggaagcaacgccaacgcctactttggatacagcaccccctgggggtactttgactttaaccgcttccacagccactggagcccccgagactggcaaagactcatcaacaactactggggcttcagaccccggtccctcagagtcaaaatcttcaacattcaagtcaaagaggtcacggtgcaggactccaccaccatcatcgccaacaacctcacctccaccgtccaagtgtttacggacgacgactaccagctgccctacgtcgtcggcaacgggaccgagggatgcctgccggccttccctccgcaggtctttacgctgccgcagtacggttacgcgacgctgaaccgcgacaacacagaaaatcccaccgagaggagcagcttcttctgcctagagtactttcccagcaagatgctgagaacgggcaacaactttgagtttacctacaactttgaggaggtgcccttccactccagcttcgcccccagtcagaacctcttcaagctggccaacccgctggtggaccagtacttgtaccgcttcgtgagcacaaataacactggcggagtccagttcaacaagaacctggccgggagatacgccaacacctacaaaaactggttcccggggcccatgggccgaacccagggctggaacctgggctccggggtcaaccgcgccagtgtcagcgccttcgccacgaccaataggatggagctcgagggcgcgagttaccaggtgcccccgcagccgaacggcatgaccaacaacctccagggcagcaacacctatgccctggagaacactatgatcttcaacagccagccggcgaacccgggcaccaccgccacgtacctcgagggcaacatgctcatcaccagcgagagcgagacgcagccggtgaaccgcgtggcgtacaacgtcggcgggcagatggccaccaacaaccagagctccaccactgcccccgcgaccggcacgtacaacctccaggaaatcgtgcccggcagcgtgtggatggagagggacgtgtacctccaaggacccatctgggccaagatcccagagacgggggcgcactttcacccctctccggccatgggcggattcggactcaaacacccaccgcccatgatgctcatcaagaacacgcctgtgcccggaaatatcaccagcttctcggacgtgcccgtcagcagcttcatcacccagtacagcaccgggcaggtcaccgtggagatggagtgggagctcaagaaggaaaactccaagaggtggaacccagagatccagtacacaaacaactacaacgacccccagtttgtggactttgccccggacagcaccggggaatacagaaccaccagacctatcggaacccgataccttacccgacccctttaa

SEQ ID NO: 804 - DNA, 2175 bp, synthetic construct
  misc_feature 1..2175: note = Description of Artificial Sequence: Synthetic polynucleotide
  source 1..2175: mol_type = other DNA
atgtcttttgttgatcaccctccagattggttggaagaagttggtgaaggtcttcgcgagtttttgggccttgaagcgggcccaccgaaaccaaaacccaatcagcagcatcaagatcaagcccgtggtcttgtgctgcctggttataactatctcggacccggaaacggtctcgatcgaggagagcctgtcaacagggcagacgaggtcgcgcgagagcacgacatctcgtacaacgagcagcttgaggcgggagacaacccctacctcaagtacaaccacgcggacgccgagtttcaggagaagctcgccgacgacacatccttcgggggaaacctcggaaaggcagtctttcaggccaagaaaagggttctcgaaccttttggcctggttgaagagggtgctaagacggcccctaccggaaagcggatagacgaccactttccaaaaagaaagaaggcccggaccgaagaggactccaagccttccacctcgtcagacgccgaagctggacccagcggatcccagcagctgcaaatcccagcccaaccagcctcaagtttgggagctgatacaatgtctgcgggaggtggcggcccattgggcgacaataaccaaggtgccgatggagtgggcaatgcctcgggagattggcattgcgattccacgtggatgggggacagagtcgtcaccaagtccacccgaacctgggtgctgcccagctacaacaaccaccagtaccgagagatcaaaagcggctccgtcgacggaagcaacgccaacgcctactttggatacagcaccccctgggggtactttgactttaaccgcttccacagccactggagcccccgagactggcaaagactcatcaacaactactggggcttcagaccccggtccctcagagtcaaaatcttcaacattcaagtcaaagaggtcacggtgcaggactccaccaccaccatcgccaacaacctcacctccaccgtccaagtgtttacggacgacgactaccagctgccctacgtcgtcggcaacgggaccgagggatgcctgccggccttccctccgcaggtctttacgctgccgcagtacggttacgcgacgctgaaccgcgacaacacagaaaatcccaccgagaggagcagcttcttctgcctagagtactttcccagcaagatgctgagaacgggcaacaactttgagtttacctacaactttgaggaggtgcccttccactccagcttcgctcccagtcagaacctcttcaagctggccaacccgctggtggaccagtacttgtaccgcttcgtgagcacaaataacactggcggagtccagttcaacaagaacctggccgggagatacgccaacacctacaaaaactggttcccggggcccatgggccgaacccagggctggaacctgggctccggggtcaaccgcgccagtgtcagcgccttcgccacgaccaataggatggagctcgagggcgcgagttaccaggtgcccccgcagccgaacggcatgaccaacaacctccagggcagcaacacctatgccctggagaacactatgatcttcaacagccagccggcgaacccgggcaccaccgccacgtacctcgagggcaacatgctcatcaccagcgagagcgagacgcagccggtgaaccgcgtggcgtacaacgtcggcgggcagatggccaccaacaaccagagctccaccactgcccccgcgaccggcacgtacaacctccaggaaatcgtgcccggcagcgtgtggatggagagggacgtgtacctccaaggacccatctgggccaagatcccagagacgggggcgcactttcacccctctccggccatgggcggattcggactcaaacacccaccgcccatgatgctcatcaagaacacgcctgtgcccggaaatatcaccagcctctcggacgtgcccgtcagcagcttcatcacccagtacagcaccgggcaggtcaccgtggagatggagtgggagctcaagaaggaaaactccaagaggtggaacccagagatccagtacacaaacaactacaacgacccccagtttgtggactttgccccggacagcaccggggaatacagaaccaccagacctatcggaacccgataccttacccgacccctttaa

SEQ ID NO: 805 - DNA, 2175 bp, synthetic construct
  misc_feature 1..2175: note = Description of Artificial Sequence: Synthetic polynucleotide
  source 1..2175: mol_type = other DNA
atgtcttttgttgatcaccctccagattggttggaagaagttggtgaaggtcttcgcgagtttttgggccttgaagcgggcccaccgaaaccaaaacccaatcagcagcatcaagatcaagcccgtggtcttgtgctgcctggttataactatctcggacccggaaacggtctcgatcgaggagagcctgccaacagggcagacgaggtcgcgcgagagcacgacatctcgtacaacgagcagcttgaggcgggagacaacccctacctcaagtacaaccacgcgggcgccgagtttcaggagaagctcgccgacgacacatccttcgggggaaacctcggaaaggcagtctttcaggccaagaaaagggttctcgaaccttttggcctggttgaagagggtgctaagacggcccctaccggaaagcggatagacgaccactttccaaaaagaaagaaggcccggaccgaagaggactccaagccttccacctcgtcagacgccgaagctggacccagcggatcccagcagctgcaaatcccagcccaaccagcctcaagtttgggagctgatacaatgtctgcgggaggtggcggcccattgggcgacaataaccaaggtgccgatggagtgggcaatgcctcgggagattggcattgcgattccacgtggatgggggacagagtcgtcaccaagtccacccgaacctgggtgctgcccggctacaacaaccaccagtaccgagagatcaaaagcggctccgtcgacggaagcaacgccaacgcctactttggatacagcaccccctgggggtactttgactttaaccgcttccacagccactggagcccccgagactggcaaagactcatcaacaactactggggcttcagaccccggtccctcagagtcaaaatcttcaacattcaagtcaaagaggtcacggtgcaggactccaccaccaccatcgccaacaacctcacctccaccgtccaagtgtttacggacgacgactaccagctgccctacgtcgtcggcaacgggaccgagggatgcctgccggccttccctccgcaggtctttacgctgccgcagtacggttacgcgacgctgaaccgcgacaacacagaaaatcccaccgagaggagcagcttcttctgcctagagtactttcccagcaagatgctgagaacgggcaacaactttgagtttacctacaactttgaggaggtgcccttccactccagcttcgctcccagtcagaacctcttcaagctggccaacccgctggtggaccagtacttgtaccgcttcgtgagcacaaataatactggcggagtccagttcaacaagaacctggccgggagatacgccaacacctacaaaaactggttcccggggcccatgggccgaacccagggctggaacctgggctccggggtcaaccgcgccagtgtcagcgccttcgccacgaccaataggatggagctcgagggcgcgagttaccaggtgcccccgcagccgaacggcatgaccaacaacctccagggcagcaacacctatgccctggagaacactatgatcttcaacagccagccggcgaacccgggcaccaccgccacgtacctcgagggcaacatgctcatcaccagcgagagcgagacgcagccggtgaaccgcgtggcgtacaacgtcggcgggcagatggccaccaacaaccagagctccaccactgcccccgcgaccggcacgtacaacctccaggaaatcgtgcccggcagcgtgtggatggagagggacgtgtacctccaaggacccatctgggccaagatcccagagacgggggcgcactttcacccctctccggccatgggcggattcggactcaaacacccaccgcccatgatgctcatcaagaacacgcctgtgcccggaaatatcaccagcttctcggacgtgcccgtcagcagcttcatcacccagtacagcaccgggcaggtcaccgtggagatggagtgggagctcaagaaggaaaactccaagaggtggaacccagagatccagtacacaaacaactacaacgacccccagtttgtggactttgccccggacagcaccggggaatacagaaccaccagacctatcggaacccgataccttacccgacccctttaa

SEQ ID NO: 806 - DNA, 2175 bp, synthetic construct
  misc_feature 1..2175: note = Description of Artificial Sequence: Synthetic polynucleotide
  source 1..2175: mol_type = other DNA
atgtcttttgttgatcaccctccagattggttggaagaagttggtgaaggtcttcgcgagtttttgggccttgaagcgggcccaccgaaaccaaaacccaatcagcagcatcaagatcaagcccgtggtcttgtgctgcctggttataactatctcggacccggaaacggtctcgatcgaggagagcctgtcaacagggcagacgaggtcgcgcgagagcacgacatctcgtacaacgagcagcttgaggcgggagacaacccctacctcaagtacaaccacgcggacgccgagtttcaggagaagctcgccgacgacacatccttcgggggaaacctcggaaaggcagtctttcaggccaagaaaagggttctcgaaccttttggcctggttgaagagggtgctaagacggcccctaccggaaagcggatagacgaccactttccaaaaagaaagaaggcccggaccgaagaggactccaagcctcccacctcgtcagacgccgaagctggacccagcggatcccagcagctgcaaatcccagcccaaccagcctcaagtttgggagctgatacaatgtctgcgggaggtggcggcccattgggcgacaataaccaaggtgccgatggagtgggcaatgcctcgggagattggcattgcgattccacgtggatgggggacagagtcgtcaccaagtccacccgaacctgggtgctgcccagctacaacaaccaccagtaccgagagatcaaaagcggctccgtcgacggaagcaacgccaacgcctactttggatacagcaccccctgggggtactttgactttaaccgcttccacagccactggagcccccgagactggcaaagactcatcaacaactactggggcttcagaccccggtccctcagagtcaaaatcttcaacattcaagtcaaagaggtcacggtgcaggactccgccaccaccatcgccaacaacctcacctccaccgtccaagtgtttacggacgacgactaccagctgccctacgtcgtcggcaacgggaccgagggatgcctgccggccttccctccgcaggtctttacgctgccgcagtacggttacgcgacgctgaaccgcgacaacacagaaaatcccaccgagaggagcagcttcttctgcctagagtactttcccagcaagatgctgagaacgggcaacaactttgagtttacctacaactttgaggaggtgcccttccactccagcttcgctcccagtcagaacctcttcaagctggccaacccgctggtggaccagtacttgtaccgcttcgtgagcacaaataacactggcggagtccagttcaacaagaacctggccgggagatacgccaacacctacaaaaactggttcccggggcccatgggccgaacccagggctggaacctgggctccggggtcaaccgcgccagtgtcagcgccttcgccacgaccaataggatggagctcgagggcgcgagttaccaggtgcccccgcagccgaacggcatgaccaacaacctccagggcagcaacacctatgccctggagaacactatgatcttcaacagccagccggcgaacccgggcaccaccgccacgtacctcgagggcaacatgctcatcaccagcgagagcgagacgcagccggtgaaccgcgtggcgtacaacgtcggcgggcagatggccaccaacaaccagagctccaccactgcccccgcgaccggcacgtacaacctccaggaaatcgtgcccggcagcgtgtggatggagagggacgtgtacctccaaggacccatctgggccaagatcccagagacgggggcgcactttcacccctctccggccatgggcggattcggactcaaacacccaccgcccatgatgctcatcaagaacacgcctgtgcccggaaatatcaccagcttctcggacgtgcccgtcagcagcttcatcacccagtacagcaccgggcaggtcaccgtggagatggagtgggagctcaagaaggaaaactccaagaggtggaacccagagatccagtacacaaacaactacaacgacccccagtttgtggactttgccccggacagcaccggggaatacagaaccaccagacctatcggaacccgataccttacccgacccctttaa

SEQ ID NO: 807 - DNA, 2175 bp, synthetic construct
  misc_feature 1..2175: note = Description of Artificial Sequence: Synthetic polynucleotide
  source 1..2175: mol_type = other DNA
atgtcttttgttgatcaccctccagattggttggaagaagttggtgaaggtcttcgcgagtttttgggccttgaagcgggcccaccgaaaccaaaacccaatcagcagcatcaagatcaagcccgtggtcttgtgctgcctggttataactatctcggacccggaaacggtctcgatcgaggagagcctgtcaacagggcagacgaggtcgcgcgagagcacgacatctcgtacaacgagcagcttgaggcgggagacaacccctacctcaagtacaaccacgcggacgccgagtttcaggagaagctcgccgacgacacatccttcgggggaaacctcggaaaggcagtctttcaggccaagaaaagggttctcgaaccttttggcctggttgaagagggtgctaagacggcccctaccggaaagcggatagacgaccactttccaaaaagaaagaaggcccggaccgaagaggactccaagccttccacctcgtcagacgccgaagctggacccagcggatcccagcagccgcaaatcccagcccaaccagcctcaagtttgggagctgatacaatgtctgcgggaggtggcggcccattgggcgacaataaccaaggtgccgatggagtgggcaatgcctcgggagattggcattgcgattccacgtggatgggggacagagtcgtcaccaagtccacccgaacctgggtgctgcccagctacaacaaccaccagtaccgagagatcaaaagcggctccgtcgacggaagcaacgccaacgcctactttggatacagcaccccctgggggtactttgactttaaccgcttccacagccactggagcccccgagactggcaaagactcatcaacaactactggggcttcagaccccggtccctcagagtcaaaatcttcaacattcaagtcaaagaggtcacggtgcaggactccaccaccaccatcgccaacaacctcacctccaccgtccaagtgtttacggacgacgactaccagctgccctacgtcgtcggcaacgggaccgagggatgcctgccggccttccctccgcaggtctttacgctgccgcagtacggttacgcgacgctgaaccgcgacaacacagaaaatcccaccgagaggagcagcttcttctgcctagagtactttcccagcaagatgctgagaacgggcaacaactttgagtttacctacaactttgaggaggtgcccttccactccagcttcgctcccagtcagaacctcttcaagctggccaacccgctggtggaccagtacttgtaccgcttcgtgagcacaaataacactggcggagtccagttcaacaagaacctggccgggagatacgccaacacctacaaaaactggttcccggggcccatgggccgaacccagggctggaacctgggctccggggtcaaccgcgccagtgtcagcgccttcgccacgaccaataggatggagctcgagggcgcgagttaccaggtgcccccgcagccgaacggcatgaccaacaacctccagggcagcaacacctatgccctggagaacactatgatcttcaacagccagccggcgaacccgggcaccaccgccacgtacctcgagggcaacatgctcatcaccagcgagagcgagacgcagccggtgaaccgcgtggcgtacaacgtcggcgggcagatggccaccaacaaccagagctccaccactgcccccgcgaccggcacgtacaacctccaggaaatcgtgcccggcagcgtgtggatggagagggacgtgtacctccaaggacccatctgggccaagatcccagagacgggggcgcactttcacccctctccggccatgggcggattcggactcaaacacccaccgcccatgatgctcatcaagaacacgcctgcgcccggaaatatcaccagcttctcggacgtgcccgtcagcagcttcatcacccagtacagcaccgggcaggtcaccgtggagatggagtgggagctcaagaaggaaaactccaagaggtggaacccagagatccagtacacaaacaactacaacgacccccagtttgtggactttgccccggacagcaccggggaatacagaaccaccagacctatcggaacccgataccttacccgacccctttaa

SEQ ID NO: 808 - DNA, 2175 bp, synthetic construct
  misc_feature 1..2175: note = Description of Artificial Sequence: Synthetic polynucleotide
  source 1..2175: mol_type = other DNA
atgtcttttgttgatcaccctccagattggttggaagaagttggtgaaggtcttcgcgagtttttgggccttgaagcgggcccaccgaaaccaaaacccaatcagcagcatcaagatcaagcccgtggtcttgtgctgcctggttataactatctcggacccggaaacggtctcgatcgaggagagcctgtcaacagggcagacgaggtcgcgcgagagcacgacatctcgtacaacgagcagcttgaggcgggagacaacccctacctcaagtacaaccacgcggacgccgagtttcaggagaagctcgccgacgacacatccttcgggggaaacctcggaaaggcagtctttcaggccaagaaaagggttctcgaaccttttggcctggttgaagagggtgctaagacggcccctaccggaaagcggatagacgaccactttccaaaaagaaagaaggcccggaccgaagaggactccaagcctcccacctcgtcagacgccgaagctggacccagcggatcccagcagctgcaaatcccagcccaaccagcctcaagtttgggagctgatacaatgtctgcgggaggtggcggcccattgggcgacaataaccaaggtgccgatggagtgggcaatgcctcgggagattggcattgcgattccacgtggatgggggacagagtcgtcaccaagtccacccgaacctgggtgctgcccagctacaacaaccaccagtaccgagagatcaaaagcggctccgtcgacggaagcaacgccaacgcctactttggatacagcaccccctgggggtactttgactttaaccgcttccacagccactggagcccccgagactggcaaagactcatcaacaactactggggcttcagaccccggtccctcagagtcaaaatcttcaacattcaagtcaaagaggtcacggtgcaggactccaccaccaccatcgccaacaacctcacctccaccgtccaagtgtttacggacgacgactaccagctgccctacgtcgtcggcaacgggaccgagggatgcctgccggccttccctccgcaggtctttacgctgccgcagtacggttacgcgacgctgaaccgcgacaacacagaaaatcccaccgagaggagcagcttcttctgcctagagtactttcccagcaagatgctgagaacgggcaacaactttgagtttacctacaactttgaggaggtgcccttccactccagcttcgctcccagtcagaacctcttcaagctggccaacccgctggtggaccagtacttgtaccgcttcgtgagcacaaataacactggcggagtccagttcaacaagaacctggccgggagatacgccaacacctacaaaaactggttcccggggcccatgggccgaacccagggctggaacctgggctccggggtcaaccgcgccagtgtcagcgccttcgccacgaccaataggatggagctcgagggcgcgagttaccaggtgcccccgcagccgaacggcatgaccaacaacctccagggcagcaacacctatgccctggagaacactatgatcttcaacagccagccggcgaacccgggcaccaccgccacgtacctcgagggcaacatgctcatcaccagcgagagcgagacgcagccggtgaaccgcgtggcgtacaacgtcggcgggcagatggccaccaacaaccagagctccaccactgcccccgcgaccggcacgtacaacctccaggaaatcgtgcccggcagcgtgtggatggagagggacgtgtacctccaaggacccatctgggccaagatcccagagacgggggcgcactttcacccctctccggccatgggcggattcggactcaaacacccaccgcccatgatgctcatcaagaacacgcctgtgcccggaaatatcaccagcttctcggacgtgcccgtcagcagcttcatcacccagtacagcaccgggcaggtcaccgtggagatggagtgggagctcaagaaggaaaactccaagaggtggaacccagagatccagtacacaaacaactacaacgacccccagtttgtggactttgccccggacagcaccggggaatacagaaccaccagacctatcggaacccgataccttacccgacccctttaa

SEQ ID NO: 809 - DNA, 2175 bp, synthetic construct
  misc_feature 1..2175: note = Description of Artificial Sequence: Synthetic polynucleotide
  source 1..2175: mol_type = other DNA
atgtcttttgttgatcaccctccagattggttggaagaagttggtgaaggtcttcgcgagtttttgggccttgaagcgggcccaccgaaaccaaaacccaatcagcagcatcaagatcaagcccgtggtcttgtgctgcctggttataactatctcggacccggaaacggtctcgatcgaggagagcctgtcaacagggcagacgaggtcgcgcgagagcacgacatctcgtacaacgagcagcttgaggcgggagacaacccctacctcaagtacaaccacgcggacgccgagtttcaggagaagctcgccgacgacacatccttcgggggaaacctcggaaaggcagtctttcaggccaagaaaagggttctcgaaccttttggcctggttgaagagggtgctaagacggcccctaccggaaagcggatagacgaccactttccaaaaagaaagaaggcccggaccgaagaggactccaagcctcccacctcgtcagacgccgaagctggacccagcggatcccagcagctgcaaatcccagcccaaccagcctcaagtttgggagctgatacaatgtctgcgggaggtggcggcccattgggcgacaataaccaaggtgccgatggagtgggcaatgcctcgggagattggcattgcgattccacgtggatgggggacagagtcgtcaccaagtccacccgaacctgggtgccgcccagctacaacaaccaccagtaccgagagatcaaaagcggctccgtcgacggaagcaacgccaacgcctactttggatacagcaccccctgggggtactttgactttaaccgcttccacagccactggagcccccgagactggcaaagactcatcaacaactactggggcttcagaccccggtccctcagagtcaaaatcttcaacattcaagtcaaagaggtcacggtgcaggactccaccaccaccatcgccaacaacctcacctccaccgtccaagtgtttacggacgacgactaccagctgccctacgtcgtcggcaacgggaccgagggatgcctgccggccttccctccgcaggtctttacgctgccgcagtacggttacgcgacgctgaaccgcgacaacacagaaaatcccaccgagaggagcagcttcttctgcctagagtactttcccagcaagatgctgagaacgggcaacaactttgagtttacctacaactttgaggaggtgcccttccactccagcttcgctcccagtcagaacctcttcaagctggccaacccgctggtggaccagtacttgtaccgcttcgtgagcacaaataacactggcggagtccagttcaacaagaacctggccgggagatacgccaacacctacaaaaactggttcccggggcccatgggccgaacccagggctggaacctgggctccggggtcaaccgcgccagtgtcagcgccttcgccacgaccaataggatggagctcgagggcgcgagttaccaggtgcccccgcagccgaacggcatgaccaacaacctccagggcagcaacacctatgccctggagaacactatgatcttcaacagccagccggcgaacccgggcaccaccgccacgtacctcgagggcaacatgctcatcaccagcgagagcgagacgcagccggtgaaccgcgtggcgtacaacgtcggcgggcagatggccaccaacaaccagagctccaccactgcccccgcgaccggcacgtacaacctccaggaaatcgtgcccggcagcgtgtggatggagagggacgtgtacctccaaggacccatctgggccaagatcccagagacgggggcgcactttcacccctctccggccatgggcggattcggactcaaacacccaccgcccatgatgctcatcaagaacacgcctgtgcccggaaatatcaccagcttctcggacgtgcccgtcagcagcttcatcacccagtacagcaccgggcaggtcgccgtggagatggagtgggagctcaagaaggaaaactccaagaggtggaacccagagatccagtacacaaacaactacaacgacccccagtttgtggactttgccccggacagcaccggggaatacagaaccaccagacctatcggaacccgataccttacccgacccctttaa

SEQ ID NO: 810 - DNA, 2175 bp, synthetic construct
  misc_feature 1..2175: note = Description of Artificial Sequence: Synthetic polynucleotide
  source 1..2175: mol_type = other DNA
atgtcttttgttgatcaccctccagattggttggaagaagttggtgaaggtcttcgcgagtttttgggccttgaagcgggcccaccgaaaccaaaacccaatcagcagcatcaagatcaagcccgtggtcttgtgctgcctggttataactatctcggacccggaaacggtctcgatcgaggagagcctgtcaacagggcagacgaggtcgcgcgagagcacgacatctcgtacaacgagcagcttgaggcgggagacaacccctacctcaagtacaaccacgcggacgccgagtttcaggagaagctcgccgacgacacatccttcgggggaaacctcggaaaggcagtctttcaggccaagaaaagggttctcgaaccttttggcctggttgaagagggtgctaagacggcccctaccggaaagcggatagacgaccactttccaaaaagaaagaaggcccggaccgaagaggactccaagccttccacctcgtcagacgccgaagctggacccagcggatcccagcagctgcaaatcccagcccaaccagcctcaagtttgggagctgatacaatgtctgcgggaggtggcggcccattgggcgacaataaccaaggtgccgatggagtgggcaatgcctcgggagattggcattgcgattccacgtggatgggggacagagtcgtcaccaagtccacccgaacctgggtgctgcccagctacaacaaccaccagtaccgagagatcaaaagcggctccgtcgacggaagcaacgccaacgcctactttggatacagcaccccctgggggtactttgactttaaccgcttccacagccactggagcccccgagactggcaaagactcatcaacaactactggggcttcagaccccggtccctcagagtcaaaatcttcaacattcaagtcaaagaggtcacggtgcaggactccaccaccaccatcgccaacaacctcacctccaccgtccaagtgtttacggacgacgactaccagctgccctacgtcgtcggcaacgggaccgagggatgcctgccggccttccctccgcaggtctttacgctgccgcagtacggttacgcgacgctgaaccgcgacaacacagaaaatcccaccgagaggagcagcttcttctgcctagagtactttcccagcaagatgctgagaacgggcaacaactttgagtttacctacaactttgaggaggtgcccttccactccagcttcgctcccagtcagaacctcttcaagctggccaacccgctggtggaccagtacttgtaccgcttcgtgagcacaaataacactggcggagtccagttcaacaagaacctggccgggagatacgccaacacctacaaaaactggttcccggggcccatgggccgaacccagggctggaacctgggctccggggtcaaccgcgccagtgtcagcgccttcgccacgaccaataggatggagctcgagggcgcgagttaccaggtgcccccgcagccgaacggcatgaccaacaacctccagggcagcaacacctatgccctggagaacactatgatcttcaacagccagccggcgaacccgggcaccaccgccacgtacctcgagggcaacatgctcatcaccagcgagagcgagacgcagccggtgaaccgcgtggcgtacaacgtcggcgggcagatggccaccaacaaccagagctccaccactgcccccgcgaccggcacgtacaacctccaggaaatcgtgcccggcagcgtgtggatggagagggacgtgtacctccaaggacccatctgggccaagatcccagagacgggggcgcactttcacccctctccggccatgggcggattcggactcaaacacccaccgcccatgatgctcatcaagaacacgcctgcgcccggaaatatcaccagcttctcggacgtgcccgtcagcagcttcatcacccagtacagcaccgggcaggtcaccgtggagatggagtgggagctcaagaaggaaaactccaagaggtggaacccagagatccagtacacaaacaactacaacgacccccagtttgtggactttgccccggacagcaccggggaatacagaaccaccagacctatcggaacccgataccttacccgacccctttaa

SEQ ID NO: 811 - DNA, 2175 bp, synthetic construct
  misc_feature 1..2175: note = Description of Artificial Sequence: Synthetic polynucleotide
  source 1..2175: mol_type = other DNA
atgtcttttgttgatcaccctccagattggttggaagaagttggtgaaggtcttcgcgagtttttgggccttgaagcgggcccaccgaaaccaaaacccaatcagcagcatcaagatcaagcccgtggtcttgtgctgcctggttataactatctcggacccggaaacggtctcgatcgaggagagcctgtcaacagggcagacgaggtcgcgcgagagcacgacatctcgtacaacgagcagcttgaggcgggagacaacccctacctcaagtacaaccacgcggacgccgagtttcaggagaagctcgccgacgacacatccttcgggggaaacctcggaaaggcagtctttcaggccaagaaaagggttctcgaaccttttggcctggctgaagagggtgctaagacggcccctaccggaaagcggatagacgaccactttccaaaaagaaagaaggcccggaccgaagaggactccaagccttccacctcgtcagacgccgaagctggacccagcggatcccagcagctgcaaatcccagcccaaccagcctcaagtttgggagctgatacaatgtctgcgggaggtggcggcccattgggcgacaataaccaaggtgccgatggagtgggcaatgcctcgggagattggcattgcgattccacgtggatgggggacagagtcgtcaccaagtccacccgaacctgggtgctgcccagctacaacaaccaccagtaccgagagatcaaaagcggctccgtcgacggaagcaacgccaacgcctactttggatacagcaccccctgggggtactttgactttaaccgcttccacagccactggagcccccgagactggcaaagactcatcaacaactactggggcttcagaccccggtccctcagagccaaaatcttcaacattcaagtcaaagaggtcacggtgcaggactccaccaccaccatcgccaacaacctcacctccaccgtccaagtgtttacggacgacgactaccagctgccctacgtcgtcggcaacgggaccgagggatgcctgccggccttccctccgcaggtctttacgctgccgcagtacggttacgcgacgctgaaccgcgacaacacagaaaatcccaccgagaggagcagcttcttctgcctagagtactttcccagcaagatgctgagaacgggcaacaaccttgagtttacctacaactttgaggaggtgcccttccactccagcttcgctcccagtcagaacctcttcaagctggccaacccgctggtggaccagtacttgtaccgcttcgtgagcacaaataacactggcggagtccagttcaacaagaacctggccgggagatacgccaacacctacaaaaactggttcccggggcccatgggccgaacccagggctggaacctgggctccggggtcaaccgcgccagtgtcagcgccttcgccacgaccaataggatggagctcgagggcgcgagttaccaggtgcccccgcagccgaacggcatgaccaacaacctccagggcagcaacacctatgccctggagaacactatgatcttcaacagccagccggcgaacccgggcaccaccgccacgtacctcgagggcaacatgctcatcaccagcgagagcgagacgcagccggtgaaccgcgtggtgcacaacgtcggcgggcagatggccaccaacaaccagagctccaccactgcccccgcgaccggcacgtacaacctccaggaaatcgtgcccggcagcgtgtggatggagagggacgtgtacctccaaggacccatctgggccaagatcccagagacgggggcgcactttcacccctctccggccatgggcggattcggactcaaacacccaccgcccatgatgctcatcaagaacacgcctgtgcccggaaatatcaccagcttctcggacgtgcccgtcagcagcttcatcacccagtacagcaccgggcaggtcaccgtggagatggagtgggagctcaagaaggaaaactccaagaggtggaacccggagatccagtacacaaacaactacaacgacccccagtttgtggactttgccccggacagcaccggggaatacagaaccaccagacctatcggaacccgataccttacccgacccctttaa

SEQ ID NO: 812 - DNA, 2175 bp, synthetic construct
  misc_feature 1..2175: note = Description of Artificial Sequence: Synthetic polynucleotide
  source 1..2175: mol_type = other DNA
atgtcttttgttgatcaccctccagattggttggaagaagttggtgaaggtcttcgcgagtttttgggccttgaagcgggcccaccgaaaccaaaacccaatcagcagcatcaagatcaagcccgtggtcttgtgctgcctggttataactatctcggacccggaaacggtctcgatcgaggagagcctgtcaacagggcagacgaggtcgcgcgagagcacgacatctcgtacaacgagcagcttgaggcgggagacaacccctacctcaagtacaaccacgcggacgccgagtttcaggagaagctcgccgacgacacatccttcgggggaaacctcggaaaggcagtctttcaggccaagaaaagggttctcgaaccttttggcctggttgaagagggtgctaagacggcccctaccggaaagcggatagacgaccactttccaaaaagaaagaaggcccggaccgaagaggactccaagccttccacctcgtcagacgccgaagctggacccagcggatcccagcagctgcaaatcccagcccaaccagcctcaagtttgggagctgatacaatgtctgcgggaggtggcggcccattgggcgacaataaccaaggtgccgatggagtgggcaatgcctcgggagattggcattgcgattccacgtggatgggggacagagtcgtcaccaagtccacccgaacctgggtgctgcccagctacaacaaccaccagtaccgagagatcaaaagcggctccgtcgacggaggcaacgccaacgcctactttggatacagcaccccctgggggtactttgactttaaccgcttccacagccactggagcccccgggactggcaaagactcatcaacaactactggggcttcagaccccggtccctcagagtcaaaatcttcaacattcaagtcaaagaggtcacggtgcaggactccaccaccaccatcgccaacaacctcacctccaccgtccaagtgtttacggacgacgactaccagctgccctacgtcgtcggcaacgggaccgagggatgcctgccggccttccctccgcaggtctttacgctgccgcagtacggttacgcgacgctgaaccgcgacaacacagaaaatcccaccgagaggagcagcttcttctgcctagagtactttcccagcaagatgctgagaacgggcaacaactttgagtttacctacaactttgaggaggtgcccttccactccagcttcgctcccagtcagaacctcttcaagctggccaacccgctggtggaccagtacttgtaccgcttcgtgagcacaaataacactggcggagtccagttcaacaagaacctggccgggagatacgccaacacctacaaaaactggttcccggggcccatgggccgaacccagggctggaacctgggctccggggtcaaccgcgccagtgtcagcgccttcgccacgaccaataggatggagctcgagggcgcgagttaccaggtgcccccgcagccgaacggcatgaccaacaacctccagggcagcaacacctatgccctggagaacactatgatcttcaacagccagccggcgaacccgggcaccaccgccacgtacctcgagggcaacatgctcatcaccagcgagagcgagacgcagccggtgaaccgcgtggcgtacaacgtcggcgggcagatggccaccaacaaccagagctccaccactgcccccgcgaccggcacgtacaacctccaggaaatcgtgcccggcagcgtgtggatggagagggacgtgtacctccaaggacccatctgggccaagatcccagagacgggggcgcactttcacccctctccggccatgggcggattcggactcaaacacccaccgcccatgatgctcatcaagaacacgcctgcgcccggaaatatcaccagcttctcggacgtgcccgtcagcagcttcatcacccagtacagcaccgggcaggtcaccgtggagatggagtgggagctcaagaagggaaactccaagaggtggaacccagagatccagtacacaaacaactacaacgacccccagtttgtggactttgccccggacagcaccggggaatacagaaccaccagacctatcggaacccgataccttacccgacccctttaa

SEQ ID NO: 813 - DNA, 2175 bp, synthetic construct
  misc_feature 1..2175: note = Description of Artificial Sequence: Synthetic polynucleotide
  source 1..2175: mol_type = other DNA
atgtcttttgttgatcaccctccagattggttggaagaagttggtgaaggtcttcgcgagtttttgggccttgaagcgggcccaccgaaaccaaaacccaatcagcagcatcaagatcaagcccgtggtcttgtgctgcctggttataactatctcggacccggaaacggtctcgatcgaggagagcctgtcaacagggcagacgaggtcgcgcgagagcacgacatctcgtacaacgagcagcttgaggcgggagacaacccctacctcaagtacaaccacgcggacgccgagtttcaggagaagctcgccgacgacacgtccttcgggggaaacctcggaaaggcagtctttcaggccaagaaaagggttctcgaaccttttggcctggttgaagagggtgctaagacggcccctaccggaaagcggatagacgaccactttccaaaaagaaagaaggcccggaccgaagaggactccaagccttccacctcgtcagacgccgaagctggacccagcggatcccagcagctgcaaatcccagcccaaccagcctcaagtttgggagctgatacaatgtctgcgggaggtggcggcccattgggcgacaataaccaaggtgccgatggagtgggcaatgcctcgggagattggcattgcgattccacgtggatgggggacagagtcgtcaccaagtccacccgaacctgggtgctgcccagctacaacaaccaccagtaccgagagatcaaaagcggctccgtcgacggaagcaacgccaacgcctactttggatacagcaccccctgggggtactttgactttaaccgcttccacagccactggagcccccgagactggcaaagactcatcaacaactactggggcttcagaccccggtccctcagagtcaaaatcttcaacattcaagtcaaagaggtcacggtgcaggactccaccaccaccatcgccaacaacctcacctccaccgtccaagtgtttacggacgacgactaccagctgccctacgtcgtcggcaacgggaccgagggatgcctgccggccttccctccgcaggtctttacgctgccgcagtacggttacgcgacgctgaaccgcgacaacacagaaaatcccaccgagaggagcagcttcttctgcctagagtactttcccagcaagatgctgagaacgggcaacaactttgagtttacctacaactttgaggaggtgcccttccactccagcttcgctcccagtcagaacctcttcaagctggccaacccgctggtggaccagtacttgtaccgcttcgtgagcacaaataacactggcggagtccagttcaacaagaacctggccgggagatacgccaacacctacaaaaactggttcccggggcccatgggccgaacccagggctggaacctgggctccggggtcaaccgcgccagtgtcagcgccttcgccacgaccaataggatggagctcgagggcgcgagttaccaggtgcccccgcagccgaacggcatgaccaacaacctccagggcagcaacacctatgccctggagaacactatgatcttcaacagccagccggcgaacccgggcaccaccgccacgtacctcgagggcaacatgctcatcaccagcgagagcgagacgcagccggtgaaccgcgtggcgtacaacgtcggcgggcagatggccaccaacaaccagagctccaccactgcccccgcgaccggcacgtacaacctccaggaaatcgtgcccggcagcgtgtggatggagagggacgtgtacctccaaggacccatctgggccaagatcccagagacgggggtgcactttcacccctctccggccatgggcggattcggactcaaacacccaccgcccatgatgctcatcaagaacacgcctgtgcccggaaatatcaccagcttctcggacgtgcccgtcagcagcttcatcacccagtacagcaccgggcaggtcaccgtggagatggagtgggagctcaagaaggaaaactccaagaggtggaacccagagatccagtacacaaacaactacaacgacccccagtttgtggactttgccccggacagcaccggggaatacagaaccaccagacctatcggaacccgataccttacccgacccctttaa

SEQ ID NO: 814 - DNA, 2175 bp, synthetic construct
  misc_feature 1..2175: note = Description of Artificial Sequence: Synthetic polynucleotide
  variation 1652: note = n is a, c, t, or g
  source 1..2175: mol_type = other DNA
atgtcttttgttgatcaccctccagattggttggaagaagttggtgaaggtcttcgcgagtttttgggccttgaagcgggcccaccgaaaccaaaacccaatcagcagcatcaagatcaagcccgtggtcttgtgctgcctggttataactatctcggacccggaaacggtctcgatcgaggagagcctgtcaacagggcagacgaggtcgcgcgagagcacgacatctcgtacaacgagcagcttgaggcgggagacaacccctacctcaagtacaaccacgcggacgccgagtttcaggagaagctcgccgacgacacatccttcgggggaaacctcggaaaggcagtctttcaggccaagaaaagggttctcgaaccttttggcctggttgaagagggtgctaagacggcccctaccggaaagcggatagacgaccactttccaaaaagaaagaaggcccggaccgaggaggactccaagccttccacctcgtcagacgccgaagctggacccagcggatcccagcagctgcaaatcccagcccaaccagcctcaagtttgggagctgatacaatgtctgcgggaggtggcggcccattgggcgacaataaccaaggtgccgatggagtgggcaatgcctcgggagattggcattgcgattccacgtggatgggggacagagtcgtcaccaagtccacccgaacctgggtgctgcccagctacaacaaccaccagtaccgagagatcaaaagcggctccgtcgacggaagcaacgccaacgcctactttggatacagcaccccctgggggtactttgactttaaccgcttccacagccactggagcccccgagactggcaaagactcatcaacaactactggggcttcagaccccggtccctcagagtcaaaatcttcaacattcaagtcaaagaggtcacggtgcaggactccaccaccaccatcgccaacaacctcacctccaccgtccaagtgtttacggacgacgactaccagctgccctacgtcgtcggcaacgggaccgagggatgcctgccggccttccctccgcaggtctttacgctgccgcagtacggttacgcgacgctgaaccgcgacaacacagaaaatcccaccgagaggagcagcttcttctgcctagagtactttcccagcaagatgctgagaacgggcaacaactttgagtttacctacaactttgaggaggtgcccttccactccagcttcgctcccagtcagaacctcttcaagctggccaacccgctggtggaccagtacttgtaccgcttcgtgagcacaaataacactggcggagtccagttcaacaagaacctggccgggagatacgccaacacctacaaaaactggttcccggggcccatgggccgaacccagggctggaacctgggctccggggtcaaccgcgccagtgtcagcgccttcgccacgaccaataggatggagctcgagggcgcgagttaccaggtgcccccgcagccgaacggcatgaccaacaacctccagggcagcaacacctatgccctggagaacactatgatcttcaacagccagccggcgaacccgggcaccaccgccacgtacctcgagggcagcatgctcatcaccancgagagcgagacgcagccggtgaaccgcgtggcgtacaacgtcggcgggcagatggccaccaacaaccagagctccaccactgcccccgcgaccggcacgtacaacctccaggaaatcgtgcccggcagcgtgtggatggagagggacgtgtacctccaaggacccatctgggccaagatcccagagacgggggcgcactttcacccctctccggccatgggcggattcggactcaaacacccaccgcccatgatgctcatcaagaacacgcctgtgcccggaaatatcaccagcttctcggacgtgcccgtcagcagcttcatcacccagtacagcaccgggcaggtcaccgtggagatggagtgggagctcaagaaggaaaactccaagaggtggaacccagagatccagtacacaaacaactacaacgacccccagtttgtggactttgccccggacagcaccggggaatacagaaccaccagacctatcggaacccgataccttacccgacccctttaa

SEQ ID NO: 815 - DNA, 2211 bp, synthetic construct
  misc_feature 1..2211: note = Description of Artificial Sequence: Synthetic polynucleotide
  source 1..2211: mol_type = other DNA
atggctgctgacggttatcttccagattggctcgaggacaacctttctgaaggcattcgtgagtggtgggctctgaaacctggagtccctcaacccaaagcgaaccaacaacaccaggacaaccgtcggggtcttgtgcttccgggttacaaatacctcggacccggtaacggactcgacaaaggagagccggtcaacgaggcggacgcggcagccctcgaacacgacaaagcttacgaccagcagctcaaggccggtgacaacccgtacctcaagtacaaccacgccgacgccgagtttcaggagcgtcttcaagaagatacgtcttttgggggcaaccttggcagagcagtcttccaggccaaaaagaggatccttgagcctcttggtctggttgaggaagcagctaaaacggctcctggaaagaagaggcctgtagatcagtctcctcaggaaccggactcatcatctggtgttggcaaatcgggcaaacagcctgccagaaaaagactaaatttcggtcagactggcgactcagagtcagtcccagaccctcaacctctcggagaaccaccagcagcccccacaagtttgggatctaatacaatggcttcaggcggtggcgcaccaatggcagacaataacgagggtgccgatggagtgggtaattcctcaggaaattggcattgcgattcccaatggctgggcgacagagtcatcaccaccagcaccagaacctgggccctgcccacttacaacaaccatctctacaagcaaatctccagccaatcaggagcttcaaacgacaaccactactttggctacagcaccccttgggggtattttgactttaacagattccactgccacttctcaccacgtgactggcagcgactcattaacaacaactggggattccggcccaagaaactcagcttcaagctcttcaacatccaagttaaagaggtcacgcagaacgatggcacgacgactattgccaataaccttaccagcacggttcaagtgtttacggactcggagtatcagctcccgtacgtgctcgggtcggcgcaccaaggctgtctcccgccgtttccagcggacgtcttcatggtccctcagtatggatacctcaccctgaacaacggaagtcaagcggtgggacgctcatccttttactgcctggagtacttcccttcgcagatgctaaggactggaaataacttccaattcagctataccttcgaggatgtaccttttcacagcagctacgctcacagccagagtttggatcgcttgatgaatcctcttattgatcagtatctgtactacctgaacagaacgcaaggaacaacctctggaacaaccaaccaatcacggctgctttttagccaggctgggcctcagtctatgtctttgcaggccagaaattggctacctgggccctgctaccggcaacagagactttcaaagactgctaacgacaacaacaacagtaactttccttggacagcggccagcaaatatcatctcaatggccgcgactcgctggtgaatccaggaccagctatggccagtcacaaggacgatgaagaaaaatttttccctatgcacggcaatctaatatttggcaaagaagggacaacggcaagtaacgcagaattagataatgtaatgattacggatgaagaagagattcgtaccaccaatcctgtggcaacagagcagtatggaactgtggcaaataacttgcagagctcaaatacagctcccacgactagaactgtcaatgatcagggggccttacctggcatggtgtggcaagatcgtgacgtgtaccttcaaggacctatctgggcaaagattcctcacacggatggacactttcatccttctcctctgatgggaggctttggactgaaacatccgcctcctcaaatcatgatcaaaaatactccggtaccggcaaatcctccgacgactttcagcccggccaagtttgcttcatttatcactcagtactccactggacaggtcagcgtggaaattgagtgggagctacagaaagaaaacagcaaacgttggaatccagagattcagtacacttccaactacaacaagtctgttaatgtggactttactgtagacactaatggtgtttatagtgaacctcgccctattggaacccggtatctcacacgaaacttgtaa

SEQ ID NO: 816 - DNA, 2205 bp, synthetic construct; identical to SEQ ID NO: 84
  misc_feature 1..2205: note = Description of Artificial Sequence: Synthetic polynucleotide
  source 1..2205: mol_type = other DNA

SEQ ID NO: 817 - DNA, 2234 bp, synthetic construct
  misc_feature 1..2234: note = Description of Artificial Sequence: Synthetic polynucleotide
  source 1..2234: mol_type = other DNA
atgtcttttgttgatcaccctccagattggttggaagaagttggtgaaggtcttcgcgagtttttgggccttgaagcgggcccaccgaaaccaaaacccaatcagcagcatcaagatcaagcccgtggtcttgtgctgcctggttataactatctcggacccggaaacggtctcgatcgaggagagcctgtcaacagggcagacgaggtcgcgcgagagcacgacatctcgtacaacgagcagcttgaggcgggagacaacccctacctcaagtacaaccacgcggacgccgagtttcaggagaagctcgccgacgacacatccttcgggggaaacctcggaaaggcagtctttcaggccaagaaaagggttctcgaaccttttggcctggttgaagagggtgctaagacggcccctaccggaaagcggatagacgaccactttccaaaaagaaagaaggctcggaccgaagaggactccaagccttccacctcgtcagacgccgaagctggacccagcggatcccagcagctgcaaatcccagcccaaccagcctcaagtttgggagctgatacaatgtctgcgggaggtggcggcccattgggcgacaataaccaaggtgccgatggagtgggcaatgcctcgggagattggcattgcgattccacgtggatgggggacagagtcgtcaccaagtccacccgaacctgggtgctgcccagctacaacaaccaccagtaccgagagatcaaaagcggctccgtcgacggaagcaacgccaacgcctactttggatacagcaccccctgggggtactttgactttaaccgcttccacagccactggagcccccgagactggcaaagactcatcaacaactactggggcttcagaccccggtccctcagagtcaaaatcttcaacattcaagtcaaagaggtcacggtgcaggactccaccaccaccatcgccaacaacctcacctccaccgtccaagtgtttacggacgacgactaccagctgccctacgtcgtcggcaacgggaccgagggatgcctgccggccttccctccgcaggtctttacgctgccgcagtacggttacgcgacgctgaaccgcgacaacacagaaaatcccaccgagaggagcagcttcttctgcctagagtactttcccagcaagatgctgagaacgggcaacaactttgagtttacctacaactttgaggaggtgcccttccactccagcttcgctcccagtcagaacctgttcaagctggccaacccgctggtggaccagtacttgtaccgcttcgtgagcacaaataacactggcggagtccagttcaacaagaacctggccgggagatacgccaacacctacaaaaactggttcccggggcccatgggccgaacccagggctggaacctgggctccggggtcaaccgcgccagtgtcagcgccttcgccacgaccaataggatggagctcgagggcgcgagttaccaggtgcccccgcagccgaacggcatgaccaacaacctccagggcagcaacacctatgccctggagaacactatgatcttcaacagccagccggcgaacccgggcaccaccgccacgtacctcgagggcaacatgctcatcaccagcgagagcgagacgcagccggtgaaccgcgtggcgtacaacgtcggcgggcagatggccaccaacaaccagagctccaccactgcccccgcgaccggcacgtacaacctccaggaaatcgtgcccggcagcgtgtggatggagagggacgtgtacctccaaggacccatctgggccaagatcccagagacgggggcgcactttcacccctctccggccatgggcggattcggactcaaacacccaccgcccatgatgctcatcaagaacacgcctgtgcccggaaatatcaccagcttctcggacgtgcccgtcagcagcttcatcacccagtacagcaccgggcaggtcaccgtggagatggagtgggagctcaagaaggaaaactccaagaggtggaacccagagatccagtacacaaacaactacaacgacccccagtttgtggactttgccccggacagcaccggggaatacagaaccaccagacctatcggaacccgataccttacccgacccctttaacccattcatgtcgcataccctcaataaaccgtgtattcgtgtcagtaaaatactgcctc

SEQ ID NO: 818 - protein, 736 aa, synthetic construct
  REGION 1..736: note = Description of Artificial Sequence: Synthetic polypeptide
MAADGYLPDWLEDNLSEGIREWWALKPGVPQPKANQQHQDNRRGLVLPGYKYLGPGNGLDKGEPVNEADAAALEHDKAYDQQLKAGDNPYLKYNHADAEFQERLQEDTSFGGNLGRAVFQAKKRILEPLGLVEEAAKTAPGKKRPVDQSPQEPDSSSGVGKSGKQPARKRLNFGQTGDSESVPDPQPLGEPPAAPTSLGSNTMASGGGAPMADNNEGADGVGNSSGNWHCDSQWLGDRVITTSTRTWALPTYNNHLYKQISSQSGASNDNHYFGYSTPWGYFDFNRFHCHFSPRDWQRLINNNWGFRPKKLSFKLFNIQVKEVTQNDGTTTIANNLTSTVQVFTDSEYQLPYVLGSAHQGCLPPFPADVFMVPQYGYLTLNNGSQAVGRSSFYCPEYFPSQMLRTGNNFQFSYTFEDVPFHSSYAHSQSLDRLMNPLIDQYLYYLNRTQGTTSGTTNQSRLLFSQAGPQSMSLQARNWLPGPCYRQQRLSKTANDNNNSNFPWTAASKYHLNGRDSLVNPGPAMASHKDDEEKFFPMHGNLIFGKEGTTASNAELDNVMITDEEEIRTTNPVATEQYGTVANNLQSSNTAPTTRTVNDQGALPGMVWQDRDVYLQGPIWAKIPHTDGHFHPSPLMGGFGLKHPPPQIMIKNTPVPANPPTTFSPAKFASFITQYSTGQVSVEIEWELQKENSKRWNPEIQYTSNYNKSVNVDFTVDTNGVYSEPHPIGTRYLTRNL

SEQ ID NO: 819 - protein, 736 aa, synthetic construct
  REGION 1..736: note = Description of Artificial Sequence: Synthetic polypeptide
MAADGYLPDWLEDNLSEGIREWWALKPGVPQPKANQQHQDNRRGLVLPGYKYLGPGNGLDKGEPVNEADAAALEHDKAYDQQLKAGDNPYLKYNHADAEFQERLQEDTSFGGNLGRAVFQAKKRILEPLGLVEEAAKTAPGKKRPVDQSPQEPDSSSGVGKSGKQPARKRLNFGQTGDSESVPDPQPLGEPPAAPTSLGSNTMASGGGAPMADNNEGADGVGNSSGNWHCDSQWLGDRVITTSTRTWALPTYNNHLYKQISSQSGASNDNHYFGYSTPWGYFDFNRFHCHFSPRDWQRLINNNWGFRPKKLSFKLFNIQVKEVTQNDGTTTVANNLTSTVQVFTDSEYQLPYVLGSAHQGCLPPFPADVFMVPQYGYLTLNNGSQAVGRSSFYCLEYFPSQMLRTGNNFQFSYTFEDVPFHSSYAHSQSLDRLMNPLIDQYLYYLNRTQGTTSGTTNQSRLLFSQAGPQSMSLQARNWLPGPCYRQQRLSKTANDNNNSNFPWTAASKYHLNGRDSLVNPGPAMASHKDDEEKFFPMHGNLIFGKEGTTASNAELDNVMITDEEEIRTTNPVATEQYGTVANNLQSSNTAPTTRTVNDQGALPGMVWQDRDVYLQGPIWAKIPHTDGHFHPSPLMGGFGLKHPPPQIMIKNTPVPANPPTTFSPAKFASFITQYSTGQVSVEIEWELQKENSKRWNPEIQYTSNYNKSVNVDFTVDTNGVYSEPRPIGTRYLTRNL

SEQ ID NO: 820 - protein, 736 aa, synthetic construct
  REGION 1..736: note = Description of Artificial Sequence: Synthetic polypeptide
MAADGYLPDWLEDNLSEGIREWWALKPGVPQPKANQQHQDNRRGLVLPGYKYLGPGNGLDKGEPVNEADAAALEHDKAYDQQLKAGDNPYLKYNHADAEFQERLQEDTSFGGNLGRAVFQAKKRILEPLGLVEEAAKTAPGKKRPVDQSPQEPDSSSGVGKSGKQPARKRLNFGQTGDSESVPDPQPLGEPPAAPTSLGSNTMASGGGAPMADNNEGADGVGNSSGNWHCDSQWLGDRVITTSTRTWALPTYNNHLYKQISGQSGASNDNHYFGYSTPWGYFDFNRFHCHFSPRDWQRLINNNWGFRPKKLSFKLFNIQVKEVTQNDGTTTIANNLTSTVQVFTDSEYQLPYVLGSAHQGCLPPFPADVFMVPQYGYLTLNNGSQAVGRSSFYCLEYFPSQMLRTGNNFQFSYTFEDVPFHSSYAHSQSLDRLMNPLIDQYLYYLNRTQGTTSGTTNQSRLLFSQAGPQSMSLQARNWLPGPCYRQQRLSKTANGNNNSNFPWTAASKYHLNGRDSLVNPGPAMASHKDDEEKFFPMHGNLIFGKEGTTASNAELDNVMITDEEEIRTTNPVATEQCGTVANNLQSSNTAPTTRTVNDQGALPGMVWQDRDVYLQGPIWAKIPHTDGHFHPSPLMGGFGLKHPPPQIMIKNTPVPANPPTTFSPAKFASFITQYSTGQVSVEIEWELQKENSKRWNPEIQYTSNYNKSVNVDFTVDTNGVYSEPRPIGTRYLTRNL

SEQ ID NO: 821 - protein, 736 aa, synthetic construct
  REGION 1..736: note = Description of Artificial Sequence: Synthetic polypeptide
MAADGYLPDWLEDNLSEGIREWWALKPGVPQPKANQQHQDNRRGLVLPGYKYLGPGNGLDKGEPVNEADAAALEHDKAYDQQLKAGDNPYLKYNHADAEFQERLQEDTSFGGNLGRAVFQAKKRILEPLGLVEGAAKTAPGKKRPVDQSPQEPDSSSGVGKSGKQPARKRLNFGQTGDSESVPDPQPLGEPPAAPTSLGSNTMASGGGAPMADNNEGADGVGNSSGNWHCDSQWLGDRVITTSTRTWALPTYNSHLYKQISSQSGASNDNHYFGYSTPWGYFDFNRFHCHFSPRDWQRLINNNWGFRPKKLSFKLFNIQVKEVTQNDGTTTIANNLTSTVQVFTDSEYQLPYVLGSAHQGCLPPFPADAFMVPQYGYLTLNNGSQAVGRSSFYCLEYFPSQMLRTGNNFQFSYTFEDVPFHGSYAHSQSLDRLMNPLIDQYLYYLNRTQGTTSGTTNQSRLLFSQAGPQSMSLQARNWLPGPCYRQQRLSKTANDNNNSNFPWTAASKYHLNGRDSLVNPGPAMASHKDDEEKFFPMHGNLIFGKEGTTASNAELDNVMITDEEEIRTTNPVATEQYGTVANNLQSSNTAPTTRTVNDQGALPGMVWQDRDVYLQGPIWAKIPHTDGHFHPSPLMGGFGLKHPPPQIMIKNTPVPANPPTTFSPAKFASFITQYSTGQVSVEIEWELQKENSKRWNPEIQYTSNYNKSVNVDFTVDTNGVYSEPRPIGTRYLTRNS

SEQ ID NO: 822 - protein, 736 aa, synthetic construct
  REGION 1..736: note = Description of Artificial Sequence: Synthetic polypeptide
MAADGYLPDWLEDNLSEGIREWWALKPGVPQPKANQQHQDNRRGLVLPGYKYLGPGNGLDKGEPVNEADAAALEHDKAYDQQLKAGDNPYLKYNHADAEFQERLQEDTSFGGNLGRAVFQAKKRILEPLGLVEGAAKTAPGKKRPVDQSPQEPDSSSGVGKSGKQLARKRLNFGQTGDSESVPDPQPLGEPPAAPTSLGSNTMASGGGAPMADNNEGADGVGNSSGNWHCDSQWLGDRVITTSTRTWALPTYNSHLYKQISGQSGASNDNHYFGYSTPWGYFDFNRFHCHFSPRDWQRLINNNWGFRPKKLSFKLFNIQVKEVTQNDGTTTIANNLTSTVQVFTDSEYQLPYVLGSAHQGCLPPFPADVFMVPQYGYLTLNNGSQAVGRSSFYCLEYFPSQMLRTGNNFQFSYTFEDVPFHSSYAHSQSLDRLMNPLIDQYLYYLNRTQGTTSGTTNQSRLLFSQAGPQSMSLQARNWLPGPCYRQQRLSKTANDNNNSNFPWTAASKYHLNGRDSLVNPGPAMASHKDDEEKFFPMHGNLIFGKEGTTASNAELDNVMITDEEEIRTTNPVATEQYGTVANNLQSSNTAPTTRTVNDQGALPGMVWQDRDVYLQGPIWAKIPHTDGHFHPSPLMGGFGLKHPPPQIMIKNTPVPANPPTTFSPAKFASFITQYSTGQVSVEIEWELQKENSKRWNPEIQYTSNYNKSVNVDFTVDTNGVYSEPRPIGTRYLTRNL

SEQ ID NO: 823 - protein, 736 aa, synthetic construct
  REGION 1..736: note = Description of Artificial Sequence: Synthetic polypeptide
MAADGYLPDWLEDNLSEGIREWWALKPGVPQPKANQQHQDDRRGLVLPGYKYLGPGNGLDKGEPVNEADAAALEHDKAYDQQLKAGDNPCLKYNHADAEFQERLQEDTSFGGNLGRAVFQAKKRILEPLGLVEEAAKTAPGKKRPVDQSPQEPDSSSGVGKSGKQPARKRLNFGQTGDSESVPDPQPLGEPPAAPTSLGSNTMASGGSAPMADNNEGADGVGNSSGNWHCDSQWLGDRVITTSTRTWALPTYNNHLYKQISSQSGASNDNHYFGYSTPWGYFDFNRFHCHFSPRDWQRLINNNWGFRPKKLSFKLFNIQVKEVTQNDGTTTIANNLTSTVQVFTDSEYQLPYVLGSAHQGCLPPFPADVFMVPQYGYLTLNNGSQAVGRSSFYCLEYFPSQMLRTGNNFQFSYTFEDVPFHSSYAHSQSLDRLMDPLIDQYLYYLNRTQGTTSGTTNQSRLLFSQAGPQSMSLQARNWLPGPCYRQQRLSKTANDNNNSNFPWTAASKYHLNGRDSLVNPGPAMASHKDDEEKFFPMHGNLIFGKEGTTASNAELDNVMITDEEEIRTTNPVATEQYGTVANNLQSSNTAPTTRTVNDQGALPGMVWQDRDVYLQGPIWAKIPHTDGHFHPSPLMGGFGLKHPPPQIMIKNTPVPANPPTTFSPAKFASFITQYSTGQVSVEIEWELQKENSKRWNPEIQYTSNYNKSVNVDFTVDTNGVYSEPRPIGTRYLTRNL

SEQ ID NO: 824 - protein, 736 aa, synthetic construct
  REGION 1..736: note = Description of Artificial Sequence: Synthetic polypeptide
MAADGYLPDWLEDNLSEGIREWWALKPGVPQPKANQQHQDDRRGLVLPGYKYLGPGNGLDKGEPVNEADAAALEHDKAYDQQLKAGDNPYLKYNHADAEFQERLQEDTSFGGNLGRAVFQAKKRILEPLGLVEEAAKTAPGKKRPVDQSPQEPDSSSGVGKSGKQPARKRLNFGQTGDSESVPDPQPLGEPPAAPTSLGSNTMASGGGAPMADNNEGADGVGNSSGNWHCDSQWLGNRVITTSTRTWALPTYNNHLYKQISSQSGASNDNHYFGYSTPWGYFDFNRFHCHFSPRDWQRLINNNWGFRPKKLSFKLFNIQVKEVTQNDGTTTIANNLTSTVQVFTDSEYQLPYVLGSAHQGCLPPFPADVFMVPQYGYLTLNNGSQAVGRSSFYCLEYFPSQMLRTGNNFQFSYTFEDVPFHSSYAHSQSLDRLMNPLIDQYLYYLNRTQGTTSGTTNQSRLLFSQAGPQSMSLQARNWLPGPCYRQQRLSKTANDNNNSNFPWTAASKYHLNGRDSLVNPGPAMASHKDDEEKFFPMHGNLIFGKEGTTASNAELDNVMITDEEEIRTTNPVATEQYGTVANNLQSSNTAPTTRTVNDQGALPGMVWQDRDVYLQGPIWAKIPHTDGHFHPSPLMGGFGLKHPPPQIMIKNTPVPANPPTTFSPAKFASFITQYSTGQVSVEIEWELQKENSKRWNPEIQYTSNYNKSVNVDFTVDTNGVYSEPRPIGTRYLTRNL

SEQ ID NO: 825 - protein, 736 aa, synthetic construct
  REGION 1..736: note = Description of Artificial Sequence: Synthetic polypeptide
MAADGYLPDWLEDNLSEGIREWWALKPGVPQPKANQQHQDDRRGLVLPGYKYLGPGNGLDKGEPVNEADAAALEHDKAYDQQLKAGDNPYLKYNHADAEFQERLQEDTSFGGNLGRAVFQAKKRILEPLGLVEEAAKTAPGKKRPVDQSPQEPDSSSGVGKSGKQPARKRLNFGQTGDSESVPDPQPLGEPPAAPTSLGSNTMASGGGAPMADNNEGADGVGNSSGNWHCDSQWLGDRVITTSTRTWALPTYNNHLYKQISSQSGASNDNHYFGYSTPWGYFDFNRFHCHFSPRDWQRLINNNWGFRPKKLSFKLFNIQVKEVTQNDGTTTIANNLTSTVQVFTDSEYQLPYVLGSAHQGCLPPFPADVFMVPQYGYLTLNNGSQAVGRSSFYCLEYFPSQMLRTGNNFQFSYTFEDVPFHSSYAHSQSLDRLMNPLIDQYLYYLNRTQGTTSGTTNQSRLLFSQAGPQSMSLQARNWLPGPCYRQQRLSKTANDNNNSNFPWTAASKYHLNGRDSLVNPGPAMASHKDDEEKFFPMHGNLIFGKEGTTASNAELDNVMITDEEEIRTTNPVATVQYGTVANNLQSSNTAPTTRTVNDQGALPGMVWQDRDVYLQGPIWAKIPHTDGHFHPSPLMGGFGLKHPPPQIMIKNTPVPANPPTTFSPAKFASFITQYSTGQVSVEIEWELQKENSKRWNPEIQYTSNYNKSVNVDFTVDTNGVYSEPRPIGTRYLTRNL

SEQ ID NO: 826 - protein, 735 aa, synthetic construct
  REGION 1..735: note = Description of Artificial Sequence: Synthetic polypeptide
MAADGYLPDWLEDNLSEGIREWWALKPGVPQPKANQQHQDNRRGLVLPGYKYLGPGNGLDKGEPVNEADAAALEHDKAYDQQLKAGDNPYLKYNHADAEFQERLQEDTSFGGNLGRAVFQAKKGILEPLGLVEEAAKTAPGKKRPVDQSPQEPDSSSGVGKSGKQPARKRLNFGQTGDSESVPDPQPLGEPPAAPTSLGSNTMASGGGAPMADNNEGADGVGNSSGNWHCDSQWLGDRVITTSTRTWALPTYNNHLYKQISSQSGASNDNHYFGYSTPWGYFDFNRFHCHFSPRDWQRLINNNWGFRPKKLSFKLFNIQVKEVTQNDGTTTIANNLTSTVQVFTDSEYQLPYVFGSAHQGCLPPFPADVFMVPQYGYLTLNNGSQAVGRSSFYCLEYFPSQMLRTGNNFQFSYTFEDVPFHSSYAHSQSSDRLMNPLIDQYLYYLNRTQGTTSGTTNQSRLLFSQAGPQSMSLQARNWLPGPCYRQQRLSKTANDNNNSNFPTAASKYHLNGRDSLVNPGPAMASHKDDEEKFFPMHGNLIFGKEGTTASNAELDNVMITDEEEIRTTNPVATEQYGTVANNLQSSNTAPTTRTVNDQGALPGMVWQDRDVYLQGPIWAKIPHTDGHFHPSPLMGGFGLKHPPPQIMIKNTPVPANPPTTFSPAKFASFITQYSTGQVSVEIEWELQKENSKRWNPEIQYTSNYNKSVNVDFTVDTNGVYSEPRPIGTRYLTRNL

SEQ ID NO: 827 - protein, 736 aa, synthetic construct
  REGION 1..736: note = Description of Artificial Sequence: Synthetic polypeptide
MAADGYLPDWLEDNLSEGIREWWALKPGVPQPKANQQHQDNRRGLVLPGYKYLGPGNGLDEGEPVNEADAAALEHDKAYDQQLKAGDNPYLKYNHADAEFQERLQEDTSFGGNLGRAVFQAKKRILEPLGLVEGAAKTAPGKKRPVDQSPQEPDSSSGVGKSGKQPARKRLNFGQTGDSESVPDPQPLGEPPAAPTSLGSNTMASGGGAPMADNNEGADGVGNSSGNWHCDSQWLGDRVITTSTRTWALPTYNSHLYKQISSQSGASNDNHYFGYSTPWGYFDFNRFHCHFSPRDWQRLINNNWGFRPKKLSFKLFNIQVKEVTQNDGTTTIANNLTSTVQVFTDSEYQLPYVLGSAHQGCLPPFPADVFMVPQYGYLTLNNGSQAVGRSSFYCLEYFPSQMLRTGNNFQFSYTFEDVPFHSSYAHSQSLDRLMNPLIDQYLYYLNRTQGTTSGTTNQSRLLFSQAGPQSMSLQARNWLPGPCYRQQRLSKTANDNNNSNFPWTAASKYHLNGRDSLVNPGPAMASHKDDEEKFFPMHGNLIFGKEGTTASNAELDNVMITDEEEIRTTNPVATEQYGTVANNLQSSNTAPTTRTVNDQGALPGMVWQDRDVYLQGPIWAKIPHTDGHFHPSPLMGGFGLKHPPPQIMIKNTPVPANPPTTFSPAKFASFITQYSTGQVSVEIEWELQKENSKRWNPEIQYTSNYNKSVNVDFTVDTNGVYSEPRPIGTRYLTRNL

SEQ ID NO: 828 - protein, 668 aa, synthetic construct
  REGION 1..668: note = Description of Artificial Sequence: Synthetic polypeptide
MAADGYLPDWLEDNLSEGIREWWALKPGVPQPKANQQHQDNRRGLVLPGYKYLGPGNGLDKGEPVNEADAAALEHDKAYDQQLKAGDNPYLKYNHADAEFQERLQEDTSFGGNLGRAVFQAKKRILEPLGLVEGAAKTAPGKKRPVDQSPQEPDSSSGVGKSGKQPARKRLNFGQTGDSESVPDPQPLGEPPAAPTSLGSNTMASGGGAPMADNNEGADGVGNSSGNWHCDSQWLGDRVITTSTRTWALPTYNSHLYKQISSQSGASNDNHYFGYSTPWGILTLTDSTATSHHVTGSDSLTTTGDSGPRNSASSSSTSKLKRSRRTMARRLLPITLPARFKCLRTRSISSRTCSGRRTKAVSRRFQRTPSWSLSMDTSPTTEVKRWDAHPFTAWSTSLRRCGLEITSNSAIPSRMYLFTAATLTARVWIAILLLISICTTTERKEQPLEQPTNHGCFLARLGLSLCLCRPEIGYLGPATGNRDFQRLLTTTTTVTFLGQRPANIISMAATRWIQDQLWPVTRTMKKNFSLCTAIRGPYLAWCGKIVTCTFKDLSGQRFLTRMDTFILLLWEALDNIRLLKSSKILRYRQILRRLSARPSLLHLSLSTPLDRSAWKLSGSYRKKTANVGIQRFSTLPTTTSLLMWTLLTLMVFIVNLALLEPGISHETC

SEQ ID NO: 829 - protein, 734 aa, synthetic construct
  REGION 1..734: note = Description of Artificial Sequence: Synthetic polypeptide
MTDGYLPDWLEDNLSEGVREWWALQPGAPKPKANQQHQDNARGLVLPGYKYLGPGNGLDKGEPVNAADAAALEHDKAYDQQLKAGDNPYLKYNHADAEFQQRLQGDTSFGGNLGRAVFQAKKRVLEPLGLVEQAGETAPGKKRPLIESPQQPDSSTGIGKKGKQPAKKKLVFEDETGAGDGPPEGSTSGAMSDDSEMRAATGGAAVEGGQGADGVGNASGDWHCDSTWSEGHVTTTSTRTWVLPTYNNHLYKRLGESLQSNTYNGFSTPWGYFDFNRFHCHFSPRDWQRLINNNWGMRPKAMRVKIFNIQVKEVTTSNGETTVANNLTSTVQIFADSSYELPYVMDAGQEGSLPPFPNDVFMVPQYGYCGLVTGNTSQQQTDRNAFYCLEYFPSQMLRTGNNFEITYSFEKVPFHSMYAHSQSLDRLMNPLIDQYLWGLQSTTTGTTLNAGTATTNFTKLRPTNLSNFKKNWLPGPSIKQQGFSKTANQNYKIPATGSDSLIKYETHSTLDGRWSALTPGPPMATAGPADSKFSNSQLIFAGPKQNGNTATVPGTLIFTSEEELAATNATDTDMWGNLPGGDQSNSNLPTVDRLTALGAVPGMVWQNRDIYYQGPIWAKIPHTDGHFHPSPLIGGFGLKHPPPQIFIKNTPVPANPATTFSSTPVNSFITQYSTGQVSVQIDWEIQKERSKRWNPEVQFTSNYGQQNSLLWAPDAAGKYTEPRAIGTRYLTHHL

SEQ ID NO: 830 - protein, 734 aa, synthetic construct
  REGION 1..734: note = Description of Artificial Sequence: Synthetic polypeptide
MTDGYLPDWLEDNLSEGVREWWALQPGAPKPKANQQHQDNARGLVLPGYKYLGPGNGLDKGEPVNAADAAALEHDKAYDQQLKAGDNPYLKYNHADAEFQQRLQGDTSFGGNLGRAVFQAKKRVLEPLGLVEQAGETAPGKKRPLIESPQQPDSSTGIGKKGKQPAKKKLVFEDETGAGDGPPEGSTSGAMSDDSEMRAAAGGAAVEGGQGADGVGNASGDWHCDSTWSEGHVTTTSTRTWVLPTYNNHLYKRLGESLQSNTYNGFSTPWGYFDFNRFHCHFLPRDWQRLINNNWGVRPKAMRVKIFNIQVKEVTTSNGETTVANNLTSTVQIFADSSYELPYVMDAGQEGSLPPFPNDVFMVPQYGYCGLVTGDTSQQQTDRNAFYCLEYFPSQMLRTGNNFEITYSFEKVPFHSMYAHSQSLDRLMNPLIDQYLWGLQSTTTGTTLNAGTATTNFTKLRPTNFSNFKKNWLPGPSIKQQGFSKTANQNYKIPATGSDSLIKYETHSTLDGRWSALTPGPPMATAGPADSKFSNSQLIFAGPKQNGNTATVPGTLIFTSEEELAATNATDTDMWGNLPGGDQSNSNLPTVDRLTALGAVPGMVWQNRDIYYQGPIWAKIPHTDGHFHPSPLIGGFGLKHPPPQIFIKNTPVPANPATTFSSTPVNSFITQYSTGQVSVQIDWEIQKERSKRWNPEVQFTSNYGQQNSLLWAPDAAGKYTEPRAIGTRYLTHHL

SEQ ID NO: 831 - protein, 734 aa, synthetic construct
  REGION 1..734: note = Description of Artificial Sequence: Synthetic polypeptide
MTDGYLPDWLEDNLSEGVREWWALQPGAPKPKANQQHQDNARGLVLPGYKYLGPGNGLDEGEPVNAADAAALEHDKAYDQQLKAGDNPYLKYNHADAEFQQRLQGDTSFGGNLGRAVFQAKKRVLEPLGLVEQAGETAPGKKRPLIESPQQPDSSTGIGKKGKQPAKKKLVFEDETGAGDGPPEGSTSGAMSDDSEMRAAAGGAAVEGGQGADGVGNASGDWHCDSTWSEGHVTTTSTRTWVLPTYNNHLYKRLGESLQSNTYNGFSTPWGYFDFNRFHCHFSPRDWQRLINNNWGMRPKAMRVKIFNIQVKEVTTSNGETTVANNLTSTVQIFADSSYELPYVMDAGQEGSLPPFPNDVFMVPQYGYCGLVTGNTSQQQTDRNAFYCLEYFPSQMLRTGNNFEITYSFEKVPFHSMYAHSQSLDRLMNPLIDQYLWGLQSTTTGTTLNAGTATTNFTKLRPTNFSNFKKNWLPGPSIKQQGFSKTANQNYKIPATGSDSLIKYETHSTLDGRWSALTPGPPMATAGPADSKFSNSQLIFAGPKQNGNTATVPGTLIFTSEEELAATNATDTDMWGNLPGGDQSNSNLPTVDRLTALGAVPGMVWQNRDIYYQGPIWAKIPHTDGHFHPSPLIGGFGLKHPPPQIFIKNTPVPANPATTFSSTPVNSFITQYSTGQVSVQIDWEIQKERSKRWNPEVQFTSNYGQQNSLLWAPDAAGKYTEPRAIGTRYLTHHL

SEQ ID NO: 832 - protein, 734 aa, synthetic construct
  REGION 1..734: note = Description of Artificial Sequence: Synthetic polypeptide
MTDGYLPDWLEDNLSEGVREWWALQPGAPKPKANQQHQDNARGLVLPGYKYLGPGNGLDKGEPVNAADAAALEHDKAYDQQLKAGDNPYLKYNHADAEFQQRLQGDTSFGGNLGRAVFQAKKRVLEPLGLVEQAGETAPGKKRPLIESPQQPDSSTGIGKKGKQPAKKKLVFEDGTGAGDGPPEGSTSGAMSDDSEMRAAAGGAAVEGGQGADGVGNASGDWHCDSTWSEGHVTTTSTRTWVLPTYNNHLYKRLGESLQSNTYNGFPTPWGYFDFNRFHCHFSPRDWQRLINNNWGMRPKAMRVKIFNIQVKEVTTSNGETTAANNLTSTVQIFADSSYELPYVMDAGQEGSLPPFPNDVFMVPQYGYCGLVTGNTSQQQTDRNAFYCLEYFPSQMLRTGNNFEITYSFEKVPFHSMYAHSQSLDRLMNPLIDQYLWGLQSTTTGTTLNAGTATTNFTKLRPTNFSNFKKNWLPGPSIKQQGFSKTANQNYKIPATGSDSLIKYETHSTLDGRWSALTPGPPMATAGPADSKFSNSQLIFAGPKQNGNTATVPGTLIFTSEEELAATNATDTDMWGNLPGGDQSNSNLPTVDRLTALGAVPGMVWQNRDIYYQGPIWAKIPHTDGHFHPSPLIGGFGLKHPPPQIFIKNTPVPANPATTFSSTPVNSFITQYSTGQVSVQIDWEIQKERSKRWNPEVQFTSNYGQQNSLLWAPDAAGKYTEPRAIGTRYLTHHL

SEQ ID NO: 833 - protein, 734 aa, synthetic construct
  REGION 1..734: note = Description of Artificial Sequence: Synthetic polypeptide
MTDGYLPDWLEDNLSEGVREWWALQPGAPKPKANQQHQDNARGLVLPGYKYLGPGNGLDKGEPVNAADAAALEHDKAYDQQLKAGDNPYLKYNHADAEFQQRLQGDTSFGGNLGRAVFQAKKRVLEPLGLVEQAGETAPGKKRPLIESPQQPDSSTGIGKKGKQPAKKKLVFEDETGAGDGPPEGSTSGAMSDDSEMRAAAGGAAVEGGQGADGVGNASGDWHCDSTWSEGHVTTTSTRTWVLPTYNNHLYKRLGESLQSNTYNGFSTPWGYFDFNRFHCHFSPRDWQRLINNNWGMRPKAMRVKIFNIQVKEVTTSNGETTVANNLTSTVQIFADSSYELPYVMDAGQEGSLPPFPNDVFMVPQYGYRGLVTGNTSQQQTDRNAFYCLEYFPSQMLRTGNNFEITYSFEKVPFHSMYAHSQSLDRLMNPLIDQYLWGLQSTTTGTTLNAGTATTNFTKLRPTNFSNFKKNWLPGPSIKQQGFSKTANQNYKIPATGSDSLIKYETHSTLDGRWSALTPGPPMATAGPADSKFSNSQLIFAGPKQNGNTATVPGTLIFTSEEELAATNATDTDMWGNLPGGDQSNSNLPTVDRLTALGAVPGMVWQNRDIYYQGPIWAKIPHTDGHFHPSPLIGGFGLKHPPPQIFIKNTPVPANPATTFSSTPVNSFITQYSTGQVSVQIDWEIQKERSKRWNPEVQFTSNYGQQNSLLWAPDAAGKYTEPRAIGTRYLTHHL

SEQ ID NO: 834 - protein, 734 aa, synthetic construct
  REGION 1..734: note = Description of Artificial Sequence: Synthetic polypeptide
MTDGYLPDWLEDNLSEGVREWWALQPGAPKPKANQQHQDNARGLVLQGYKYLGPGNGLDKGEPVNAADAAALEHDKAYDQQLKAGDNPYLKYNHADAEFQQRLQGDTSFGGNLGRAVFQAKKRVLEPLGLVEQAGETAPGKKRPLIESPQQPDSSTGIGKKGKQPAKKKLVFEDETGAGDGPPEGSTSGAMSDDSEMRAAAGGAAVEGGQGADGVGNASGDWHCDSTRSEGHVTTTSTRTWVLPTYNNHLYKRLGESLQSNTYNGFSTPWGYFDFNRFHCHFSPRDWQRLINNNWGMRPKAMRVKIFNIQVKEVTTSNGETTVANNLTSTVQIFADSSYELPYVMDAGQEGSLPPFPNDVFMVPQYGYCGLVTGNTSQQQTDRNAFYCLEYFPSQMLRTGNNFEITYSFEKVPFHSMYAHSQSLDRLMNPLIDQYLWGLQSTTTGTTLNAGTATTNFTKLRPTNFSNFKKNWLPGPSIKQQGFSKTANQNYKIPATGSDSLIKYETHSTLDGRWSARTPGPPMATAGPADSKFSNSQLIFAGPKQNGNTATVPGTLIFTSEEELAATNATDTDMWGNLPGGDQSNSNLPTVDRLTALGAVPGMVWQNRDIYYQGPIWAKIPHTDGHFHPSPLIGGFGLKHPPPQIFIKNTPVPANPATTFSSTPVNSFITQYSTGQVSVQIDWEIQKERSKRWNPEVQFTSNYGQQNSLLWAPDAAGKYTEPRAIGTRYLTHHL

SEQ ID NO: 835 - protein, 724 aa, synthetic construct
  REGION 1..724: note = Description of Artificial Sequence: Synthetic polypeptide
MSFVDHPPDWLEEVGEGLREFLGLEAGPPKPKPNQQHQDQARGLVLPGYNYLGPGNGLDRGEPVNRADEVAREHDISYNEQLEAGDNPYLKYNHADAEFQERLADDTSFGGNLGKAVFQAKKRVLEPFGLVEEGAKTAPTGKRIDDHFPKRKKARTEEDSKPSTSSDAEAGPSGSQQLQIPAQPASSLGADTMSAGGGGPLGDNNQGADGVGNASGDWHCDSTWMGDRVVTKSTRTWVLPSYNNHQYREIKSGSVDGSNANAYFGYSTPWGYFDFNRFHSHWSPRDWQRLINNYWGFRPRSLRVKIFNIQVKEVTVQDSTTTIANNLTSTVQVFTDDDYQLPYVVGNGTEGCLPAFPPQVFTLPQYGYATLNRDNTENPTERSSFFCLEYFPSKMLRTGNNFEFTYNFEEVPFHSSFAPSQNLFKLANPLVDQYLYRFVSTNNTGGVQFNKNLAGRYANTYKNWFPGPMGRTQGWNLGSGVNRASVSAFATTNRMELEGASYQVPPQPNGMTNNLQGSNTYALENTMIFNSQPANPGTTATYLEGNMLITSESETQPVNRVAYNVGGQMATNNQSSTTAPATGTYNLQEIVPGSVWMERDVYLQGPIWAKIPETEAHFHPSPAMGGFGLKHPPPMMLIKNTPVPGNITSFSDVPVSSFITQYSTGQVTVEMEWELKKENSKRWNPEIQYTNNYNDPQFVDFAPDSTGEYRTTRPIGTRYLTRPL

SEQ ID NO: 836 - protein, 724 aa, synthetic construct
  REGION 1..724: note = Description of Artificial Sequence: Synthetic polypeptide
MSFVDHPPDWLEEVGEGLREFLGLEAGPPKPKPNQQHQDQARGLVLPGYNYLGPGNGLDRGEPVNRADEVAREHDISYNEQLEAGDNPYLKYNHADAEFQEKLADDTSSGGNLGKAVFQAKKRVLEPFGLVEEGAKTAPTGKRIDDHFPKRKKARTEEDSKPSTSSDAEAGPSGSQQLQIPAQPASSLGADTMSAGGGGPLGDNNQGADGVGNASGDWHCDSTWMGDRVVTKSTRTWVLPSYNNHQYREIKSGSVDGSNANAYFGYSTPWGYFDFNRFHSHWSPRDWQRLINNYWGFRPRSLRVKIFNIQVKEVTVQDSTTTIANNLTSTVQVFTDDDYQLPYVVGNGTEGCLPAFPPQVFTLPQYGYATLNRDNTENPTERSSFFCLEYFPSKMLRTGNNFEFTYNFEEVPFHSSFAPSQNLFKLANPLVDQYLYRFVSTNNTGGVQFNKNLAGRYANTYKNWFPGPMGRTQGWNLGSGVNRASVSAFATTNRMELEGASYQVPPQPNGMTNNLQGSNTYALENTMIFNSQPANPGTTATYLEGNMLITSESETQPVNRVAYNVGGQMATNNQSSTTAPATGTYNLQEIVPGSVWMERDVYLQGPIWAKIPETGAHFHPSPAMGGFGLKHPPPMMLIKNTPVPGNITSFSDVPVSSFITQYSTGQVTVEMEWELKKENSKRWNPEIQYTNNYNDPQFVDFAPDSTGEYRTTRPIGTRYLTRPL

SEQ ID NO: 837 - protein, 724 aa, synthetic construct
  REGION 1..724: note = Description of Artificial Sequence: Synthetic polypeptide
MSFVDHPPDWLEEVGEGLREFLGLEAGPPKPKPNQQHQDQARGLVLPGYNYLGPGNGLDRGEPVNRADEVAREHDISYNEQLEAGDNPYLKYNHADAEFQEKLADDTSFGGNLGKAVFQAKKRVLEPFGLVEEGAKTAPTGKRIDDHFPKRKKARTEEDSKPSTSSDAEAGPSGSQQLQIPAQPASSLGADTMSAGGGGPLGDNNQGADGVGNASGDWHCDSTWMGDRVVTKSTRTWVLPSYNNHQYREIKSGSVDGSNANAYFGYSTPWGYFDFNRFHSHWSPRDWQRLINNYWGFRPRSLRVKIFNIQVKEVTVQDSTTTIANNLTSTVQVFTDDDYQLPYVVGNGTEGCLPAFPPQVFTLPQYGYATLNRDNTENPTERSSFFCLEYFPSKMLRTGNNFEFTYNFEEVPFHSSFAPSQNLFKLANPLVDQYLYRFVSTNNTGGVQFNKNLAGRYANTYKNWFPGPMGRTQGWNLGSGVNRASVSAFATTNRMELEGASYQVPPQPNGMTNNLQGSNTYALENTMIFNSQPANPGTTATYLEGNMLITSESETQPVNRVAYNVGGQMATNNQSSTTAPATGTYNLQEIVPGSVWMERDVYLQGPIWAKIPETGAHFHPSPAMGGFGLKHPPPMMLIKSTPVPGNITSFSDVPVSSFITQYSTGQVTVEMEWELKKENSKRWNPEIQYTNNYNDPQFVDFAPDSTGEYRTTRPIGTRYLTRPL

SEQ ID NO: 838 - protein, 724 aa, synthetic construct
  REGION 1..724: note = Description of Artificial Sequence: Synthetic polypeptide
MSFVDHPPDWLEEVGEGLREFLGPEAGPPKPKPNQQHQDQARGLVLPGYNYLGPGNGLDRGEPVNRADEVAREHDISYNEQLEAGDNPYLKYNHADAEFQEKLADDTSFGGNLGKAVFQAKKRVLEPFGLVEEGAKTAPTGKRIDDHFPKRKKVRTEEDSKPSTSSDAEAGPSGSQQLQIPAQPASSLGADTMSAGGGGPLGDNNQGADGVGNASGDWHCDSTWMGDRVVTKSTRTWVPPSYNNHQYREIKSGSVDGSNANAYFGYSTPWGYFDFNRFHSHWSPRDWQRLINNYWGFRPRSLRVKIFNIQVKEVTVQDSTTTIANNLTSTVQVFTDDDYQLPYVVGNGTEGCLPAFPPQVFTLPQYGYATLNRDNTENPTERSSFFCLEYFPSKMLRTGNNFEFTYNFEEVPFHSSFAPSQNLFKLANPLVDQYLYRFVSTNNTGGVQFNKNLAGRYANTYKNWFPGPMGRTQGWNLGSGVNRASVSAFATTNRMELEGASYQVPPQPNGMTNNLQGSNTYALENTMIFNSQPANPGTTATYLEGNMLITSESETQPVNRVACNVGGQMATNNQSSTTAPATGTYNLQEIVPGSVWMERDVYLQGPIWAKIPETGAHFHPSPAMGGFGLKHPPPMMLIKNTPVPGNITSFSDVPVSSFITQYSTGQVTVEMEWELKKENSKRWNPEIQYTNNYNDPQFVDFAPDSTGEYRTTRPIGTRYLTRPL

SEQ ID NO: 839 - protein, 724 aa, synthetic construct
  REGION 1..724: note = Description of Artificial Sequence: Synthetic polypeptide
MSFVDHPPDWLEEVGEGLREFLGLEAGPPKPKPNQQHQDQARGLVLPGYNYLGPGNGLDRGEPVNRADEVAREHDISYNEQLEAGDNPYLKYNHADAEFQEKLADDTSFGGNLGKAVFQAKKRVLEPFGLVEEGAKTAPTGKRIDDHFPKRKKARTEEDSKPSTSSDAEAGPSGSQQLQIPAQPASSLGADTMSAGGGGPLGDNNQGADGVGNASGDWHCDSTWMGDRVVTKSTRTWVLPSYNNHQYREIKSGSVDGSNANAYFGYSTPWGYFDFNRFHSHWSPRDWQRLINNYWGFRPRSLRVKIFNIQVKEVTVQDSTTTIANNLTSTVQVFTDDDYQLPYVVGNGTEGCLPAFPPQVFTLPQYGYATLNRDNTENPTERSSFFCLEYFPSKMLRTGNNFEFTYNFEEVPFHSSFAPSQNLFKLANPLVDQYLYRFVSTNNTGGVQFNKNLAGRYANTYKNWFPGPMGRTQGWNLGSGVNRASVSAFATTNRMELEGASYQVPPQPNGMTNNLQGSNTYALENTMIFNSQPANPGTTATYLEGNMLITSESETQPVNRVAYNVGGQMATNNQSSTTAPATGAYNLQEIVPGSVWMERDVYLQGPIWAKIPETGAHFHPSPAMGGFGLKHPPPMMLIKNTPVPGNITSFSDVPVSSFITQYSTGQVTVEMEWELKKENSKRWNPEIQYTNNYNDPQFVDFAPDSTGEYRTTRPIGTRYLTRPL

SEQ ID NO: 840 - protein, 724 aa, synthetic construct
  REGION 1..724: note = Description of Artificial Sequence: Synthetic polypeptide
MSFVDHPPDWLEEVGEGLREFLGLEAGPPKPKPNQQHQDQARGLVLPGYNYLGPGNGLDRGEPVNRADGVAREHDISYNEQLEAGDNPYLKYNHADAEFQEKLADDTSFGGNLGKAVFQAKKRVLEPFGLVEEGAKTAPTGKRIDDHFPKRKKARTEEDSKPSTSSDAEAGPSGSQQLQIPAQPASSLGADTMSAGGGGPLGDNNQGADGVGNASGDWHCDSTWMGDRVVTKSTRTWVLPSYNNHQYREIKSGSVDGSNANAYFGYSTPWGYFDFNRFHSHWSPRDWQRLINNYWGFRPRSLRVKIFNIQVKEVTVQDSTTTIANNLTSTVQAFTDDDYQLPYVVGNGTEGCLPAFPPQVFTLPQYGYATLNRDNTENPTERSSFFCLEYFPSKMLRTGNNFEFTYNFEEVPFHSSFAPSQNLFKLANPLVDQYLYRFVSTNNTGGVQFNKNLAGRYANTYKNWFPGPMGRTQGWNLGSGVNRASVSAFATTNRMELEGASYQVPPQPNGMTNNLQGSNTYALENTMIFNSQPANPGTTATYLEGNMLITSESETQPVNRVAYNVGGQMATNNQSSTTAPATGTYNLQEIVPGSVWMERDVYLQGPIWAKIPETGAHFHPSPAMGGFGLKHPPPMMLIKNTPVPGNITSFSDVPVSSFITQYSTGQVTVEMEWELKKENSKRWNPEIQYTNNYNDPQFVDFAPDSTGEYRTTRPIGTRYLTRPL

SEQ ID NO: 841 - protein, 723 aa, synthetic construct
  REGION 1..723: note = Description of Artificial Sequence: Synthetic polypeptide
MSFVDHPPDWLEEVGEGLREFLGLEAGPPKPKPNQQHQDQARGLVLPGYNYLGPGNGLDRGEPVNRADEVAREHDISYNEQLEAGDNPYLKYNHADAEFQEKLADDTSFGGNLGKAVFQAKKRVLEPFGLVEEGAKTAPTGKRIDDHFPKRKKARTEEDSKPSTSSDAEAGPSGSQQLQIPAQPASSLGADTMSAGGGGPLGDNNQGADGVGNASGDWHCDSTWMGDRVVTKSTRTWVLPSYNNHQYREIKSGSVDGSNANAYFGYSTPWGYFDFNRFHSHWSPRDWQRLINNYWGFRPRSLRVKIFNIQVKEVTVQDSTTTIANNLTSTVQVFTDDDYQLPYVVGNGTEGCLPAFPPQVFTLPQYGYATLNRDNTENPTERSSFFCLEYFPSKMLRTGNNFEFTYNFEEVPFHSSFAPSQNLFKLANPLVDQYLYRFVSTNNTGGVQFNKNLAGRYANTYKNWFPGPMGRTQGWNLGSGVNRASVSAFATTNRMELEGASYVPPQPNGMTNNLQGSNTYALENTMIFNSQPANPGTTATYLEGNMLITSESETQPVNRVAYNVGGQMATNNQSSTTAPATGTYNLQEIVPGSVWMEGDVYLQGPIWAKIPETGAHFHPSPAMGGFGLKHPPPMMLIKNTPVPGNITSFSDVPVSSFITQYSTGQVTVEMEWELKKENSKRWNPEIQYTNNYNDPQFVDFAPDSTGEYRTTRPIGTRYLTRPL

SEQ ID NO: 842 - protein, 724 aa, synthetic construct
  REGION 1..724: note = Description of Artificial Sequence: Synthetic polypeptide
MSFVDHPPDWLEEVGEGLREFLGLEAGPPKPKPNQQHQDQARGLVLPGYNYLGPGNGLDRGEPVNRADEVAREHDISYNEQLEAGDNPYLKYNHADAEFQEKLADDTSFGGNLGKAVFQAKKRVLEPFGLVEEGAKTAPTGKRIDDHFPKRKKVRTEEDSKPSTSSDAEAGPSGSQQLQIPAQPASSLGADTMSAGGGGPLGDNNQGADGVGNASGDWHCDSTWMGDRVVTKSTRTWVLPSYNNHQYREIKSGSVDGSNANAYFGYSTPWGYFDFNRFHSHWSPRDWQRLINNYWGFRPRSLRVKIFNIQVKEVTVQDSTTTIANNLTSTVQVFTDDDYQLPYVVGNGTEGCLPAFPPQVFTLPQYGYATLNRDNTENPTERSSFFCLEYFPSKMLRTGNNFEFTYNFEEVPFHSSFAPSQNLFKLANPLVDQYLYRFVSTNNTGGVQFNKNLAGRYANTYKNWFPGPMGRTQGWNLGSGVNRASVSAFATTNRMELEGASYQVPPQPNGMTNNLQGSNTYALENTMIFNSQPANPGTTATYLEGNMLITSESETQPVNRVAYNVGGQMATNNQSSTTAPATGTYNLQEIVPGSVWMERDVYLQGPIWAKIPETGAHFHPSPAMGGFGLKHPPPMMLIKNTPVPGNITSFSDVPVSSFITQYSTGQVTVEMEWELKKENSERWNPEIQYTNNYNDPQFVDFAPDSTGEYRTTRPIGTRYLTRPL

SEQ ID NO: 843 - protein, 724 aa, synthetic construct
  REGION 1..724: note = Description of Artificial Sequence: Synthetic polypeptide
MSFVDHPPDWLEEVGEGLREFLGLEAGPPKPKPNQQHQDQARGLVLPGYNYLGPGNGLDRGEPVNRADEVAREHDISYSEQLEAGDNPYLKYNHADAEFQEKLADDTSFGGNLGKAVFQAKKRVLEPFGLVEEGAKTAPTGKRIDDHFPKRKKARTEEDSKPSTSSDAEAGPSGSQQLQIPAQPASSLGADTMSAGGGGPLGDNNQGADGVGNASGDWHCDSTWMGDRVVTKSTRTWVLPSYNNHQYREIKSGSVDGSNANAYFGYSTPWGYFDFNRFHSHWSPRDWQRLINNYWGFRPRSLRVKIFNIQVKEVTVQDSTTTIANNLTSTVQVFTDDDYQLPYVVGNGTEGCLPAFPPQVFTLPQYGYATLNRDNTENPTERSSFFCLEYFPSKMLRTGNNFEFTYNFEEVPFHSSFAPSQNLFKLANPLVDQYLYRFVSTNNTGGVQFNKNLAGRYANTYKNWFPGPMGRTQGWNLGSGVNRASVSAFATTNRMELEGASYQVPPQPNGMTNNLQGSNTYALENTMIFNSQPANPGTTATYLEGNMLITSESETQPVNRVAYNVGGQMATNNQSSTTAPATGTYNLQEIVPGSVWMERDVYLQGPIWAKIPETGAHFHPSPAMGGFGLKHPPPMMLIKNTPVPGNITSFSDVPVSSFITQYSTGQVTVEMEWELKKENSKRWNPEIQYTNNYNDPQFVDFAPDSTGEYRTARPIGTRYLTRPL

SEQ ID NO: 844 - protein, 724 aa, synthetic construct
  REGION 1..724: note = Description of Artificial Sequence: Synthetic polypeptide
MSFVDHPPDWLEEVGEGLREFLGPEAGPPKPKPNQQHQDQARGLVLPGYNYLGPGNGLDRGEPVNRADEVAREHDISYNEQLEAGDNPYLKYNHADAEFQEKLADDTSFGGNLGKAVFQAKKRVLEPFGLVEEGAKTAPTGKRIDDHFPKRKKARTEEDSKPSTSSDAEAGPSGSQQLQIPAQPASSLGADTMSAGGGGPLGDNNQGADGVGNASGDWHCDSTWMGDRVVTKSTRTWVLPSYNNHQYREIKSGSVDGSNANAYFGYSTPWGYFDFNRFHSHWSPRDWQRLINNYWGFRPRSLRVKIFNIQVKEVTVQDSTTTIANNLTSTVQVFTDDDYQLPYVVGNGTEGCLPAFPPQVFTLPQYGYATLNRDNTENPTERSSFFCLEYFPSKMLRTGNNFEFTYNFEEVPFHSSFAPSQNLFKLANPLVDQYLYRFVSTNNTGGVQFNKNLAGRYANTYKNWFPGPMGRTQGWNLGSGVNRASVSAFATTNRMELEGASYQVPPQPNGMTNNLQGSNTYALENTMIFNSQPANPGTTATYLEGNMLITSESETQPVNRVAYNVGGQMTTNNQSSTTAPATGTYNLQEIVPGSVWMERDVYPQGPIWAKIPETGAHFHPSPAMGGFGLKHPPPMMLIKNTPVPGNITSFSDVPVSSFITQYSTGQVTVEMEWELKKENSKRWNPEIQYTNNYNDPQFVDFAPDSTGEYRTTRPIGTRYLTRPL

SEQ ID NO: 845 - protein, 724 aa, synthetic construct
  REGION 1..724: note = Description of Artificial Sequence: Synthetic polypeptide
MSFVDHPPDWLEEVGEGLREFLGLEAGPPKPKPNQQHQDQARGLVLPGYNYLGPGNGLDRGEPVNRADEVAREHDISYNEQLEAGDNPYLKYNHADAEFQEKLADDTSFGGNLGKAVFQAKKRVLEPFGLVEEGAKTAPTGKRIDDHFPKRKKARTEEDSKPSTSSDAEAGPSGSQQLQIPAQPASSLGADTMSAGGGGPLGDNNQGADGVGNASGDWHCDSTWMGDRVVTKSTRTWVLPSYNNHQYREIKSGSVDGSNANAYFGYSTPWGYFDFNRFHSHWSPRDWQRLINNYWGFRPRSLRVKIFNIQVKEVTVQDSTTTIANNLTSTVQVFTDDDYQLPYVVGNGTEGCLPAFPPQVFTLPQYGYATLNRDNTENPTERSSFLCLEYFPSKMLRTGNNFEFTYNFEEVPFHSSFAPSQNLFKLANPLVDQYLYRFVSTNNTGGVQFNKNLAGRYANTYKNWFPGPMGRTQGWNLGSGVNRASVSAFATTNRMELEGASYQVPPQPNGMTNNLQGSNTYALENTMIFNSQPANPGTTATYLEGNMLITSESETQPVNRVAYNVGGQMATNNQSSTTAPATGTYNLQEIVPGSVWMKRDVYLQGPIWAKIPETGAHFHPSPAMGGFGLKHPPPMMLIKNTPVPGNITSFSDVPVSSFITQYSTGQVTVEMEWELKKENSKRWNPEIQYTNNYNDPQFVDFAPDSTGEYRTTRPIGTRYLTRPL

SEQ ID NO: 846 - protein, 724 aa, synthetic construct
  REGION 1..724: note = Description of Artificial Sequence: Synthetic polypeptide
MSFVDHPPDWLEEVGEGLREFLGLEAGPPKPKPNQQHQDQARGLVLPGYNYLGPGNGLDRGEPVNRADEVAREHDISYNEQLEAGDNPYLKYNHADAEFQEKLADDTSFGGNLGKAVFQAKKRVLEPFGLVEEGAKTAPTGKRIDDHFPKRKKARTEEDSKPSTPSDAEAGPSGSQQLQIPAQPASSLGADTMSAGGGGPLGDNNQGADGVGNASGDWHCDSTWMGDRVVTKSTRTWVLPSYNNHQYREIKSGSVDGSNANAYFGYSTPWGYFDFNRFHSHWSPRDWQRLINNYWGFRPRSLRVKIFNIQVKEVTVQDSTTTIANNLTSTVQVFTDDDYQLPYVVGNGTEGCLPAFPPQVFTLPQYGYATLNRDNTENPTERSSFFCLEYFPSKMLRTGNNFEFTYNFEEVPFHSSFAPSQNLFKLANPLVDQYLYRFVSTNNTGGVQFNKNLAGRYANTYKNWFPGPMGRTQGWNLGSGVNRASVSAFATTNRMELEGASYQVPPQPNGMTNNLQGSNTYALENTMIFNSQPANPGTTATYLEGNMLITSESETQPVNRVAYNVGGQMATNNQSSTTAPATGTYNLQEIVPGSVWMERDVYLQGPIWAKIPETGAHFHPSPAMGGFGLKHPPPMMLIKNTPVPGNITSFSDVPVSSFITQYSTGQVTVEMEWELKKENSKRWNPEIQYTNNYNDPQFVDFAPDSTGEYRTTRPIGTRYLTRPL

SEQ ID NO: 847 - protein, 724 aa, synthetic construct
  REGION 1..724: note = Description of Artificial Sequence: Synthetic polypeptide
MSFVDHPPDWLEEVGEGLREFLGLEAGPPKPKPNQQHQDQARGLVLPGYNYLGPGNGLDRGEPVNRADEVAREHDISYNEQLEAGDNPYLKYNHADAEFQEKLADDTSFGGNLGKAVFQAKKRVLEPFGLVEEGAKTAPTGKRIDDHFPKRKKARTEEDSKPSTSSDAEAGPSGSQQLQIPAQPASSLGADTMSAGGGGPLGDNNQGADGVGNASGDWHCDSTWMGDRVVTKSTRTWVLPSYNNHQYREIKSGSVDGSNANAYFGYSTPWGYFDFNRFHSHWSPRDWQRLINNYWGFRPRSLRVKIFNIQVKEVTVQDSTTTIANNLTSTVQVFTDDDYQLPYVVGNGTEGCLPAFPPQVFTLPQYGYATLNRDNTENPTERSSFFCLEYFPSKMLRTGNNFEFTYNFEEVPFHSSFAPSQNLFKLANPLVDQYLYRFVSTNNTGGVQFNKNLAGRYANTHKNWFPGPMGRTQGWNLGSGVNRASVSAFATTNRMELEGASYQVPPQSNGMTNNLRGSNTYALENTMIFNSQPANPGTTATYLEGNMLITSESETQPVNRVAYNVGGQMATNNQSSTTAPATGTYNLQEIVPGSVWMERDVYLQGPIWAKIPETGAHFHPSPAMGGFGLKHPPPMMLIKNTPVPGNITSFSDVPVSSFITQYSTGQVTVEMEWELKKENSKRWNPEIQYTNNYNDPQFVDFAPDSTGEYRTTRPIGTRYLTRPL

SEQ ID NO: 848 - protein, 724 aa, synthetic construct
  REGION 1..724: note = Description of Artificial Sequence: Synthetic polypeptide
MSFVDHPPDWLEEVGEGLREFLGLEAGPPKPKPNQQHQDQARGLVLPGYNYLGPGNGLDRGEPVNRADEVAREHDISYNEQLEAGDNPYLKYNHADAEFQEKLADDTSFGGNLGKAVFQAKKRVLEPFGLVEEGAKTAPTGKRIDDHFPKRKKARTEEDSKPSTSSDAEAGPSGSQQLQIPAQPASSLGADTMSAGGGGPLGDNNQGADGVGNASGDWHCDSTWMGDRVVTKSTRTWVLPSYNNHQYREIKSGSVDGSNANAYFGYSTPWGYFDFNRFHSHWSPRDWQRLINNYWGFRPRSLRVKIFNIQVKEVTVQDSTTTIANNLTSTVQVFTDDDYQLPYVVGNGTEGCLPAFPPQVFTLPQYGYATLNRDNTENPTERSSFFCLEYFPSKMLRTGNNFEFTYNFEEVPFHSSFAPSQNLFKLANPLVDQYLYRFVSTNNTGGVQFNKNLAGRYANTYKNWFPGPMGRTQGWNLGSGVNRASVSAFATTNRMELEGASYQVPPQPNGMTNNLQGSNTYALENTMIFNSQPANPGTTATYLEGNMLITSESETQPVNRVAYSVGGQMATNNQSSTTAPTTGTYNLQEIVPGSVWMERDVYLQGPIWAKIPETGAHFHPSPAMGGFRLKHPPPMMLIKNTPVPGNITSFSDVPVSSFITQYSTGQVTVEMEWELKKENSKRWNPEIQYTNNYNDPQFVDFAPDSTGEYRTTRPIGTRYLTRPL

SEQ ID NO: 849 - protein, 724 aa, synthetic construct
  REGION 1..724: note = Description of Artificial Sequence: Synthetic polypeptide
MSFVDHPPDWLEEVGEGLREFLGLEAGPPKPKPNQQHQDQARGLVLPGYNYLGPGNGLDRGEPVNRADEVAREHDISYNEQLEAGDNPYLKYNHADAEFQEKLADDTSFGGNLGKAVFQAKKRVLEPFGLVEEGAKTAPTGKRIDDHFPKRKKARTEEDSKPSTSSDAEAGPSGSQQLQIPAQPASSLGADTMSAGGGGPLGDNNQGADGVGNASGDWHCDSTWMGDRVVTKSTRTWVLPSYNNHQYREIKSGSVDGSNANAYFGYSTPWGYFDFNRFHSHWSPRDWQRLINNYWGFRPRSLRVKIFNIQVKEVTVQDSTTTIANNLTSTVQVFTDDDYQLPYVVGNGTEGCLPAFPPQVFTLPQYGYATLNRDNTENPTERSSFFCLEYFPSKMLRTGNNFEFTYNFEEVPFHSSFAPSQNLFKLANPLVDQYLYRFVSTNNTGGVQFNKNLAGRYANTYKNWFPGPMGRTQGWNLGSGVNRASVSAFAATNRMELEGASYQVPPQPNGMTNNLQGSNTYALENTMIFNSQPANPGTTATYLEGNMLITSESETQPVNRVAYNVGGQMATNNQSSTTAPATGTYNLQEIVPGGVWMERDVYLQGPIWAKIPETGAHFHPSPAMGGFGLKHPPPMMLIKNTPVPGNTTSFSDVPVSSFITQYSTGQVTVEMEWELKKENSKRWNPEIQYTNNYNDPQFVDFAPDSTGEYRTTRPIGTRYLTRPL

SEQ ID NO: 850 - protein, 724 aa, synthetic construct
  REGION 1..724: note = Description of Artificial Sequence: Synthetic polypeptide
MSFVDHPPDWLEEVGEGLREFLGLEAGPPKPKPNQQHQDQARGLVLPGYNYLGPGNGLDRGEPVNRADEVAREHDISYNEQLEAGDNPYLKYNHADAEFQEKLADDTSFGGNLGKVVFQAKKRVLEPFGLVEEGAKTAPTGKRIDDHFPKRKKARTEEDSKPSTSSDAEAGPSGSQQLQIPAQPASSLGADTMSAGGGGPLGGNNQGADGVGNASGDWHCDSTWMGDRVVTKSTRTWVLPSYNNHQYREIKSGSVDGSNANAYFGYSTPWGYFDFNRFHSHWGPRDWQRLINNYWGFRPRSLRVKIFNIQVKEVTVQDSTTTIANNLTSTVQVFTDDDYQLPYVVGNGTEGCLPAFPPQVFTLPQYGYATLNRDNTENPTERSSFFCLEYFPSKMLRTGNNFEFTYNFEEVPFHSSFAPSQNLFKLANPLVDQYLYRFVSTNNTGGVQFNKNLAGRYANTYKNWFPGPMGRTQGWNLGSGVNRASVSALATTNRMELEGASYQVPPQPNGMTNNLQGSNTYALENTMIFNSQPANPGTTATYLEGNMLITSESETQPVNRVAYNVGGQMATNNQSSTTAPATGTYNLQEIVPGSVWMERDVYLQGPIWAKIPETGAHFHPSPAMGGFGLKHPPPMMLIKNTPVPGNITSFSDVPVSSFITQYSTGQVTVEMEWELKKENSKRWNPEIQYTNNYNDPQFVDFAPDSTGEYRTTRPIGTRYLTRPL

SEQ ID NO: 851 - protein, 723 aa, synthetic construct
  REGION 1..723: note = Description of Artificial Sequence: Synthetic polypeptide
MSFVDHPPDWLEEVGEGLREFLGLEAGPPKPKPNQQHQDQARGLVLPGYNYLGPGNGLDRGEPVNRADEVAREHDISYNEQLEAGDNPYLKYNHADAEFQEKLADDTSFGGNLGKAVFQAKKRVLEPFGLVEEGAKTAPTGKRIDDHFPKRKKARTEEDSKPSTSSDAEAGPSGSQQLQIPAQPASSLGADTMSAGGGGPLGDNNQGADGVGNASGDWHCDSTWMGDRVVTKSTRTWVLPSYNNHQYREIKSGSVDGSNANAYFGYSTPWGYFDFNRFHSHWSPRDWQRLINNYWGFRPRSLRVKIFNIQVKEVTVQDSTTTIANNLTSTVQVFTDDDYQLPYVVGNGTEGCLPAFPPQVFTLPQYGYATLNRDNTENPTERSSFFCLEYFPSKMLRTGNNFEFTYNFEEVPFHSSFAPSQNLFKLANPLVDQYLYRFVSTNNTGGVQFNKNLAGRYANTYKNWFPGPMGRTQGWNLGSGVNRASVSAFATTNRMELEGASYQVPPQPNGMTNNLQGSNTYALENTMIFNSQPANPGTTATYLEGNMLITSESETQPVNRVAYNVGGQMATNNQSSTTAPATGTYNLQEIVPGSVWMERDVYLQGPIAKIPETGAHFHPSPAMGGFGLKHPPPMMLIKNTPVPGNITSFSDVPVSSFITQYSTGQVTVEMEWELKKENSKRWNPEIQYTNNYNDPQFVDFAPDSTGECRTTRPIGTRYLTRPL

SEQ ID NO: 852 - protein, 724 aa, synthetic construct
  REGION 1..724: note = Description of Artificial Sequence: Synthetic polypeptide
MSFVDHPPDWLEEVGEGLREFLGLEAGPPKPKPNQQHQDQARGLVLPGYNYLGPGNGLDRGEPVNRADEVAREHDISYNEQLEAGDNPYLKYNHADAEFQEKLADDTSFGGNLGKAVFQAKKRVLEPFGLVEEGAKTAPTGKRIDDHFPKRKKARTEEDSKPSTSSDAEAGPSGSQQLQIPAQPASSLGADTMSAGGGGPLGDNNQGADGVGNASGDWHCDSTWMGDRVVTKSTRTWVLPSYNNHQYREIKSGSVDGSNANAYFGYSTPWGYFDFNRFHSHWSPRDWQRLINNYWGFRPRSLRVKILNIQVKEVTVQDSTTTIANNLTSTVQVFTDDDYQLPYVVGNGTEGCLPAFPPQVFTLPQYGYATLNRDNTENPTERSSFFCLEYFPSKMLRTGNNFEFTYNFEEVPFHSSFAPSQNLFKLANPLVGQYLYRFVSTNNTGGVQFNENLAGRYANTYKNWFPGPMGRTQGWNLGSGVNRASVSAFATTNRMELEGASYQVPPQPNGMTNNLQGSNTYALENTMIFNSQPANPGTTATYLEGNMLITSESETQPVNRVAYNVGGQMATNNQSSTTAPATGTYNLQEIVPGSVWMERDVYLQGPIWAKIPETGAHFHPSPAMGGFGLKHPPPMMLIKNTPVPGNITSFSDVPVSSFITQYSTGQATVEMEWELKKENSKRWNPEIQYTNNYNDPQFVDFAPDSTGEYRTTRPIGTRYLTRPL

SEQ ID NO: 853 - protein, 724 aa, synthetic construct
  REGION 1..724: note = Description of Artificial Sequence: Synthetic polypeptide
MSFVDHPPDWLEEVGEGLREFLGLEAGPPKPKPNQQHQDQARGLVLPGYNYLGPGNGLDRGEPVNRADEVAREHDISYNEQLEAGDNPYLKYNHADAEFQEKLADDTSFGGNLGKAVFQAKKRVLEPFGLVEEGAKTAPTGKRIDDHFPKRKKARTEEDSKPSTSSDAEAGPSGSQQLQIPAQPASSLGADTMSAGGGGPLGDNNQGADGVGNASGDWHCDSTWMGDRVVTKSTRTWVLPSYNNHQYREIKSGSVDGSNANAYFGYSTPWGYFDFNRFHSHWSPRDWQRLINNYWGFRPRSLRVKIFNIQVKEVTVQDSTTIIANNLTSTVQVFTDDDYQLPYVVGNGTEGCLPAFPPQVFTLPQYGYATLNRDNTENPTERSSFFCLEYFPSKMLRTGNNFEFTYNFEEVPFHSSFAPSQNLFKLANPLVDQYLYRFVSTNNTGGVQFNKNLAGRYANTYKNWFPGPMGRTQGWNLGSGVNRASVSAFATTNRMELEGASYQVPPQPNGMTNNLQGSNTYALENTMIFNSQPANPGTTATYLEGNMLITSESETQPVNRVAYNVGGQMATNNQSSTTAPATGTYNLQEIVPGSVWMERDVYLQGPIWAKIPETGAHFHPSPAMGGFGLKHPPPMMLIKNTPVPGNITSFSDVPVSSFITQYSTGQVTVEMEWELKKENSKRWNPEIQYTNNYNDPQFVDFAPDSTGEYRTTRPIGTRYLTRPL

SEQ ID NO: 854 - protein, 724 aa, synthetic construct
  REGION 1..724: note = Description of Artificial Sequence: Synthetic polypeptide
MSFVDHPPDWLEEVGEGLREFLGLEAGPPKPKPNQQHQDQARGLVLPGYNYLGPGNGLDRGEPVNRADEVAREHDISYNEQLEAGDNPYLKYNHADAEFQEKLADDTSFGGNLGKAVFQAKKRVLEPFGLVEEGAKTAPTGKRIDDHFPKRKKARTEEDSKPSTSSDAEAGPSGSQQLQIPAQPASSLGADTMSAGGGGPLGDNNQGADGVGNASGDWHCDSTWMGDRVVTKSTRTWVLPSYNNHQYREIKSGSVDGSNANAYFGYSTPWGYFDFNRFHSHWSPRDWQRLINNYWGFRPRSLRVKIFNIQVKEVTVQDSTTTIANNLTSTVQVFTDDDYQLPYVVGNGTEGCLPAFPPQVFTLPQYGYATLNRDNTENPTERSSFFCLEYFPSKMLRTGNNFEFTYNFEEVPFHSSFAPSQNLFKLANPLVDQYLYRFVSTNNTGGVQFNKNLAGRYANTYKNWFPGPMGRTQGWNLGSGVNRASVSAFATTNRMELEGASYQVPPQPNGMTNNLQGSNTYALENTMIFNSQPANPGTTATYLEGNMLITSESETQPVNRVAYNVGGQMATNNQSSTTAPATGTYNLQEIVPGSVWMERDVYLQGPIWAKIPETGAHFHPSPAMGGFGLKHPPPMMLIKNTPVPGNITSLSDVPVSSFITQYSTGQVTVEMEWELKKENSKRWNPEIQYTNNYNDPQFVDFAPDSTGEYRTTRPIGTRYLTRPL

SEQ ID NO: 855 - protein, 724 aa, synthetic construct
  REGION 1..724: note = Description of Artificial Sequence: Synthetic polypeptide
MSFVDHPPDWLEEVGEGLREFLGLEAGPPKPKPNQQHQDQARGLVLPGYNYLGPGNGLDRGEPANRADEVAREHDISYNEQLEAGDNPYLKYNHAGAEFQEKLADDTSFGGNLGKAVFQAKKRVLEPFGLVEEGAKTAPTGKRIDDHFPKRKKARTEEDSKPSTSSDAEAGPSGSQQLQIPAQPASSLGADTMSAGGGGPLGDNNQGADGVGNASGDWHCDSTWMGDRVVTKSTRTWVLPGYNNHQYREIKSGSVDGSNANAYFGYSTPWGYFDFNRFHSHWSPRDWQRLINNYWGFRPRSLRVKIFNIQVKEVTVQDSTTTIANNLTSTVQVFTDDDYQLPYVVGNGTEGCLPAFPPQVFTLPQYGYATLNRDNTENPTERSSFFCLEYFPSKMLRTGNNFEFTYNFEEVPFHSSFAPSQNLFKLANPLVDQYLYRFVSTNNTGGVQFNKNLAGRYANTYKNWFPGPMGRTQGWNLGSGVNRASVSAFATTNRMELEGASYQVPPQPNGMTNNLQGSNTYALENTMIFNSQPANPGTTATYLEGNMLITSESETQPVNRVAYNVGGQMATNNQSSTTAPATGTYNLQEIVPGSVWMERDVYLQGPIWAKIPETGAHFHPSPAMGGFGLKHPPPMMLIKNTPVPGNITSFSDVPVSSFITQYSTGQVTVEMEWELKKENSKRWNPEIQYTNNYNDPQFVDFAPDSTGEYRTTRPIGTRYLTRPL

SEQ ID NO: 856 - protein, 724 aa, synthetic construct
  REGION 1..724: note = Description of Artificial Sequence: Synthetic polypeptide
MSFVDHPPDWLEEVGEGLREFLGLEAGPPKPKPNQQHQDQARGLVLPGYNYLGPGNGLDRGEPVNRADEVAREHDISYNEQLEAGDNPYLKYNHADAEFQEKLADDTSFGGNLGKAVFQAKKRVLEPFGLVEEGAKTAPTGKRIDDHFPKRKKARTEEDSKPPTSSDAEAGPSGSQQLQIPAQPASSLGADTMSAGGGGPLGDNNQGADGVGNASGDWHCDSTWMGDRVVTKSTRTWVLPSYNNHQYREIKSGSVDGSNANAYFGYSTPWGYFDFNRFHSHWSPRDWQRLINNYWGFRPRSLRVKIFNIQVKEVTVQDSATTIANNLTSTVQVFTDDDYQLPYVVGNGTEGCLPAFPPQVFTLPQYGYATLNRDNTENPTERSSFFCLEYFPSKMLRTGNNFEFTYNFEEVPFHSSFAPSQNLFKLANPLVDQYLYRFVSTNNTGGVQFNKNLAGRYANTYKNWFPGPMGRTQGWNLGSGVNRASVSAFATTNRMELEGASYQVPPQPNGMTNNLQGSNTYALENTMIFNSQPANPGTTATYLEGNMLITSESETQPVNRVAYNVGGQMATNNQSSTTAPATGTYNLQEIVPGSVWMERDVYLQGPIWAKIPETGAHFHPSPAMGGFGLKHPPPMMLIKNTPVPGNITSFSDVPVSSFITQYSTGQVTVEMEWELKKENSKRWNPEIQYTNNYNDPQFVDFAPDSTGEYRTTRPIGTRYLTRPL

SEQ ID NO: 857 - protein, 724 aa, synthetic construct
  REGION 1..724: note = Description of Artificial Sequence: Synthetic polypeptide
MSFVDHPPDWLEEVGEGLREFLGLEAGPPKPKPNQQHQDQARGLVLPGYNYLGPGNGLDRGEPVNRADEVAREHDISYNEQLEAGDNPYLKYNHADAEFQEKLADDTSFGGNLGKAVFQAKKRVLEPFGLVEEGAKTAPTGKRIDDHFPKRKKARTEEDSKPSTSSDAEAGPSGSQQPQIPAQPASSLGADTMSAGGGGPLGDNNQGADGVGNASGDWHCDSTWMGDRVVTKSTRTWVLPSYNNHQYREIKSGSVDGSNANAYFGYSTPWGYFDFNRFHSHWSPRDWQRLINNYWGFRPRSLRVKIFNIQVKEVTVQDSTTTIANNLTSTVQVFTDDDYQLPYVVGNGTEGCLPAFPPQVFTLPQYGYATLNRDNTENPTERSSFFCLEYFPSKMLRTGNNFEFTYNFEEVPFHSSFAPSQNLFKLANPLVDQYLYRFVSTNNTGGVQFNKNLAGRYANTYKNWFPGPMGRTQGWNLGSGVNRASVSAFATTNRMELEGASYQVPPQPNGMTNNLQGSNTYALENTMIFNSQPANPGTTATYLEGNMLITSESETQPVNRVAYNVGGQMATNNQSSTTAPATGTYNLQEIVPGSVWMERDVYLQGPIWAKIPETGAHFHPSPAMGGFGLKHPPPMMLIKNTPAPGNITSFSDVPVSSFITQYSTGQVTVEMEWELKKENSKRWNPEIQYTNNYNDPQFVDFAPDSTGEYRTTRPIGTRYLTRPL

SEQ ID NO: 858 - protein, 724 aa, synthetic construct
  REGION 1..724: note = Description of Artificial Sequence: Synthetic polypeptide
MSFVDHPPDWLEEVGEGLREFLGLEAGPPKPKPNQQHQDQARGLVLPGYNYLGPGNGLDRGEPVNRADEVAREHDISYNEQLEAGDNPYLKYNHADAEFQEKLADDTSFGGNLGKAVFQAKKRVLEPFGLVEEGAKTAPTGKRIDDHFPKRKKARTEEDSKPPTSSDAEAGPSGSQQLQIPAQPASSLGADTMSAGGGGPLGDNNQGADGVGNASGDWHCDSTWMGDRVVTKSTRTWVLPSYNNHQYREIKSGSVDGSNANAYFGYSTPWGYFDFNRFHSHWSPRDWQRLINNYWGFRPRSLRVKIFNIQVKEVTVQDSTTTIANNLTSTVQVFTDDDYQLPYVVGNGTEGCLPAFPPQVFTLPQYGYATLNRDNTENPTERSSFFCLEYFPSKMLRTGNNFEFTYNFEEVPFHSSFAPSQNLFKLANPLVDQYLYRFVSTNNTGGVQFNKNLAGRYANTYKNWFPGPMGRTQGWNLGSGVNRASVSAFATTNRMELEGASYQVPPQPNGMTNNLQGSNTYALENTMIFNSQPANPGTTATYLEGNMLITSESETQPVNRVAYNVGGQMATNNQSSTTAPATGTYNLQEIVPGSVWMERDVYLQGPIWAKIPETGAHFHPSPAMGGFGLKHPPPMMLIKNTPVPGNITSFSDVPVSSFITQYSTGQVTVEMEWELKKENSKRWNPEIQYTNNYNDPQFVDFAPDSTGEYRTTRPIGTRYLTRPL

SEQ ID NO: 859 - protein, 724 aa, synthetic construct
  REGION 1..724: note = Description of Artificial Sequence: Synthetic polypeptide
MSFVDHPPDWLEEVGEGLREFLGLEAGPPKPKPNQQHQDQARGLVLPGYNYLGPGNGLDRGEPVNRADEVAREHDISYNEQLEAGDNPYLKYNHADAEFQEKLADDTSFGGNLGKAVFQAKKRVLEPFGLVEEGAKTAPTGKRIDDHFPKRKKARTEEDSKPPTSSDAEAGPSGSQQLQIPAQPASSLGADTMSAGGGGPLGDNNQGADGVGNASGDWHCDSTWMGDRVVTKSTRTWVPPSYNNHQYREIKSGSVDGSNANAYFGYSTPWGYFDFNRFHSHWSPRDWQRLINNYWGFRPRSLRVKIFNIQVKEVTVQDSTTTIANNLTSTVQVFTDDDYQLPYVVGNGTEGCLPAFPPQVFTLPQYGYATLNRDNTENPTERSSFFCLEYFPSKMLRTGNNFEFTYNFEEVPFHSSFAPSQNLFKLANPLVDQYLYRFVSTNNTGGVQFNKNLAGRYANTYKNWFPGPMGRTQGWNLGSGVNRASVSAFATTNRMELEGASYQVPPQPNGMTNNLQGSNTYALENTMIFNSQPANPGTTATYLEGNMLITSESETQPVNRVAYNVGGQMATNNQSSTTAPATGTYNLQEIVPGSVWMERDVYLQGPIWAKIPETGAHFHPSPAMGGFGLKHPPPMMLIKNTPVPGNITSFSDVPVSSFITQYSTGQVAVEMEWELKKENSKRWNPEIQYTNNYNDPQFVDFAPDSTGEYRTTRPIGTRYLTRPL

SEQ ID NO: 860 - protein, 724 aa, synthetic construct
  REGION 1..724: note = Description of Artificial Sequence: Synthetic polypeptide
MSFVDHPPDWLEEVGEGLREFLGLEAGPPKPKPNQQHQDQARGLVLPGYNYLGPGNGLDRGEPVNRADEVAREHDISYNEQLEAGDNPYLKYNHADAEFQEKLADDTSFGGNLGKAVFQAKKRVLEPFGLVEEGAKTAPTGKRIDDHFPKRKKARTEEDSKPSTSSDAEAGPSGSQQLQIPAQPASSLGADTMSAGGGGPLGDNNQGADGVGNASGDWHCDSTWMGDRVVTKSTRTWVLPSYNNHQYREIKSGSVDGSNANAYFGYSTPWGYFDFNRFHSHWSPRDWQRLINNYWGFRPRSLRVKIFNIQVKEVTVQDSTTTIANNLTSTVQVFTDDDYQLPYVVGNGTEGCLPAFPPQVFTLPQYGYATLNRDNTENPTERSSFFCLEYFPSKMLRTGNNFEFTYNFEEVPFHSSFAPSQNLFKLANPLVDQYLYRFVSTNNTGGVQFNKNLAGRYANTYKNWFPGPMGRTQGWNLGSGVNRASVSAFATTNRMELEGASYQVPPQPNGMTNNLQGSNTYALENTMIFNSQPANPGTTATYLEGNMLITSESETQPVNRVAYNVGGQMATNNQSSTTAPATGTYNLQEIVPGSVWMERDVYLQGPIWAKIPETGAHFHPSPAMGGFGLKHPPPMMLIKNTPAPGNITSFSDVPVSSFITQYSTGQVTVEMEWELKKENSKRWNPEIQYTNNYNDPQFVDFAPDSTGEYRTTRPIGTRYLTRPL

SEQ ID NO: 861 - protein, 724 aa, synthetic construct
  REGION 1..724: note = Description of Artificial Sequence: Synthetic polypeptide
MSFVDHPPDWLEEVGEGLREFLGLEAGPPKPKPNQQHQDQARGLVLPGYNYLGPGNGLDRGEPVNRADEVAREHDISYNEQLEAGDNPYLKYNHADAEFQEKLADDTSFGGNLGKAVFQAKKRVLEPFGLAEEGAKTAPTGKRIDDHFPKRKKARTEEDSKPSTSSDAEAGPSGSQQLQIPAQPASSLGADTMSAGGGGPLGDNNQGADGVGNASGDWHCDSTWMGDRVVTKSTRTWVLPSYNNHQYREIKSGSVDGSNANAYFGYSTPWGYFDFNRFHSHWSPRDWQRLINNYWGFRPRSLRAKIFNIQVKEVTVQDSTTTIANNLTSTVQVFTDDDYQLPYVVGNGTEGCLPAFPPQVFTLPQYGYATLNRDNTENPTERSSFFCLEYFPSKMLRTGNNLEFTYNFEEVPFHSSFAPSQNLFKLANPLVDQYLYRFVSTNNTGGVQFNKNLAGRYANTYKNWFPGPMGRTQGWNLGSGVNRASVSAFATTNRMELEGASYQVPPQPNGMTNNLQGSNTYALENTMIFNSQPANPGTTATYLEGNMLITSESETQPVNRVVHNVGGQMATNNQSSTTAPATGTYNLQEIVPGSVWMERDVYLQGPIWAKIPETGAHFHPSPAMGGFGLKHPPPMMLIKNTPVPGNITSFSDVPVSSFITQYSTGQVTVEMEWELKKENSKRWNPEIQYTNNYNDPQFVDFAPDSTGEYRTTRPIGTRYLTRPL

SEQ ID NO: 862 - protein, 724 aa, synthetic construct
  REGION 1..724: note = Description of Artificial Sequence: Synthetic polypeptide
MSFVDHPPDWLEEVGEGLREFLGLEAGPPKPKPNQQHQDQARGLVLPGYNYLGPGNGLDRGEPVNRADEVAREHDISYNEQLEAGDNPYLKYNHADAEFQEKLADDTSFGGNLGKAVFQAKKRVLEPFGLVEEGAKTAPTGKRIDDHFPKRKKARTEEDSKPSTSSDAEAGPSGSQQLQIPAQPASSLGADTMSAGGGGPLGDNNQGADGVGNASGDWHCDSTWMGDRVVTKSTRTWVLPSYNNHQYREIKSGSVDGGNANAYFGYSTPWGYFDFNRFHSHWSPRDWQRLINNYWGFRPRSLRVKIFNIQVKEVTVQDSTTTIANNLTSTVQVFTDDDYQLPYVVGNGTEGCLPAFPPQVFTLPQYGYATLNRDNTENPTERSSFFCLEYFPSKMLRTGNNFEFTYNFEEVPFHSSFAPSQNLFKLANPLVDQYLYRFVSTNNTGGVQFNKNLAGRYANTYKNWFPGPMGRTQGWNLGSGVNRASVSAFATTNRMELEGASYQVPPQPNGMTNNLQGSNTYALENTMIFNSQPANPGTTATYLEGNMLITSESETQPVNRVAYNVGGQMATNNQSSTTAPATGTYNLQEIVPGSVWMERDVYLQGPIWAKIPETGAHFHPSPAMGGFGLKHPPPMMLIKNTPAPGNITSFSDVPVSSFITQYSTGQVTVEMEWELKKGNSKRWNPEIQYTNNYNDPQFVDFAPDSTGEYRTTRPIGTRYLTRPL

SEQ ID NO: 863 - protein, 724 aa, synthetic construct
  REGION 1..724: note = Description of Artificial Sequence: Synthetic polypeptide
MSFVDHPPDWLEEVGEGLREFLGLEAGPPKPKPNQQHQDQARGLVLPGYNYLGPGNGLDRGEPVNRADEVAREHDISYNEQLEAGDNPYLKYNHADAEFQEKLADDTSFGGNLGKAVFQAKKRVLEPFGLVEEGAKTAPTGKRIDDHFPKRKKARTEEDSKPSTSSDAEAGPSGSQQLQIPAQPASSLGADTMSAGGGGPLGDNNQGADGVGNASGDWHCDSTWMGDRVVTKSTRTWVLPSYNNHQYREIKSGSVDGSNANAYFGYSTPWGYFDFNRFHSHWSPRDWQRLINNYWGFRPRSLRVKIFNIQVKEVTVQDSTTTIANNLTSTVQVFTDDDYQLPYVVGNGTEGCLPAFPPQVFTLPQYGYATLNRDNTENPTERSSFFCLEYFPSKMLRTGNNFEFTYNFEEVPFHSSFAPSQNLFKLANPLVDQYLYRFVSTNNTGGVQFNKNLAGRYANTYKNWFPGPMGRTQGWNLGSGVNRASVSAFATTNRMELEGASYQVPPQPNGMTNNLQGSNTYALENTMIFNSQPANPGTTATYLEGNMLITSESETQPVNRVAYNVGGQMATNNQSSTTAPATGTYNLQEIVPGSVWMERDVYLQGPIWAKIPETGVHFHPSPAMGGFGLKHPPPMMLIKNTPVPGNITSFSDVPVSSFITQYSTGQVTVEMEWELKKENSKRWNPEIQYTNNYNDPQFVDFAPDSTGEYRTTRPIGTRYLTRPL

SEQ ID NO: 864 - protein, 724 aa, synthetic construct
  REGION 1..724: note = Description of Artificial Sequence: Synthetic polypeptide
  VARIANT 551: note = Xaa = any amino acid
MSFVDHPPDWLEEVGEGLREFLGLEAGPPKPKPNQQHQDQARGLVLPGYNYLGPGNGLDRGEPVNRADEVAREHDISYNEQLEAGDNPYLKYNHADAEFQEKLADDTSFGGNLGKAVFQAKKRVLEPFGLVEEGAKTAPTGKRIDDHFPKRKKARTEEDSKPSTSSDAEAGPSGSQQLQIPAQPASSLGADTMSAGGGGPLGDNNQGADGVGNASGDWHCDSTWMGDRVVTKSTRTWVLPSYNNHQYREIKSGSVDGSNANAYFGYSTPWGYFDFNRFHSHWSPRDWQRLINNYWGFRPRSLRVKIFNIQVKEVTVQDSTTTIANNLTSTVQVFTDDDYQLPYVVGNGTEGCLPAFPPQVFTLPQYGYATLNRDNTENPTERSSFFCLEYFPSKMLRTGNNFEFTYNFEEVPFHSSFAPSQNLFKLANPLVDQYLYRFVSTNNTGGVQFNKNLAGRYANTYKNWFPGPMGRTQGWNLGSGVNRASVSAFATTNRMELEGASYQVPPQPNGMTNNLQGSNTYALENTMIFNSQPANPGTTATYLEGSMLITXESETQPVNRVAYNVGGQMATNNQSSTTAPATGTYNLQEIVPGSVWMERDVYLQGPIWAKIPETGAHFHPSPAMGGFGLKHPPPMMLIKNTPVPGNITSFSDVPVSSFITQYSTGQVTVEMEWELKKENSKRWNPEIQYTNNYNDPQFVDFAPDSTGEYRTTRPIGTRYLTRPL

SEQ ID NO: 865 - protein, 736 aa, synthetic construct; identical to SEQ ID NO: 39
  REGION 1..736: note = Description of Artificial Sequence: Synthetic polypeptide

SEQ ID NO: 866 - protein, 734 aa, synthetic construct; identical to SEQ ID NO: 57
  REGION 1..734: note = Description of Artificial Sequence: Synthetic polypeptide

SEQ ID NO: 867 - protein, 723 aa, synthetic construct
  REGION 1..723: note = Description of Artificial Sequence: Synthetic polypeptide
MSFVDHPPDWLEEVGEGLREFLGLEAGPPKPKPNQQHQDQARGLVLPGYNYLGPGNGLDRGEPVNRADEVAREHDISYNEQLEAGDNPYLKYNHADAEFQEKLADDTSFGGNLGKAVFQAKKRVLEPFGLVEEGAKTAPTGKRIDDHFPKRKKARTEEDSKPSTSSDAEAGPSGSQQLQIPAQPASSLGADTMSAGGGPLGDNNQGADGVGNASGDWHCDSTWMGDRVVTKSTRTWVLPSYNNHQYREIKSGSVDGSNANAYFGYSTPWGYFDFNRFHSHWSPRDWQRLINNYWGFRPRSLRVKIFNIQVKEVTVQDSTTTIANNLTSTVQVFTDDDYQLPYVVGNGTEGCLPAFPPQVFTLPQYGYATLNRDNTENPTERSSFFCLEYFPSKMLRTGNNFEFTYNFEEVPFHSSFAPSQNLFKLANPLVDQYLYRFVSTNNTGGVQFNKNLAGRYANTYKNWFPGPMGRTQGWNLGSGVNRASVSAFATTNRMELEGASYQVPPQPNGMTNNLQGSNTYALENTMIFNSQPANPGTTATYLEGNMLITSESETQPVNRVAYNVGGQMATNNQSSTTAPATGTYNLQEIVPGSVWMERDVYLQGPIWAKIPETGAHFHPSPAMGGFGLKHPPPMMLIKNTPVPGNITSFSDVPVSSFITQYSTGQVTVEMEWELKKENSKRWNPEIQYTNNYNDPQFVDFAPDSTGEYRTTRPIGTRYLTRPL

SEQ ID NO: 868 - protein, 743 aa, synthetic construct
  REGION 1..743: note = Description of Artificial Sequence: Synthetic polypeptide
MAADGYLPDWLEDNLSEGIREWWALKPGAPQPKANQQHQDNARGLVLPGYKYLGPGNGLDKGEPVNAADAAALEHDKAYDQQLKAGDNPYLKYNHADAEFQERLKEDTSFGGNLGRAVFQAKKRLLEPLGLVEEAAKTAPGKKRPVEQSPQEPDSSAGIGKSGAQPAKKRLNFGQTGDTESVPDPQPIGEPPAAPSGVGSLTMASGGGAPVADNNEGADGVGSSSGNWHCDSQWLGDRVITTSTRTWALPTYNNHLYKQISNSTSGGSSNDNAYFGYSTPWGYFDFNRFHCHFSPRDWQRLINNNWGFRPKRLNFKLFNIQVKEVTDNNGVKTIANNLTSTVQVFTDSDYQLPYVLGSAHEGCLPPFPADVFMIPQYGYLTLNDGSQAVGRSSFYCLEYFPSQMLRTGNNFQFSYEFENVPFHSSYAHSQSLDRLMNPLIDQYLYYLSRTINGSGQNQQTLKFSVAGPSNMAVQGRNYIPGPSYRQQRVSTTVTQNNNSEFAWPGASSWALNGRNSLMNPGPAMASHKEGEDRFFPLSGSLIFGKQGTGRDNVDADKVMITNEEEIKTTNPVATESYGQVATNHQSAQTLAVPFKAQAQTGWVQNQGILPGMVWQDRDVYLQGPIWAKIPHTDGNFHPSPLMGGFGMKHPPPQILIKNTPVPADPPTAFNKDKLNSFITQYSTGQVSVEIEWELQKENSKRWNPEIQYTSNYYKSNNVEFAVNTEGVYSEPRPIGTRYLTRNL

SEQ ID NO: 869 - DNA, 2232 bp, synthetic construct
  misc_feature 1..2232: note = Description of Artificial Sequence: Synthetic polynucleotide
  source 1..2232: mol_type = other DNA
atggctgccgatggttatcttccagattggctcgaggacaaccttagtgaaggaattcgcgagtggtgggctttgaaacctggagcccctcaacccaaggcaaatcaacaacatcaagacaacgctcgaggtcttgtgcttccgggttacaaataccttggacccggcaacggactcgacaagggggagccggtcaacgcagcagacgcggcggccctcgagcacgacaaggcctacgaccagcagctcaaggccggagacaacccgtacctcaagtacaaccacgccgacgccgagttccaggagcggctcaaagaagatacgtcttttgggggcaacctcgggcgagcagtcttccaggccaaaaagaggcttcttgaacctcttggtctggttgaggaagcggctaagacggctcctggaaagaagaggcctgtagagcagtctcctcaggaaccggactcctccgcgggtattggcaaatcgggtgcacagcccgctaaaaagagactcaatttcggtcagactggcgacacagagtcagtcccagaccctcaaccaatcggagaacctcccgcagccccctcaggtgtgggatctcttacaatggcttcaggtggtggcgcaccagtggcagacaataacgaaggtgccgatggagtgggtagttcctcgggaaattggcattgcgattcccaatggctgggggacagagtcatcaccaccagcacccgaacctgggccctgcccacctacaacaatcacctctacaagcaaatctccaacagcacatctggaggatcttcaaatgacaacgcctacttcggctacagcaccccctgggggtattttgacttcaacagattccactgccacttctcaccacgtgactggcagcgactcatcaacaacaactggggattccggcctaagcgactcaacttcaagctcttcaacattcaggtcaaagaggttacggacaacaatggagtcaagaccatcgccaataaccttaccagcacggtccaggtcttcacggactcagactatcagctcccgtacgtgctcgggtcggctcacgagggctgcctcccgccgttcccagcggacgttttcatgattcctcagtacgggtatctgacgcttaatgatggaagccaggccgtgggtcgttcgtccttttactgcctggaatatttcccgtcgcaaatgctaagaacgggtaacaacttccagttcagctacgagtttgagaacgtacctttccatagcagctacgctcacagccaaagcctggaccgactaatgaatccactcatcgaccaatacttgtactatctctctagaactattaacggttctggacagaatcaacaaacgctaaaattcagtgtggccggacccagcaacatggctgtccagggaagaaactacatacctggacccagctaccgacaacaacgtgtctcaaccactgtgactcaaaacaacaacagcgaatttgcttggcctggagcttcttcttgggctctcaatggacgtaatagcttgatgaatcctggacctgctatggccagccacaaagaaggagaggaccgtttctttcctttgtctggatctttaatttttggcaaacaaggtaccggcagagacaacgtggatgcggacaaagtcatgataaccaacgaagaagaaattaaaactactaacccggtagcaacggagtcctatggacaagtggccacaaaccaccagagtgcccaaactttggcggtgccttttaaggcacaggcgcagaccggttgggttcaaaaccaaggaatacttccgggtatggtttggcaggacagagatgtgtacctgcaaggacccatttgggccaaaattcctcacacggacggcaactttcacccttctccgctgatgggagggtttggaatgaagcacccgcctcctcagatcctcatcaaaaacacacctgtacctgcggatcctccaacggccttcaacaaggacaagctgaactctttcatcacccagtattctactggccaagtcagcgtggagatcgagtgggagctgcagaaggaaaacagcaagcgctggaacccggagatccagtacacttccaactattacaagtctaataatgttgaatttgctgttaatactgaaggtgtatatagtgaaccccgccccattggcaccagatacctgactcgtaatctgtaa

SEQ ID NO: 870 - protein, 736 aa, synthetic construct
  REGION 1..736: note = Description of Artificial Sequence: Synthetic polypeptide
MAADGYLPDWLEDNLSEGIREWWALKPGAPQPKANQQHQDNARGLVLPGYKYLGPGNGLDKGEPVNAADAAALEHDKAYDQQLKAGDNPYLKYNHADAEFQERLKEDTSFGGNLGRAVFQAKKRLLEPLGLVEEAAKTAPGKKRPVEQSPQEPDSSAGIGKSGAQPAKKRLNFGQTGDTESVPDPQPIGEPPAAPSGVGSLTMASGGGAPVADNNEGADGVGSSSGNWHCDSQWLGDRVITTSTRTWALPTYNNHLYKQISNSTSGGSSNDNAYFGYSTPWGYFDFNRFHCHFSPRDWQRLINNNWGFRPKRLNFKLFNIQVKEVTDNNGVKTIANNLTSTVQVFTDSDYQLPYVLGSAHEGCLPPFPADVFMIPQYGYLTLNDGSQAVGRSSFYCLEYFPSQMLRTGNNFQFSYEFENVPFHSSYAHSQSLDRLMNPLIDQYLYYLSRTIQSSQTPRQTLKFSVAGPSNMAVQGRNYIPGPSYRQQRVSTTVTQNNNSEFAWPGASSWALNGRNSLMNPGPAMASHKEGEDRFFPLSGSLIFGKQGTGRDNVDADKVMITNEEEIKTTNPVATESYGQVATNHQSAQAQAQTGWVQNQGILPGMVWQDRDVYLQGPIWAKIPHTDGNFHPSPLMGGFGMKHPPPQILIKNTPVPADPPTAFNKDKLNSFITQYSTGQVSVEIEWELQKENSKRWNPEIQYTSNYYKSNNVEFAVNTEGVYSEPRPIGTRYLTRNL

SEQ ID NO: 871 - protein, 743 aa, synthetic construct
  REGION 1..743: note = Description of Artificial Sequence: Synthetic polypeptide
MAADGYLPDWLEDNLSEGIREWWALKPGAPQPKANQQHQDNARGLVLPGYKYLGPGNGLDKGEPVNAADAAALEHDKAYDQQLKAGDNPYLKYNHADAEFQERLKEDTSFGGNLGRAVFQAKKRLLEPLGLVEEAAKTAPGKKRPVEQSPQEPDSSAGIGKSGAQPAKKRLNFGQTGDTESVPDPQPIGEPPAAPSGVGSLTMASGGGAPVADNNEGADGVGSSSGNWHCDSQWLGDRVITTSTRTWALPTYNNHLYKQISNSTSGGSSNDNAYFGYSTPWGYFDFNRFHCHFSPRDWQRLINNNWGFRPKRLNFKLFNIQVKEVTDNNGVKTIANNLTSTVQVFTDSDYQLPYVLGSAHEGCLPPFPADVFMIPQYGYLTLNDGSQAVGRSSFYCLEYFPSQMLRTGNNFQFSYEFENVPFHSSYAHSQSLDRLMNPLIDQYLYYLSRTIILGTGTSQTLKFSVAGPSNMAVQGRNYIPGPSYRQQRVSTTVTQNNNSEFAWPGASSWALNGRNSLMNPGPAMASHKEGEDRFFPLSGSLIFGKQGTGRDNVDADKVMITNEEEIKTTNPVATESYGQVATNHQSAQTRTNPEAAQAQTGWVQNQGILPGMVWQDRDVYLQGPIWAKIPHTDGNFHPSPLMGGFGMKHPPPQILIKNTPVPADPPTAFNKDKLNSFITQYSTGQVSVEIEWELQKENSKRWNPEIQYTSNYYKSNNVEFAVNTEGVYSEPRPIGTRYLTRNL

SEQ ID NO: 872 - protein, 743 aa, synthetic construct
  REGION 1..743: note = Description of Artificial Sequence: Synthetic polypeptide
MAADGYLPDWLEDNLSEGIREWWALKPGAPQPKANQQHQDNARGLVLPGYKYLGPGNGLDKGEPVNAADAAALEHDKAYDQQLKAGDNPYLKYNHADAEFQERLKEDTSFGGNLGRAVFQAKKRLLEPLGLVEEAAKTAPGKKRPVEQSPQEPDSSAGIGKSGAQPAKKRLNFGQTGDTESVPDPQPIGEPPAAPSGVGSLTMASGGGAPVADNNEGADGVGSSSGNWHCDSQWLGDRVITTSTRTWALPTYNNHLYKQISNSTSGGSSNDNAYFGYSTPWGYFDFNRFHCHFSPRDWQRLINNNWGFRPKRLNFKLFNIQVKEVTDNNGVKTIANNLTSTVQVFTDSDYQLPYVLGSAHEGCLPPFPADVFMIPQYGYLTLNDGSQAVGRSSFYCLEYFPSQMLRTGNNFQFSYEFENVPFHSSYAHSQSLDRLMNPLIDQYLYYLSRTIILGTGTSQTLKFSVAGPSNMAVQGRNYIPGPSYRQQRVSTTVTQNNNSEFAWPGASSWALNGRNSLMNPGPAMASHKEGEDRFFPLSGSLIFGKQGTGRDNVDADKVMITNEEEIKTTNPVATESYGQVATNHQSAQNGGTSSSAQAQTGWVQNQGILPGMVWQDRDVYLQGPIWAKIPHTDGNFHPSPLMGGFGMKHPPPQILIKNTPVPADPPTAFNKDKLNSFITQYSTGQVSVEIEWELQKENSKRWNPEIQYTSNYYKSNNVEFAVNTEGVYSEPRPIGTRYLTRNL

SEQ ID NO: 873 - protein, 7 aa, synthetic construct
  REGION 1..7: note = Description of Artificial Sequence: Synthetic polypeptide
TLAVPFK

SEQ ID NO: 874 - protein, 7 aa, synthetic construct
  REGION 1..7: note = Description of Artificial Sequence: Synthetic polypeptide
KFPVALT

SEQ ID NO: 875 - protein, 6 aa, synthetic construct
  REGION 1..6: note = Description of Artificial Sequence: Synthetic polypeptide
LAVPFK

SEQ ID NO: 876 - protein, 5 aa, synthetic construct
  REGION 1..5: note = Description of Artificial Sequence: Synthetic polypeptide
AVPFK

SEQ ID NO: 877 - protein, 4 aa, synthetic construct
  REGION 1..4: note = Description of Artificial Sequence: Synthetic polypeptide
VPFK

SEQ ID NO: 878 - protein, 6 aa, synthetic construct
  REGION 1..6: note = Description of Artificial Sequence: Synthetic polypeptide
TLAVPF

SEQ ID NO: 879 - protein, 5 aa, synthetic construct
  REGION 1..5: note = Description of Artificial Sequence: Synthetic polypeptide
TLAVP

SEQ ID NO: 880 - protein, 4 aa, synthetic construct
  REGION 1..4: note = Description of Artificial Sequence: Synthetic polypeptide
TLAV

SEQ ID NO: 881 - protein, 7 aa, synthetic construct
  REGION 1..7: note = Description of Artificial Sequence: Synthetic polypeptide
SVSKPFL

SEQ ID NO: 882 - protein, 7 aa, synthetic construct
  REGION 1..7: note = Description of Artificial Sequence: Synthetic polypeptide
FTLTTPK

SEQ ID NO: 883 - protein, 7 aa, synthetic construct
  REGION 1..7: note = Description of Artificial Sequence: Synthetic polypeptide
MNATKNV

SEQ ID NO: 884 - protein, 7 aa, synthetic construct
  REGION 1..7: note = Description of Artificial Sequence: Synthetic polypeptide
QSSQTPR

SEQ ID NO: 885 - protein, 7 aa, synthetic construct
  REGION 1..7: note = Description of Artificial Sequence: Synthetic polypeptide
ILGTGTS

SEQ ID NO: 886 - protein, 7 aa, synthetic construct
  REGION 1..7: note = Description of Artificial Sequence: Synthetic polypeptide
TRTNPEA

SEQ ID NO: 887 - protein, 7 aa, synthetic construct
  REGION 1..7: note = Description of Artificial Sequence: Synthetic polypeptide
NGGTSSS

SEQ ID NO: 888 - protein, 7 aa, synthetic construct
  REGION 1..7: note = Description of Artificial Sequence: Synthetic polypeptide
YTLSQGW

SEQ ID NO: 889 - DNA, 21 bp, synthetic construct
  misc_feature 1..21: note = Description of Artificial Sequence: Synthetic polynucleotide
  source 1..21: mol_type = other DNA
aagtttcctgtggcgttgact

SEQ ID NO: 890 - DNA, 21 bp, synthetic construct
  misc_feature 1..21: note = Description of Artificial Sequence: Synthetic polynucleotide
  source 1..21: mol_type = other DNA
actttggcggtgccttttaag

SEQ ID NO: 891 - DNA, 21 bp, synthetic construct
  misc_feature 1..21: note = Description of Artificial Sequence: Synthetic polynucleotide
  source 1..21: mol_type = other DNA
agtgtgagtaagccttttttg

SEQ ID NO: 892 - DNA, 21 bp, synthetic construct
  misc_feature 1..21: note = Description of Artificial Sequence: Synthetic polynucleotide
  source 1..21: mol_type = other DNA
tttacgttgacgacgcctaag

SEQ ID NO: 893 - DNA, 21 bp, synthetic construct
  misc_feature 1..21: note = Description of Artificial Sequence: Synthetic polynucleotide
  source 1..21: mol_type = other DNA
atgaatgctacgaagaatgtg

SEQ ID NO: 894 - DNA, 21 bp, synthetic construct
  misc_feature 1..21: note = Description of Artificial Sequence: Synthetic polynucleotide
  source 1..21: mol_type = other DNA
cagtcgtcgcagacgcctagg

SEQ ID NO: 895 - DNA, 21 bp, synthetic construct
  misc_feature 1..21: note = Description of Artificial Sequence: Synthetic polynucleotide
  source 1..21: mol_type = other DNA
attctggggactggtacttcg

SEQ ID NO: 896 - DNA, 21 bp, synthetic construct
  misc_feature 1..21: note = Description of Artificial Sequence: Synthetic polynucleotide
  source 1..21: mol_type = other DNA
acgcggactaatcctgaggct

SEQ ID NO: 897 - DNA, 21 bp, synthetic construct
  misc_feature 1..21: note = Description of Artificial Sequence: Synthetic polynucleotide
  source 1..21: mol_type = other DNA
aatggggggactagtagttct

SEQ ID NO: 898 - DNA, 21 bp, synthetic construct
  misc_feature 1..21: note = Description of Artificial Sequence: Synthetic polynucleotide
  source 1..21: mol_type = other DNA
tatactttgtcgcagggttgg

SEQ ID NO: 899 - protein, 9 aa, synthetic construct
  REGION 1..9: note = Description of Artificial Sequence: Synthetic polypeptide
SADNNNSEY

SEQ ID NO: 900 - protein, 9 aa, synthetic construct
  REGION 1..9: note = Description of Artificial Sequence: Synthetic polypeptide
LIDQYLYYL

SEQ ID NO: 901 - protein, 9 aa, synthetic construct
  REGION 1..9: note = Description of Artificial Sequence: Synthetic polypeptide
VPQYGYLTL

SEQ ID NO: 902 - protein, 9 aa, synthetic construct
  REGION 1..9: note = Description of Artificial Sequence: Synthetic polypeptide
TTSTRTWAL

SEQ ID NO: 903 - protein, 9 aa, synthetic construct
  REGION 1..9: note = Description of Artificial Sequence: Synthetic polypeptide
YHLNGRDSL

SEQ ID NO: 904 - protein, 9 aa, synthetic construct
  REGION 1..9: note = Description of Artificial Sequence: Synthetic polypeptide
SQAVGRSSF

SEQ ID NO: 905 - protein, 9 aa, synthetic construct
  REGION 1..9: note = Description of Artificial Sequence: Synthetic polypeptide
VPANPSTTF

SEQ ID NO: 906 - protein, 9 aa, synthetic construct
  REGION 1..9: note = Description of Artificial Sequence: Synthetic polypeptide
FPQSGVLIF

SEQ ID NO: 907 - protein, 15 aa, synthetic construct
  REGION 1..15: note = Description of Artificial Sequence: Synthetic polypeptide
YFDFNRFHCHFSPRD

SEQ ID NO: 908 - protein, 15 aa, synthetic construct
  REGION 1..15: note = Description of Artificial Sequence: Synthetic polypeptide
VGNSSGNWHCDSTWM

SEQ ID NO: 909 - protein, 15 aa, synthetic construct
  REGION 1..15: note = Description of Artificial Sequence: Synthetic polypeptide
QFSQAGASDIRDQSR

SEQ ID NO: 910 - protein, 13 aa, synthetic construct
  REGION 1..13: note = Description of Artificial Sequence: Synthetic polypeptide
GASDIRQSRNWLP

SEQ ID NO: 911 - protein, 15 aa, synthetic construct
  REGION 1..15: note = Description of Artificial Sequence: Synthetic polypeptide
GNRQAATADVNTQGV

SEQ ID NO: 912 - protein, 9 aa, synthetic construct
  REGION 1..9: note = Description of Artificial Sequence: Synthetic polypeptide
LDRLMNPLI

SEQ ID NO: 913 - protein, 9 aa, synthetic construct
  REGION 1..9: note = Description of Artificial Sequence: Synthetic polypeptide
QPAKKRLNF

SEQ ID NO: 914 - protein, 7 aa, synthetic construct
  REGION 1..7: note = Description of Artificial Sequence: Synthetic polypeptide
QAVRTSL

SEQ ID NO: 915 - protein, 7 aa, synthetic construct
  REGION 1..7: note = Description of Artificial Sequence: Synthetic polypeptide
LAKERLS

SEQ ID NO: 916 - RNA, 21 nt, synthetic construct
  modified_base 20..21: mod_base = OTHER; note = thymine
  misc_feature 1..21: note = Description of Artificial Sequence: Synthetic oligonucleotide
  misc_feature 1..21: note = Description of Combined DNA/RNA Molecule: Synthetic oligonucleotide
  misc_feature 20..21: note = Deoxythymidine dinucleotide
  source 1..21: mol_type = other RNA
tttataggccagacctccgtt

SEQ ID NO: 917 - RNA, 21 nt, synthetic construct
  modified_base 20..21: mod_base = OTHER; note = thymine
  misc_feature 1..21: note = Description of Artificial Sequence: Synthetic oligonucleotide
  misc_feature 1..21: note = Description of Combined DNA/RNA Molecule: Synthetic oligonucleotide
  misc_feature 20..21: note = Deoxythymidine dinucleotide
  source 1..21: mol_type = other RNA
ttttataggccagacctcctt

SEQ ID NO: 918 - RNA, 21 nt, synthetic construct
  modified_base 20..21: mod_base = OTHER; note = thymine
  misc_feature 1..21: note = Description of Artificial Sequence: Synthetic oligonucleotide
  misc_feature 1..21: note = Description of Combined DNA/RNA Molecule: Synthetic oligonucleotide
  misc_feature 20..21: note = Deoxythymidine dinucleotide
  source 1..21: mol_type = other RNA
tctttataggccagacctctt

SEQ ID NO: 919 - RNA, 21 nt, synthetic construct
  modified_base 20..21: mod_base = OTHER; note = thymine
  misc_feature 1..21: note = Description of Artificial Sequence: Synthetic oligonucleotide
  misc_feature 1..21: note = Description of Combined DNA/RNA Molecule: Synthetic oligonucleotide
  misc_feature 20..21: note = Deoxythymidine dinucleotide
  source 1..21: mol_type = other RNA
tactttataggccagaccttt

SEQ ID NO: 920 - RNA, 21 nt, synthetic construct
  modified_base 20..21: mod_base = OTHER; note = thymine
  misc_feature 1..21: note = Description of Artificial Sequence: Synthetic oligonucleotide
  misc_feature 1..21: note = Description of Combined DNA/RNA Molecule: Synthetic oligonucleotide
  misc_feature 20..21: note = Deoxythymidine dinucleotide
  source 1..21: mol_type = other RNA
ttactttataggccagacctt

SEQ ID NO: 921 - RNA, 21 nt, synthetic construct
  modified_base 20..21: mod_base = OTHER; note = thymine
  misc_feature 1..21: note = Description of Artificial Sequence: Synthetic oligonucleotide
  misc_feature 1..21: note = Description of Combined DNA/RNA Molecule: Synthetic oligonucleotide
  misc_feature 20..21: note = Deoxythymidine dinucleotide
  source 1..21: mol_type = other RNA
tactactttataggccagatt

SEQ ID NO: 922 - RNA, 21 nt, synthetic construct
  modified_base 20..21: mod_base = OTHER; note = thymine
  misc_feature 1..21: note = Description of Artificial Sequence: Synthetic oligonucleotide
  misc_feature 1..21: note = Description of Combined DNA/RNA Molecule: Synthetic oligonucleotide
  misc_feature 20..21: note = Deoxythymidine dinucleotide
  source 1..21: mol_type = other RNA
tgactactttataggccagtt

SEQ ID NO: 923 - RNA, 21 nt, synthetic construct
  modified_base 20..21: mod_base = OTHER; note = thymine
  misc_feature 1..21: note = Description of Artificial Sequence: Synthetic oligonucleotide
  misc_feature 1..21: note = Description of Combined DNA/RNA Molecule: Synthetic oligonucleotide
  misc_feature 20..21: note = Deoxythymidine dinucleotide
  source 1..21: mol_type = other RNA
tcgactactttataggccatt

SEQ ID NO: 924 - RNA, 21 nt, synthetic construct
  modified_base 20..21: mod_base = OTHER; note = thymine
  misc_feature 1..21: note = Description of Artificial Sequence: Synthetic oligonucleotide
  misc_feature 1..21: note = Description of Combined DNA/RNA Molecule: Synthetic oligonucleotide
  misc_feature 20..21: note = Deoxythymidine dinucleotide
  source 1..21: mol_type = other RNA
tgcgactactttataggcctt

SEQ ID NO: 925 - RNA, 21 nt, synthetic construct
  modified_base 20..21: mod_base = OTHER; note = thymine
  misc_feature 1..21: note = Description of Artificial Sequence: Synthetic oligonucleotide
  misc_feature 1..21: note = Description of Combined DNA/RNA Molecule: Synthetic oligonucleotide
  misc_feature 20..21: note = Deoxythymidine dinucleotide
  source 1..21: mol_type = other RNA
tcgcgactactttataggctt

SEQ ID NO: 926 - RNA, 21 nt, synthetic construct
  modified_base 20..21: mod_base = OTHER; note = thymine
  misc_feature 1..21: note = Description of Artificial Sequence: Synthetic oligonucleotide
  misc_feature 1..21: note = Description of Combined DNA/RNA Molecule: Synthetic oligonucleotide
  misc_feature 20..21: note = Deoxythymidine dinucleotide
  source 1..21: mol_type = other RNA
tccgcgactactttataggtt

SEQ ID NO: 927 - RNA, 21 nt, synthetic construct
  modified_base 20..21: mod_base = OTHER; note = thymine
  misc_feature 1..21: note = Description of Artificial Sequence: Synthetic oligonucleotide
  misc_feature 1..21: note = Description of Combined DNA/RNA Molecule: Synthetic oligonucleotide
  misc_feature 20..21: note = Deoxythymidine dinucleotide
  source 1..21: mol_type = other RNA
tgctgcaggagactacgactt

SEQ ID NO: 928 - RNA, 21 nt, synthetic construct
  modified_base 20..21: mod_base = OTHER; note = thymine
  misc_feature 1..21: note = Description of Artificial Sequence: Synthetic oligonucleotide
  misc_feature 1..21: note = Description of Combined DNA/RNA Molecule: Synthetic oligonucleotide
  misc_feature 20..21: note = Deoxythymidine dinucleotide
  source 1..21: mol_type = other RNA
tacgctgcaggagactacgtt

SEQ ID NO: 929 - RNA, 21 nt, synthetic construct
  modified_base 20..21: mod_base = OTHER; note = thymine
  misc_feature 1..21: note = Description of Artificial Sequence: Synthetic oligonucleotide
  misc_feature 1..21: note = Description of Combined DNA/RNA Molecule: Synthetic oligonucleotide
  misc_feature 20..21: note = Deoxythymidine dinucleotide
  source 1..21: mol_type = other RNA
tgacgctgcaggagactactt

SEQ ID NO: 930 - RNA, 21 nt, synthetic construct
  modified_base 20..21: mod_base = OTHER; note = thymine
  misc_feature 1..21: note = Description of Artificial Sequence: Synthetic oligonucleotide
  misc_feature 1..21: note = Description of Combined DNA/RNA Molecule: Synthetic oligonucleotide
  misc_feature 20..21: note = Deoxythymidine dinucleotide
  source 1..21: mol_type = other RNA
tagacgctgcaggagactatt

SEQ ID NO: 931 - RNA, 21 nt, synthetic construct
  modified_base 20..21: mod_base = OTHER; note = thymine
  misc_feature 1..21: note = Description of Artificial Sequence: Synthetic oligonucleotide
  misc_feature 1..21: note = Description of Combined DNA/RNA Molecule: Synthetic oligonucleotide
  misc_feature 20..21: note = Deoxythymidine dinucleotide
  source 1..21: mol_type = other RNA
tcacggccttcgtcgccattt

SEQ ID NO: 932 - RNA, 21 nt, synthetic construct
  modified_base 20..21: mod_base = OTHER; note = thymine
  misc_feature 1..21: note = Description of Artificial Sequence: Synthetic oligonucleotide
  misc_feature 1..21: note = Description of Combined DNA/RNA Molecule: Synthetic oligonucleotide
  misc_feature 20..21: note = Deoxythymidine dinucleotide
  source 1..21: mol_type = other RNA
tcgcacacggccttcgtcgtt

SEQ ID NO: 933 - RNA, 21 nt, synthetic construct
  modified_base 20..21: mod_base = OTHER; note = thymine
  misc_feature 1..21: note = Description of Artificial Sequence: Synthetic oligonucleotide
  misc_feature 1..21: note = Description of Combined DNA/RNA Molecule: Synthetic oligonucleotide
  misc_feature 20..21: note = Deoxythymidine dinucleotide
  source 1..21: mol_type = other RNA
tagcacgcacacggccttctt

SEQ ID NO: 934 - RNA, 21 nt, synthetic construct
  modified_base 20..21: mod_base = OTHER; note = thymine
  misc_feature 1..21: note = Description of Artificial Sequence: Synthetic oligonucleotide
  misc_feature 1..21: note = Description of Combined DNA/RNA Molecule: Synthetic oligonucleotide
  misc_feature 20..21: note = Deoxythymidine dinucleotide
  source 1..21: mol_type = other RNA
tttcagcacgcacacggcctt

SEQ ID NO: 935 - RNA, 21 nt, synthetic construct
  modified_base 20..21: mod_base = OTHER; note = thymine
  misc_feature 1..21: note = Description of Artificial Sequence: Synthetic oligonucleotide
  misc_feature 1..21: note = Description of Combined DNA/RNA Molecule: Synthetic oligonucleotide
  misc_feature 20..21: note = Deoxythymidine dinucleotide
  source 1..21: mol_type = other RNA
tgcactgggccgtcgcccttt

SEQ ID NO: 936 - RNA, 21 nt, synthetic construct
  modified_base 20..21: mod_base = OTHER; note = thymine
  misc_feature 1..21: note = Description of Artificial Sequence: Synthetic oligonucleotide
  misc_feature 1..21: note = Description of Combined DNA/RNA Molecule: Synthetic oligonucleotide
  misc_feature 20..21: note = Deoxythymidine dinucleotide
  source 1..21: mol_type = other RNA
taattgatgatgccctgcatt

SEQ ID NO: 937 - RNA, 21 nt, synthetic construct
  modified_base 20..21: mod_base = OTHER; note = thymine
  misc_feature 1..21: note = Description of Artificial Sequence: Synthetic oligonucleotide
  misc_feature 1..21: note = Description of Combined DNA/RNA Molecule: Synthetic oligonucleotide
  misc_feature 20..21: note = Deoxythymidine dinucleotide
  source 1..21: mol_type = other RNA
taaattgatgatgccctgctt

SEQ ID NO: 938 - RNA, 21 nt, synthetic construct
  modified_base 20..21: mod_base = OTHER; note = thymine
  misc_feature 1..21: note = Description of Artificial Sequence: Synthetic oligonucleotide
  misc_feature 1..21: note = Description of Combined DNA/RNA Molecule: Synthetic oligonucleotide
  misc_feature 20..21: note = Deoxythymidine dinucleotide
  source 1..21: mol_type = other RNA
tcgaaattgatgatgcccttt

SEQ ID NO: 939 - RNA, 21 nt, synthetic construct
  modified_base 20..21: mod_base = OTHER; note = thymine
  misc_feature 1..21: note = Description of Artificial Sequence: Synthetic oligonucleotide
  misc_feature 1..21: note = Description of Combined DNA/RNA Molecule: Synthetic oligonucleotide
  misc_feature 20..21: note = Deoxythymidine dinucleotide
  source 1..21: mol_type = other RNA
ttcgaaattgatgatgccctt

SEQ ID NO: 940 - RNA, 21 nt, synthetic construct
  modified_base 20..21: mod_base = OTHER; note = thymine
  misc_feature 1..21: note = Description of Artificial Sequence: Synthetic oligonucleotide
  misc_feature 1..21: note = Description of Combined DNA/RNA Molecule: Synthetic oligonucleotide
  misc_feature 20..21: note = Deoxythymidine dinucleotide
  source 1..21: mol_type = other RNA
tctcgaaattgatgatgcctt

SEQ ID NO: 941 - RNA, 21 nt, synthetic construct
  modified_base 20..21: mod_base = OTHER; note = thymine
  misc_feature 1..21: note = Description of Artificial Sequence: Synthetic oligonucleotide
  misc_feature 1..21: note = Description of Combined DNA/RNA Molecule: Synthetic oligonucleotide
  misc_feature 20..21: note = Deoxythymidine dinucleotide
  source 1..21: mol_type = other RNA
tgctcgaaattgatgatgctt

SEQ ID NO: 942 - RNA, 21 nt, synthetic construct
  modified_base 20..21: mod_base = OTHER; note = thymine
  misc_feature 1..21: note = Description of Artificial Sequence: Synthetic oligonucleotide
  misc_feature 1..21: note = Description of Combined DNA/RNA Molecule: Synthetic oligonucleotide
  misc_feature 20..21: note = Deoxythymidine dinucleotide
  source 1..21: mol_type = other RNA
ttgctcgaaattgatgatgtt

SEQ ID NO: 943 - RNA, 21 nt, synthetic construct
  modified_base 20..21: mod_base = OTHER; note = thymine
  misc_feature 1..21: note = Description of Artificial Sequence: Synthetic oligonucleotide
  misc_feature 1..21: note = Description of Combined DNA/RNA Molecule: Synthetic oligonucleotide
  misc_feature 20..21: note = Deoxythymidine dinucleotide
  source 1..21: mol_type = other RNA
tttccttctgctcgaaatttt

SEQ ID NO: 944 - RNA, 21 nt, synthetic construct
  modified_base 20..21: mod_base = OTHER; note = thymine
  misc_feature 1..21: note = Description of Artificial Sequence: Synthetic oligonucleotide
  misc_feature 1..21: note = Description of Combined DNA/RNA Molecule: Synthetic oligonucleotide
  misc_feature 20..21: note = Deoxythymidine dinucleotide
  source 1..21: mol_type = other RNA
tactttccttctgctcgaatt

SEQ ID NO: 945 - RNA, 21 nt, synthetic construct
  modified_base 20..21: mod_base = OTHER; note = thymine
  misc_feature 1..21: note = Description of Artificial Sequence: Synthetic oligonucleotide
  misc_feature 1..21: note = Description of Combined DNA/RNA Molecule: Synthetic oligonucleotide
  misc_feature 20..21: note = Deoxythymidine dinucleotide
  source 1..21: mol_type = other RNA
ttactttccttctgctcgatt

SEQ ID NO: 946 - RNA, 21 nt, synthetic construct
  modified_base 20..21: mod_base = OTHER; note = thymine
  misc_feature 1..21: note = Description of Artificial Sequence: Synthetic oligonucleotide
  misc_feature 1..21: note = Description of Combined DNA/RNA Molecule: Synthetic oligonucleotide
  misc_feature 20..21: note = Deoxythymidine dinucleotide
  source 1..21: mol_type = other RNA
taatgcttccccacacctttt

SEQ ID NO: 947 - RNA, 21 nt, synthetic construct
  modified_base 20..21: mod_base = OTHER; note = thymine
  misc_feature 1..21: note = Description of Artificial Sequence: Synthetic oligonucleotide
  misc_feature 1..21: note = Description of Combined DNA/RNA Molecule: Synthetic oligonucleotide
  misc_feature 20..21: note = Deoxythymidine dinucleotide
  source 1..21: mol_type = other RNA
tttaatgcttccccacacctt

SEQ ID NO: 948 - RNA, 21 nt, synthetic construct
  modified_base 20..21: mod_base = OTHER; note = thymine
  misc_feature 1..21: note = Description of Artificial Sequence: Synthetic oligonucleotide
  misc_feature 1..21: note = Description of Combined DNA/RNA Molecule: Synthetic oligonucleotide
  misc_feature 20..21: note = Deoxythymidine dinucleotide
  source 1..21: mol_type = other RNA
tgcaggccttcagtcagtctt

SEQ ID NO: 949 - RNA, 21 nt, synthetic construct
  modified_base 20..21: mod_base = OTHER; note = thymine
  misc_feature 1..21: note = Description of Artificial Sequence: Synthetic oligonucleotide
  misc_feature 1..21: note = Description of Combined DNA/RNA Molecule: Synthetic oligonucleotide
  misc_feature 20..21: note = Deoxythymidine dinucleotide
  source 1..21: mol_type = other RNA
tatgcaggccttcagtcagtt

SEQ ID NO: 950 - RNA, 21 nt, synthetic construct
  modified_base 20..21: mod_base = OTHER; note = thymine
  misc_feature 1..21: note = Description of Artificial Sequence: Synthetic oligonucleotide
  misc_feature 1..21: note = Description of Combined DNA/RNA Molecule: Synthetic oligonucleotide
  misc_feature 20..21: note = Deoxythymidine dinucleotide
  source 1..21: mol_type = other RNA
tcatgcaggccttcagtcatt

SEQ ID NO: 951 - RNA, 21 nt, synthetic construct
  modified_base 20..21: mod_base = OTHER; note = thymine
  misc_feature 1..21: note = Description of Artificial Sequence: Synthetic oligonucleotide
  misc_feature 1..21: note = Description of Combined DNA/RNA Molecule: Synthetic oligonucleotide
  misc_feature 20..21: note = Deoxythymidine dinucleotide
  source 1..21: mol_type = other RNA
taatccatgcaggccttcatt

SEQ ID NO: 952 - RNA, 21 nt, synthetic construct
  modified_base 20..21: mod_base = OTHER; note = thymine
  misc_feature 1..21: note = Description of Artificial Sequence: Synthetic oligonucleotide
  misc_feature 1..21: note = Description of Combined DNA/RNA Molecule: Synthetic oligonucleotide
  misc_feature 20..21: note = Deoxythymidine dinucleotide
  source 1..21: mol_type = other RNA
tgaatccatgcaggccttctt

SEQ ID NO: 953 - RNA, 21 nt, synthetic construct
  modified_base 20..21: mod_base = OTHER; note = thymine
  misc_feature 1..21: note = Description of Artificial Sequence: Synthetic oligonucleotide
  misc_feature 1..21: note = Description of Combined DNA/RNA Molecule: Synthetic oligonucleotide
  misc_feature 20..21: note = Deoxythymidine dinucleotide
  source 1..21: mol_type = other RNA
tgaacatggaatccatgcatt

SEQ ID NO: 954 - RNA, 21 nt, synthetic construct
  modified_base 20..21: mod_base = OTHER; note = thymine
  misc_feature 1..21: note = Description of Artificial Sequence: Synthetic oligonucleotide
  misc_feature 1..21: note = Description of Combined DNA/RNA Molecule: Synthetic oligonucleotide
  misc_feature 20..21: note = Deoxythymidine dinucleotide
  source 1..21: mol_type = other RNA
tatgaacatggaatccatgtt

SEQ ID NO: 955 - RNA, 21 nt, synthetic construct
  modified_base 20..21: mod_base = OTHER; note = thymine
  misc_feature 1..21: note = Description of Artificial Sequence: Synthetic oligonucleotide
  misc_feature 1..21: note = Description of Combined DNA/RNA Molecule: Synthetic oligonucleotide
  misc_feature 20..21: note = Deoxythymidine dinucleotide
  source 1..21: mol_type = other RNA
tctcatgaacatggaatcctt

SEQ ID NO: 956 - RNA, 21 nt, synthetic construct
  modified_base 20..21: mod_base = OTHER; note = thymine
  misc_feature 1..21: note = Description of Artificial Sequence: Synthetic oligonucleotide
  misc_feature 1..21: note = Description of Combined DNA/RNA Molecule: Synthetic oligonucleotide
  misc_feature 20..21: note = Deoxythymidine dinucleotide
  source 1..21: mol_type = other RNA
taaactcatgaacatggaatt

SEQ ID NO: 957 - RNA, 21 nt, synthetic construct
  modified_base 20..21: mod_base = OTHER; note = thymine
  misc_feature 1..21: note = Description of Artificial Sequence: Synthetic oligonucleotide
  misc_feature 1..21: note = Description of Combined DNA/RNA Molecule: Synthetic oligonucleotide
  misc_feature 20..21: note = Deoxythymidine dinucleotide
  source 1..21: mol_type = other RNA
tatctccaaactcatgaactt

SEQ ID NO: 958 - RNA, 21 nt, synthetic construct
  modified_base 20..21: mod_base = OTHER; note = thymine
  misc_feature 1..21: note = Description of Artificial Sequence: Synthetic oligonucleotide
  misc_feature 1..21: note = Description of Combined DNA/RNA Molecule: Synthetic oligonucleotide
  misc_feature 20..21: note = Deoxythymidine dinucleotide
  source 1..21: mol_type = other RNA
ttatctccaaactcatgaatt

SEQ ID NO: 959 - RNA, 21 nt, synthetic construct
  modified_base 20..21: mod_base = OTHER; note = thymine
  misc_feature 1..21: note = Description of Artificial Sequence: Synthetic oligonucleotide
  misc_feature 1..21: note = Description of Combined DNA/RNA Molecule: Synthetic oligonucleotide
  misc_feature 20..21: note = Deoxythymidine dinucleotide
  source 1..21: mol_type = other RNA
tgtattatctccaaactcatt

SEQ ID NO: 960 - RNA, 21 nt, synthetic construct
  modified_base 20..21: mod_base = OTHER; note = thymine
  misc_feature 1..21: note = Description of Artificial Sequence: Synthetic oligonucleotide
  misc_feature 1..21: note = Description of Combined DNA/RNA Molecule: Synthetic oligonucleotide
  misc_feature 20..21: note = Deoxythymidine dinucleotide
  source 1..21: mol_type = other RNA
ttgtattatctccaaactctt

SEQ ID NO: 961 - RNA, 21 nt, synthetic construct
  modified_base 20..21: mod_base = OTHER; note = thymine
  misc_feature 1..21: note = Description of Artificial Sequence: Synthetic oligonucleotide
  misc_feature 1..21: note = Description of Combined DNA/RNA Molecule: Synthetic oligonucleotide
  misc_feature 20..21: note = Deoxythymidine dinucleotide
  source 1..21: mol_type = other RNA
tcctgcactggtacagccttt

SEQ ID NO: 962 - RNA, 21 nt, synthetic construct
  modified_base 20..21: mod_base = OTHER; note = thymine
  misc_feature 1..21: note = Description of Artificial Sequence: Synthetic oligonucleotide
  misc_feature 1..21: note = Description of Combined DNA/RNA Molecule: Synthetic oligonucleotide
  misc_feature 20..21: note = Deoxythymidine dinucleotide
  source 1..21: mol_type = other RNA
tacctgcactggtacagcctt

SEQ ID NO: 963 - RNA, 21 nt, synthetic construct
  modified_base 20..21: mod_base = OTHER; note = thymine
  misc_feature 1..21: note = Description of Artificial Sequence: Synthetic oligonucleotide
  misc_feature 1..21: note = Description of Combined DNA/RNA Molecule: Synthetic oligonucleotide
  misc_feature 20..21: note = Deoxythymidine dinucleotide
  source 1..21: mol_type = other RNA
tattaaagtgaggacctgctt

SEQ ID NO: 964 - RNA, 21 nt, synthetic construct
  modified_base 20..21: mod_base = OTHER; note = thymine
  misc_feature 1..21: note = Description of Artificial Sequence: Synthetic oligonucleotide
  misc_feature 1..21: note = Description of Combined DNA/RNA Molecule: Synthetic oligonucleotide
  misc_feature 20..21: note = Deoxythymidine dinucleotide
  source 1..21: mol_type = other RNA
tgattaaagtgaggacctgtt

SEQ ID NO: 965 - RNA, 21 nt, synthetic construct
  modified_base 20..21: mod_base = OTHER; note = thymine
  misc_feature 1..21: note = Description of Artificial Sequence: Synthetic oligonucleotide
  misc_feature 1..21: note = Description of Combined DNA/RNA Molecule: Synthetic oligonucleotide
  misc_feature 20..21: note = Deoxythymidine dinucleotide
  source 1..21: mol_type = other RNA
tgatagaggattaaagtgatt

SEQ ID NO: 966 - RNA, 21 nt, synthetic construct
  modified_base 20..21: mod_base = OTHER; note = thymine
  misc_feature 1..21: note = Description of Artificial Sequence: Synthetic oligonucleotide
  misc_feature 1..21: note = Description of Combined DNA/RNA Molecule: Synthetic oligonucleotide
  misc_feature 20..21: note = Deoxythymidine dinucleotide
  source 1..21: mol_type = other RNA
taccgtgttttctggatagtt

SEQ ID NO: 967 - RNA, 21 nt, synthetic construct
  modified_base 20..21: mod_base = OTHER; note = thymine
  misc_feature 1..21: note = Description of Artificial Sequence: Synthetic oligonucleotide
  misc_feature 1..21: note = Description of Combined DNA/RNA Molecule: Synthetic oligonucleotide
  misc_feature 20..21: note = Deoxythymidine dinucleotide
  source 1..21: mol_type = other RNA
tcaccgtgttttctggatatt

SEQ ID NO: 968 - RNA, 21 nt, synthetic construct
  modified_base 20..21: mod_base = OTHER; note = thymine
  misc_feature 1..21: note = Description of Artificial Sequence: Synthetic oligonucleotide
  misc_feature 1..21: note = Description of Combined DNA/RNA Molecule: Synthetic oligonucleotide
  misc_feature 20..21: note = Deoxythymidine dinucleotide
  source 1..21: mol_type = other RNA
tccaccgtgttttctggattt

SEQ ID NO: 969 - RNA, 21 nt, synthetic construct
  modified_base 20..21: mod_base = OTHER; note = thymine
  misc_feature 1..21: note = Description of Artificial Sequence: Synthetic oligonucleotide
  misc_feature 1..21: note = Description of Combined DNA/RNA Molecule: Synthetic oligonucleotide
  misc_feature 20..21: note = Deoxythymidine dinucleotide
  source 1..21: mol_type = other RNA
tgcccaccgtgttttctggtt

SEQ ID NO: 970 - RNA, 21 nt, synthetic construct
  modified_base 20..21: mod_base = OTHER; note = thymine
  misc_feature 1..21: note = Description of Artificial Sequence: Synthetic oligonucleotide
  misc_feature 1..21: note = Description of Combined DNA/RNA Molecule: Synthetic oligonucleotide
  misc_feature 20..21: note = Deoxythymidine dinucleotide
  source 1..21: mol_type = other RNA
tttggcccaccgtgttttctt

SEQ ID NO: 971 - RNA, 21 nt, synthetic construct
  modified_base 20..21: mod_base = OTHER; note = thymine
  misc_feature 1..21: note = Description of Artificial Sequence: Synthetic oligonucleotide
  misc_feature 1..21: note = Description of Combined DNA/RNA Molecule: Synthetic oligonucleotide
  misc_feature 20..21: note = Deoxythymidine dinucleotide
  source 1..21: mol_type = other RNA
ttttggcccaccgtgtttttt

SEQ ID NO: 972 - RNA, 21 nt, synthetic construct
  modified_base 20..21: mod_base = OTHER; note = thymine
  misc_feature 1..21: note = Description of Artificial Sequence: Synthetic oligonucleotide
  misc_feature 1..21: note = Description of Combined DNA/RNA Molecule: Synthetic oligonucleotide
  misc_feature 20..21: note = Deoxythymidine dinucleotide
  source 1..21: mol_type = other RNA
ttcatcctttggcccaccgtt

SEQ ID NO: 973 - RNA, 21 nt, synthetic construct
  modified_base 20..21: mod_base = OTHER; note = thymine
  misc_feature 1..21: note = Description of Artificial Sequence: Synthetic oligonucleotide
  misc_feature 1..21: note = Description of Combined DNA/RNA Molecule: Synthetic oligonucleotide
  misc_feature 20..21: note = Deoxythymidine dinucleotide
  source 1..21: mol_type = other RNA
tcatgcctctcttcatccttt

SEQ ID NO: 974 - RNA, 21 nt, synthetic construct
  modified_base 20..21: mod_base = OTHER; note = thymine
  misc_feature 1..21: note = Description of Artificial Sequence: Synthetic oligonucleotide
  misc_feature 1..21: note = Description of Combined DNA/RNA Molecule: Synthetic oligonucleotide
  misc_feature 20..21: note = Deoxythymidine dinucleotide
  source 1..21: mol_type = other RNA
tcaacatgcctctcttcattt

SEQ ID NO: 975 - RNA, 21 nt, synthetic construct
  modified_base 20..21: mod_base = OTHER; note = thymine
  misc_feature 1..21: note = Description of Artificial Sequence: Synthetic oligonucleotide
  misc_feature 1..21: note = Description of Combined DNA/RNA Molecule: Synthetic oligonucleotide
  misc_feature 20..21: note = Deoxythymidine dinucleotide
  source 1..21: mol_type = other RNA
tgtctccaacatgcctctctt

SEQ ID NO: 976 - RNA, 21 nt, synthetic construct
  modified_base 20..21: mod_base = OTHER; note = thymine
  misc_feature 1..21: note = Description of Artificial Sequence: Synthetic oligonucleotide
  misc_feature 1..21: note = Description of Combined DNA/RNA Molecule: Synthetic oligonucleotide
  misc_feature 20..21: note = Deoxythymidine dinucleotide
  source 1..21: mol_type = other RNA
tagtctccaacatgcctcttt

SEQ ID NO: 977 - RNA, 21 nt, synthetic construct
  modified_base 20..21: mod_base = OTHER; note = thymine
  misc_feature 1..21: note = Description of Artificial Sequence: Synthetic oligonucleotide
  misc_feature 1..21: note = Description of Combined DNA/RNA Molecule: Synthetic oligonucleotide
  misc_feature 20..21: note = Deoxythymidine dinucleotide
  source 1..21: mol_type = other RNA
ttgcccaagtctccaacattt

SEQ ID NO: 978 - RNA, 21 nt, synthetic construct
  modified_base 20..21: mod_base = OTHER; note = thymine
  misc_feature 1..21: note = Description of Artificial Sequence: Synthetic oligonucleotide
  misc_feature 1..21: note = Description of Combined DNA/RNA Molecule: Synthetic oligonucleotide
  misc_feature 20..21: note = Deoxythymidine dinucleotide
  source 1..21: mol_type = other RNA
tattgcccaagtctccaactt

SEQ ID NO: 979 - RNA, 21 nt, synthetic construct
  modified_base 20..21: mod_base = OTHER; note = thymine
  misc_feature 1..21: note = Description of Artificial Sequence: Synthetic oligonucleotide
  misc_feature 1..21: note = Description of Combined DNA/RNA Molecule: Synthetic oligonucleotide
  misc_feature 20..21: note = Deoxythymidine dinucleotide
  source 1..21: mol_type = other RNA
tcacattgcccaagtctcctt

SEQ ID NO: 980 - RNA, 21 nt, synthetic construct
  modified_base 20..21: mod_base = OTHER; note = thymine
  misc_feature 1..21: note = Description of Artificial Sequence: Synthetic oligonucleotide
  misc_feature 1..21: note = Description of Combined DNA/RNA Molecule: Synthetic oligonucleotide
  misc_feature 20..21: note = Deoxythymidine dinucleotide
  source 1..21: mol_type = other RNA
tgtcagcagtcacattgcctt

SEQ ID NO: 981 - RNA, 21 nt, synthetic construct
  modified_base 20..21: mod_base = OTHER; note = thymine
  misc_feature 1..21: note = Description of Artificial Sequence: Synthetic oligonucleotide
  misc_feature 1..21: note = Description of Combined DNA/RNA Molecule: Synthetic oligonucleotide
  misc_feature 20..21: note = Deoxythymidine dinucleotide
  source 1..21: mol_type = other RNA
tttgtcagcagtcacattgtt

SEQ ID NO: 982 - RNA, 21 nt, synthetic construct
  modified_base 20..21: mod_base = OTHER; note = thymine
  misc_feature 1..21: note = Description of Artificial Sequence: Synthetic oligonucleotide
  misc_feature 1..21: note = Description of Combined DNA/RNA Molecule: Synthetic oligonucleotide
  misc_feature 20..21: note = Deoxythymidine dinucleotide
  source 1..21: mol_type = other RNA
tccacaccatctttgtcagtt

SEQ ID NO: 983 - RNA, 21 nt, synthetic construct
  modified_base 20..21: mod_base = OTHER; note = thymine
  misc_feature 1..21: note = Description of Artificial Sequence: Synthetic oligonucleotide
  misc_feature 1..21: note = Description of Combined DNA/RNA Molecule: Synthetic oligonucleotide
  misc_feature 20..21: note = Deoxythymidine dinucleotide
  source 1..21: mol_type = other RNA
tgccacaccatctttgtcatt

SEQ ID NO: 984 - RNA, 21 nt, synthetic construct
  modified_base 20..21: mod_base = OTHER; note = thymine
  misc_feature 1..21: note = Description of Artificial Sequence: Synthetic oligonucleotide
  misc_feature 1..21: note = Description of Combined DNA/RNA Molecule: Synthetic oligonucleotide
  misc_feature 20..21: note = Deoxythymidine dinucleotide
  source 1..21: mol_type = other RNA
tatgcaatggtctcctgagtt

SEQ ID NO: 985 - RNA, 21 nt, synthetic construct
  modified_base 20..21: mod_base = OTHER; note = thymine
  misc_feature 1..21: note = Description of Artificial Sequence: Synthetic oligonucleotide
  misc_feature 1..21: note = Description of Combined DNA/RNA Molecule: Synthetic oligonucleotide
  misc_feature 20..21: note = Deoxythymidine dinucleotide
  source 1..21: mol_type = other RNA
tgatgcaatggtctcctgatt

SEQ ID NO: 986 - RNA, 21 nt, synthetic construct
  modified_base 20..21: mod_base = OTHER; note = thymine
  misc_feature 1..21: note = Description of Artificial Sequence: Synthetic oligonucleotide
  misc_feature 1..21: note = Description of Combined DNA/RNA Molecule: Synthetic oligonucleotide
  misc_feature 20..21: note = Deoxythymidine dinucleotide
  source 1..21: mol_type = other RNA
tccaatgatgcaatggtcttt

SEQ ID NO: 987 - RNA, 21 nt, synthetic construct
  modified_base 20..21: mod_base = OTHER; note = thymine
  misc_feature 1..21: note = Description of Artificial Sequence: Synthetic oligonucleotide
  misc_feature 1..21: note = Description of Combined DNA/RNA Molecule: Synthetic oligonucleotide
  misc_feature 20..21: note = Deoxythymidine dinucleotide
  source 1..21: mol_type = other RNA
tgccaatgatgcaatggtctt

SEQ ID NO: 988 - RNA, 21 nt, synthetic construct
  modified_base 20..21: mod_base = OTHER; note = thymine
  misc_feature 1..21: note = Description of Artificial Sequence: Synthetic oligonucleotide
  misc_feature 1..21: note = Description of Combined DNA/RNA Molecule: Synthetic oligonucleotide
  misc_feature 20..21: note = Deoxythymidine dinucleotide
  source 1..21: mol_type = other RNA
ttgcggccaatgatgcaattt

SEQ ID NO: 989 - RNA, 21 nt, synthetic construct
  modified_base 20..21: mod_base = OTHER; note = thymine
  misc_feature 1..21: note = Description of Artificial Sequence: Synthetic oligonucleotide
  misc_feature 1..21: note = Description of Combined DNA/RNA Molecule: Synthetic oligonucleotide
  misc_feature 20..21: note = Deoxythymidine dinucleotide
  source 1..21: mol_type = other RNA
taccagtgtgcggccaatgtt

SEQ ID NO: 990 - RNA, 21 nt, synthetic construct
  modified_base 20..21: mod_base = OTHER; note = thymine
  misc_feature 1..21: note = Description of Artificial Sequence: Synthetic oligonucleotide
  misc_feature 1..21: note = Description of Combined DNA/RNA Molecule: Synthetic oligonucleotide
  misc_feature 20..21: note = Deoxythymidine dinucleotide
  source 1..21: mol_type = other RNA
tatggaccaccagtgtgcgtt

SEQ ID NO: 991 - RNA, 21 nt, synthetic construct
  modified_base 20..21: mod_base = OTHER; note = thymine
  misc_feature 1..21: note = Description of Artificial Sequence: Synthetic oligonucleotide
  misc_feature 1..21: note = Description of Combined DNA/RNA Molecule: Synthetic oligonucleotide
  misc_feature 20..21: note = Deoxythymidine dinucleotide
  source 1..21: mol_type = other RNA
ttcatggaccaccagtgtgtt

SEQ ID NO: 992 - RNA, 21 nt, synthetic construct
  modified_base 20..21: mod_base = OTHER; note = thymine
  misc_feature 1..21: note = Description of Artificial Sequence: Synthetic oligonucleotide
  misc_feature 1..21: note = Description of Combined DNA/RNA Molecule: Synthetic oligonucleotide
  misc_feature 20..21: note = Deoxythymidine dinucleotide
  source 1..21: mol_type = other RNA
tttcatggaccaccagtgttt

SEQ ID NO: 993 - RNA, 21 nt, synthetic construct
  modified_base 20..21: mod_base = OTHER; note = thymine
  misc_feature 1..21: note = Description of Artificial Sequence: Synthetic oligonucleotide
  misc_feature 1..21: note = Description of Combined DNA/RNA Molecule: Synthetic oligonucleotide
  misc_feature 20..21: note = Deoxythymidine dinucleotide
  source 1..21: mol_type = other RNA
tctttttcatggaccaccatt

SEQ ID NO: 994 - RNA, 21 nt, synthetic construct
  modified_base 20..21: mod_base = OTHER; note = thymine
  misc_feature 1..21: note = Description of Artificial Sequence: Synthetic oligonucleotide
  misc_feature 1..21: note = Description of Combined DNA/RNA Molecule: Synthetic oligonucleotide
  misc_feature 20..21: note = Deoxythymidine dinucleotide
  source 1..21: mol_type = other RNA
tctgctttttcatggaccatt

SEQ ID NO: 995 - RNA, 21 nt, synthetic construct
  modified_base 20..21: mod_base = OTHER; note = thymine
  misc_feature 1..21: note = Description of Artificial Sequence: Synthetic oligonucleotide
  misc_feature 1..21: note = Description of Combined DNA/RNA Molecule: Synthetic oligonucleotide
  misc_feature 20..21: note = Deoxythymidine dinucleotide
  source 1..21: mol_type = other RNA
tgcccaagtcatctgcttttt

SEQ ID NO: 996 - RNA, 21 nt, synthetic construct
  modified_base 20..21: mod_base = OTHER; note = thymine
  misc_feature 1..21: note = Description of Artificial Sequence: Synthetic oligonucleotide
  misc_feature 1..21: note = Description of Combined DNA/RNA Molecule: Synthetic oligonucleotide
  misc_feature 20..21: note = Deoxythymidine dinucleotide
  source 1..21: mol_type = other RNA
ttttgcccaagtcatctgctt

SEQ ID NO: 997 - RNA, 21 nt, synthetic construct
  modified_base 20..21: mod_base = OTHER; note = thymine
  misc_feature 1..21: note = Description of Artificial Sequence: Synthetic oligonucleotide
  misc_feature 1..21: note = Description of Combined DNA/RNA Molecule: Synthetic oligonucleotide
  misc_feature 20..21: note = Deoxythymidine dinucleotide
  source 1..21: mol_type = other RNA
tcacctttgcccaagtcattt

SEQ ID NO: 998 - RNA, 21 nt, synthetic construct
  modified_base 20..21: mod_base = OTHER; note = thymine
  misc_feature 1..21: note = Description of Artificial Sequence: Synthetic oligonucleotide
  misc_feature 1..21: note = Description of Combined DNA/RNA Molecule: Synthetic oligonucleotide
  misc_feature 20..21: note = Deoxythymidine dinucleotide
  source 1..21: mol_type = other RNA
tccacctttgcccaagtcatt

SEQ ID NO: 999 - RNA, 21 nt, synthetic construct
  modified_base 20..21: mod_base = OTHER; note = thymine
  misc_feature 1..21: note = Description of Artificial Sequence: Synthetic oligonucleotide
  misc_feature 1..21: note = Description of Combined DNA/RNA Molecule: Synthetic oligonucleotide
  misc_feature 20..21: note = Deoxythymidine dinucleotide
  source 1..21: mol_type = other RNA
ttccacctttgcccaagtctt

SEQ ID NO: 1000 - RNA, 21 nt, synthetic construct
  modified_base 20..21: mod_base = OTHER; note = thymine
  misc_feature 1..21: note = Description of Artificial Sequence: Synthetic oligonucleotide
  misc_feature 1..21: note = Description of Combined DNA/RNA Molecule: Synthetic oligonucleotide
  misc_feature 20..21: note = Deoxythymidine dinucleotide
  source 1..21: mol_type = other RNA
tcgtttcctgtctttgtactt

SEQ ID NO: 1001 - RNA, 21 nt, synthetic construct
  modified_base 20..21: mod_base = OTHER; note = thymine
  misc_feature 1..21: note = Description of Artificial Sequence: Synthetic oligonucleotide
  misc_feature 1..21: note = Description of Combined DNA/RNA Molecule: Synthetic oligonucleotide
  misc_feature 20..21: note = Deoxythymidine dinucleotide
  source 1..21: mol_type = other RNA
tagcgtttcctgtctttgttt

SEQ ID NO: 1002 - RNA, 21 nt, synthetic construct
  modified_base 20..21: mod_base = OTHER; note = thymine
  misc_feature 1..21: note = Description of Artificial Sequence: Synthetic oligonucleotide
  misc_feature 1..21: note = Description of Combined DNA/RNA Molecule: Synthetic oligonucleotide
  misc_feature 20..21: note = Deoxythymidine dinucleotide
  source 1..21: mol_type = other RNA
tcagcgtttcctgtctttgtt

SEQ ID NO: 1003 - RNA, 21 nt, synthetic construct
  modified_base 20..21: mod_base = OTHER; note = thymine
  misc_feature 1..21: note = Description of Artificial Sequence: Synthetic oligonucleotide
  misc_feature 1..21: note = Description of Combined DNA/RNA Molecule: Synthetic oligonucleotide
  misc_feature 20..21: note = Deoxythymidine dinucleotide
  source 1..21: mol_type = other RNA
tcgacttccagcgtttccttt

SEQ ID NO: 1004 - RNA, 21 nt, synthetic construct
  modified_base 20..21: mod_base = OTHER; note = thymine
  misc_feature 1..21: note = Description of Artificial Sequence: Synthetic oligonucleotide
  misc_feature 1..21: note = Description of Combined DNA/RNA Molecule: Synthetic oligonucleotide
  misc_feature 20..21: note = Deoxythymidine dinucleotide
  source 1..21: mol_type = other RNA
tcaccacaagccaaacgactt

SEQ ID NO: 1005 - RNA, 21 nt, synthetic construct
  modified_base 20..21: mod_base = OTHER; note = thymine
  misc_feature 1..21: note = Description of Artificial Sequence: Synthetic oligonucleotide
  misc_feature 1..21: note = Description of Combined DNA/RNA Molecule: Synthetic oligonucleotide
  misc_feature 20..21: note = Deoxythymidine dinucleotide
  source 1..21: mol_type = other RNA
tacaccacaagccaaacgatt

SEQ ID NO: 1006 - RNA, 21 nt, synthetic construct
  modified_base 20..21: mod_base = OTHER; note = thymine
  misc_feature 1..21: note = Description of Artificial Sequence: Synthetic oligonucleotide
  misc_feature 1..21: note = Description of Combined DNA/RNA Molecule: Synthetic oligonucleotide
  misc_feature 20..21: note = Deoxythymidine dinucleotide
  source 1..21: mol_type = other RNA
ttacaccacaagccaaacgtt

SEQ ID NO: 1007 - RNA, 21 nt, synthetic construct
  modified_base 20..21: mod_base = OTHER; note = thymine
  misc_feature 1..21: note = Description of Artificial Sequence: Synthetic oligonucleotide
  misc_feature 1..21: note = Description of Combined DNA/RNA Molecule: Synthetic oligonucleotide
  misc_feature 20..21: note = Deoxythymidine dinucleotide
  source 1..21: mol_type = other RNA
tttacaccacaagccaaactt

SEQ ID NO: 1008 - RNA, 21 nt, synthetic construct
  modified_base 20..21: mod_base = OTHER; note = thymine
  misc_feature 1..21: note = Description of Artificial Sequence: Synthetic oligonucleotide
  misc_feature 1..21: note = Description of Combined DNA/RNA Molecule: Synthetic oligonucleotide
  misc_feature 20..21: note = Deoxythymidine dinucleotide
  source 1..21: mol_type = other RNA
taattacaccacaagccaatt

SEQ ID NO: 1009 - RNA, 21 nt, synthetic construct
  modified_base 20..21: mod_base = OTHER; note = thymine
  misc_feature 1..21: note = Description of Artificial Sequence: Synthetic oligonucleotide
  misc_feature 1..21: note = Description of Combined DNA/RNA Molecule: Synthetic oligonucleotide
  misc_feature 20..21: note = Deoxythymidine dinucleotide
  source 1..21: mol_type = other RNA
tccaattacaccacaagcctt

SEQ ID NO: 1010 - RNA, 21 nt, synthetic construct
  modified_base 20..21: mod_base = OTHER; note = thymine
  misc_feature 1..21: note = Description of Artificial Sequence: Synthetic oligonucleotide
  misc_feature 1..21: note = Description of Combined DNA/RNA Molecule: Synthetic oligonucleotide
  misc_feature 20..21: note = Deoxythymidine dinucleotide
  source 1..21: mol_type = other RNA
tcccaattacaccacaagctt

SEQ ID NO: 1011 - RNA, 21 nt, synthetic construct
  modified_base 20..21: mod_base = OTHER; note = thymine
  misc_feature 1..21: note = Description of Artificial Sequence: Synthetic oligonucleotide
  misc_feature 1..21: note = Description of Combined DNA/RNA Molecule: Synthetic oligonucleotide
  misc_feature 20..21: note = Deoxythymidine dinucleotide
  source 1..21: mol_type = other RNA
ttcccaattacaccacaagtt

SEQ ID NO: 1012 - RNA, 21 nt, synthetic construct
  modified_base 20..21: mod_base = OTHER; note = thymine
  misc_feature 1..21: note = Description of Artificial Sequence: Synthetic oligonucleotide
  misc_feature 1..21: note = Description of Combined DNA/RNA Molecule: Synthetic oligonucleotide
  misc_feature 20..21: note = Deoxythymidine dinucleotide
  source 1..21: mol_type = other RNA
tgatcccaattacaccacatt

SEQ ID NO: 1013 - RNA, 21 nt, synthetic construct
  modified_base 20..21: mod_base = OTHER; note = thymine
  misc_feature 1..21: note = Description of Artificial Sequence: Synthetic oligonucleotide
  misc_feature 1..21: note = Description of Combined DNA/RNA Molecule: Synthetic oligonucleotide
  misc_feature 20..21: note = Deoxythymidine dinucleotide
  source 1..21: mol_type = other RNA
tcgatcccaattacaccactt

SEQ ID NO: 1014 - RNA, 21 nt, synthetic construct
  modified_base 20..21: mod_base = OTHER; note = thymine
  misc_feature 1..21: note = Description of Artificial Sequence: Synthetic oligonucleotide
  misc_feature 1..21: note = Description of Combined DNA/RNA Molecule: Synthetic oligonucleotide
  misc_feature 20..21: note = Deoxythymidine dinucleotide
  source 1..21: mol_type = other RNA
tgcgatcccaattacaccatt

SEQ ID NO: 1015 - RNA, 21 nt, synthetic construct
  modified_base 20..21: mod_base = OTHER; note = thymine
  misc_feature 1..21: note = Description of Artificial Sequence: Synthetic oligonucleotide
  misc_feature 1..21: note = Description of Combined DNA/RNA Molecule: Synthetic oligonucleotide
  misc_feature 20..21: note = Deoxythymidine dinucleotide
  source 1..21: mol_type = other RNA
tttgggcgatcccaattactt

SEQ ID NO: 1016 - RNA, 21 nt, synthetic construct
  modified_base 20..21: mod_base = OTHER; note = thymine
  misc_feature 1..21: note = Description of Artificial Sequence: Synthetic oligonucleotide
  misc_feature 1..21: note = Description of Combined DNA/RNA Molecule: Synthetic oligonucleotide
  misc_feature 20..21: note = Deoxythymidine dinucleotide
  source 1..21: mol_type = other RNA
tattgggcgatcccaattatt

SEQ ID NO: 1017 - RNA, 21 nt, synthetic construct
  modified_base 20..21: mod_base = OTHER; note = thymine
  misc_feature 1..21: note = Description of Artificial Sequence: Synthetic oligonucleotide
  misc_feature 1..21: note = Description of Combined DNA/RNA Molecule: Synthetic oligonucleotide
  misc_feature 20..21: note = Deoxythymidine dinucleotide
  source 1..21: mol_type = other RNA
ttattgggcgatcccaatttt

SEQ ID NO: 1018 - RNA, 21 nt, synthetic construct
  modified_base 20..21: mod_base = OTHER; note = thymine
  misc_feature 1..21: note = Description of Artificial Sequence: Synthetic oligonucleotide
  misc_feature 1..21: note = Description of Combined DNA/RNA Molecule: Synthetic oligonucleotide
  misc_feature 20..21: note = Deoxythymidine dinucleotide
  source 1..21: mol_type = other RNA
tttattgggcgatcccaattt

SEQ ID NO: 1019 - RNA, 21 nt, synthetic construct
  modified_base 20..21: mod_base = OTHER; note = thymine
  misc_feature 1..21: note = Description of Artificial Sequence: Synthetic oligonucleotide
  misc_feature 1..21: note = Description of Combined DNA/RNA Molecule: Synthetic oligonucleotide
  misc_feature 20..21: note = Deoxythymidine dinucleotide
  source 1..21: mol_type = other RNA
ttttattgggcgatcccaatt

SEQ ID NO: 1020 - RNA, 21 nt, synthetic construct
  modified_base 20..21: mod_base = OTHER; note = thymine
  misc_feature 1..21: note = Description of Artificial Sequence: Synthetic oligonucleotide
  misc_feature 1..21: note = Description of Combined DNA/RNA Molecule: Synthetic oligonucleotide
  misc_feature 20..21: note = Deoxythymidine dinucleotide
  source 1..21: mol_type = other RNA
tgtttattgggcgatcccatt

SEQ ID NO: 1021 - RNA, 21 nt, synthetic construct
  modified_base 20..21: mod_base = OTHER; note = thymine
  misc_feature 1..21: note = Description of Artificial Sequence: Synthetic oligonucleotide
  misc_feature 1..21: note = Description of Combined DNA/RNA Molecule: Synthetic oligonucleotide
  misc_feature 20..21: note = Deoxythymidine dinucleotide
  source 1..21: mol_type = other RNA
ttgtttattgggcgatccctt

SEQ ID NO: 1022 - RNA, 21 nt, synthetic construct
  modified_base 20..21: mod_base = OTHER; note = thymine
  misc_feature 1..21: note = Description of Artificial Sequence: Synthetic oligonucleotide
  misc_feature 1..21: note = Description of Combined DNA/RNA Molecule: Synthetic oligonucleotide
  misc_feature 20..21: note = Deoxythymidine dinucleotide
  source 1..21: mol_type = other RNA
tgaatgtttattgggcgattt

SEQ ID NO: 1023 - RNA, 21 nt, synthetic construct
  modified_base 20..21: mod_base = OTHER; note = thymine
  misc_feature 1..21: note = Description of Artificial Sequence: Synthetic oligonucleotide
  misc_feature 1..21: note = Description of Combined DNA/RNA Molecule: Synthetic oligonucleotide
  misc_feature 20..21: note = Deoxythymidine dinucleotide
  source 1..21: mol_type = other RNA
tcaagggaatgtttattggtt

SEQ ID NO: 1024 - RNA, 21 nt, synthetic construct
  modified_base 20..21: mod_base = OTHER; note = thymine
  misc_feature 1..21: note = Description of Artificial Sequence: Synthetic oligonucleotide
  misc_feature 1..21: note = Description of Combined DNA/RNA Molecule: Synthetic oligonucleotide
  misc_feature 20..21: note = Deoxythymidine dinucleotide
  source 1..21: mol_type = other RNA
tccaagggaatgtttattgtt

SEQ ID NO: 1025 - RNA, 21 nt, synthetic construct
  modified_base 20..21: mod_base = OTHER; note = thymine
  misc_feature 1..21: note = Description of Artificial Sequence: Synthetic oligonucleotide
  misc_feature 1..21: note = Description of Combined DNA/RNA Molecule: Synthetic oligonucleotide
  misc_feature 20..21: note = Deoxythymidine dinucleotide
  source 1..21: mol_type = other RNA
ttccaagggaatgtttatttt

SEQ ID NO: 1026 - RNA, 21 nt, synthetic construct
  modified_base 20..21: mod_base = OTHER; note = thymine
  misc_feature 1..21: note = Description of Artificial Sequence: Synthetic oligonucleotide
  misc_feature 1..21: note = Description of Combined DNA/RNA Molecule: Synthetic oligonucleotide
  misc_feature 20..21: note = Deoxythymidine dinucleotide
  source 1..21: mol_type = other RNA
tatccaagggaatgtttattt

SEQ ID NO: 1027 - RNA, 21 nt, synthetic construct
  modified_base 20..21: mod_base = OTHER; note = thymine
  misc_feature 1..21: note = Description of Artificial Sequence: Synthetic oligonucleotide
  misc_feature 1..21: note = Description of Combined DNA/RNA Molecule: Synthetic oligonucleotide
  misc_feature 20..21: note = Deoxythymidine dinucleotide
  source 1..21: mol_type = other RNA
tcatccaagggaatgtttatt

SEQ ID NO: 1028 - RNA, 21 nt, synthetic construct
  modified_base 20..21: mod_base = OTHER; note = thymine
  misc_feature 1..21: note = Description of Artificial Sequence: Synthetic oligonucleotide
  misc_feature 1..21: note = Description of Combined DNA/RNA Molecule: Synthetic oligonucleotide
  misc_feature 20..21: note = Deoxythymidine dinucleotide
  source 1..21: mol_type = other RNA
tacatccaagggaatgttttt

SEQ ID NO: 1029 - RNA, 21 nt, synthetic construct
  modified_base 20..21: mod_base = OTHER; note = thymine
  misc_feature 1..21: note = Description of Artificial Sequence: Synthetic oligonucleotide
  misc_feature 1..21: note = Description of Combined DNA/RNA Molecule: Synthetic oligonucleotide
  misc_feature 20..21: note = Deoxythymidine dinucleotide
  source 1..21: mol_type = other RNA
ttacatccaagggaatgtttt

SEQ ID NO: 1030 - RNA, 21 nt, synthetic construct
  modified_base 20..21: mod_base = OTHER; note = thymine
  misc_feature 1..21: note = Description of Artificial Sequence: Synthetic oligonucleotide
  misc_feature 1..21: note = Description of Combined DNA/RNA Molecule: Synthetic oligonucleotide
  misc_feature 20..21: note = Deoxythymidine dinucleotide
  source 1..21: mol_type = other RNA
tgactacatccaagggaattt

SEQ ID NO: 1031 - RNA, 21 nt, synthetic construct
  modified_base 20..21: mod_base = OTHER; note = thymine
  misc_feature 1..21: note = Description of Artificial Sequence: Synthetic oligonucleotide
  misc_feature 1..21: note = Description of Combined DNA/RNA Molecule: Synthetic oligonucleotide
  misc_feature 20..21: note = Deoxythymidine dinucleotide
  source 1..21: mol_type = other RNA
tcctcagactacatccaagtt

SEQ ID NO: 1032 - RNA, 21 nt, synthetic construct
  modified_base 20..21: mod_base = OTHER; note = thymine
  misc_feature 1..21: note = Description of Artificial Sequence: Synthetic oligonucleotide
  misc_feature 1..21: note = Description of Combined DNA/RNA Molecule: Synthetic oligonucleotide
  misc_feature 20..21: note = Deoxythymidine dinucleotide
  source 1..21: mol_type = other RNA
ttgagttaaggggcctcagtt

SEQ ID NO: 1033 - RNA, 21 nt, synthetic construct
  modified_base 20..21: mod_base = OTHER; note = thymine
  misc_feature 1..21: note = Description of Artificial Sequence: Synthetic oligonucleotide
  misc_feature 1..21: note = Description of Combined DNA/RNA Molecule: Synthetic oligonucleotide
  misc_feature 20..21: note = Deoxythymidine dinucleotide
  source 1..21: mol_type = other RNA
tgatgagttaaggggcctctt

SEQ ID NO: 1034 - RNA, 21 nt, synthetic construct
  modified_base 20..21: mod_base = OTHER; note = thymine
  misc_feature 1..21: note = Description of Artificial Sequence: Synthetic oligonucleotide
  misc_feature 1..21: note = Description of Combined DNA/RNA Molecule: Synthetic oligonucleotide
  misc_feature 20..21: note = Deoxythymidine dinucleotide
  source 1..21: mol_type = other RNA
tagatgagttaaggggccttt

SEQ ID NO: 1035 - RNA, 21 nt, synthetic construct
  modified_base 20..21: mod_base = OTHER; note = thymine
  misc_feature 1..21: note = Description of Artificial Sequence: Synthetic oligonucleotide
  misc_feature 1..21: note = Description of Combined DNA/RNA Molecule: Synthetic oligonucleotide
  misc_feature 20..21: note = Deoxythymidine dinucleotide
  source 1..21: mol_type = other RNA
taacagatgagttaaggggtt

SEQ ID NO: 1036 - RNA, 21 nt, synthetic construct
  modified_base 20..21: mod_base = OTHER; note = thymine
  misc_feature 1..21: note = Description of Artificial Sequence: Synthetic oligonucleotide
  misc_feature 1..21: note = Description of Combined DNA/RNA Molecule: Synthetic oligonucleotide
  misc_feature 20..21: note = Deoxythymidine dinucleotide
  source 1..21: mol_type = other RNA
ttaacagatgagttaagggtt

SEQ ID NO: 1037 - RNA, 21 nt, synthetic construct
  modified_base 20..21: mod_base = OTHER; note = thymine
  misc_feature 1..21: note = Description of Artificial Sequence: Synthetic oligonucleotide
  misc_feature 1..21: note = Description of Combined DNA/RNA Molecule: Synthetic oligonucleotide
  misc_feature 20..21: note = Deoxythymidine dinucleotide
  source 1..21: mol_type = other RNA
tataacagatgagttaaggtt

SEQ ID NO: 1038 - RNA, 21 nt, synthetic construct
  modified_base 20..21: mod_base = OTHER; note = thymine
  misc_feature 1..21: note = Description of Artificial Sequence: Synthetic oligonucleotide
  misc_feature 1..21: note = Description of Combined DNA/RNA Molecule: Synthetic oligonucleotide
  misc_feature 20..21: note = Deoxythymidine dinucleotide
  source 1..21: mol_type = other RNA
tgataacagatgagttaagtt

SEQ ID NO: 1039 - RNA, 21 nt, synthetic construct
  modified_base 20..21: mod_base = OTHER; note = thymine
  misc_feature 1..21: note = Description of Artificial Sequence: Synthetic oligonucleotide
  misc_feature 1..21: note = Description of Combined DNA/RNA Molecule: Synthetic oligonucleotide
  misc_feature 20..21: note = Deoxythymidine dinucleotide
  source 1..21: mol_type = other RNA
tggataacagatgagttaatt

SEQ ID NO: 1040 - RNA, 21 nt, synthetic construct
  modified_base 20..21: mod_base = OTHER; note = thymine
  misc_feature 1..21: note = Description of Artificial Sequence: Synthetic oligonucleotide
  misc_feature 1..21: note = Description of Combined DNA/RNA Molecule: Synthetic oligonucleotide
  misc_feature 20..21: note = Deoxythymidine dinucleotide
  source 1..21: mol_type = other RNA
taggataacagatgagttatt

SEQ ID NO: 1041 - RNA, 21 nt, synthetic construct
  modified_base 20..21: mod_base = OTHER; note = thymine
  misc_feature 1..21: note = Description of Artificial Sequence: Synthetic oligonucleotide
  misc_feature 1..21: note = Description of Combined DNA/RNA Molecule: Synthetic oligonucleotide
  misc_feature 20..21: note = Deoxythymidine dinucleotide
  source 1..21: mol_type = other RNA
tcaggataacagatgagtttt

SEQ ID NO: 1042 - RNA, 21 nt, synthetic construct
  modified_base 20..21: mod_base = OTHER; note = thymine
  misc_feature 1..21: note = Description of Artificial Sequence: Synthetic oligonucleotide
  misc_feature 1..21: note = Description of Combined DNA/RNA Molecule: Synthetic oligonucleotide
  misc_feature 20..21: note = Deoxythymidine dinucleotide
  source 1..21: mol_type = other RNA
ttacagctagcaggataactt

SEQ ID NO: 1043 - RNA, 21 nt, synthetic construct
  modified_base 20..21: mod_base = OTHER; note = thymine
  misc_feature 1..21: note = Description of Artificial Sequence: Synthetic oligonucleotide
  misc_feature 1..21: note = Description of Combined DNA/RNA Molecule: Synthetic oligonucleotide
  misc_feature 20..21: note = Deoxythymidine dinucleotide
  source 1..21: mol_type = other RNA
tcatttctacagctagcagtt

SEQ ID NO: 1044 - RNA, 21 nt, synthetic construct
  modified_base 20..21: mod_base = OTHER; note = thymine
  misc_feature 1..21: note = Description of Artificial Sequence: Synthetic oligonucleotide
  misc_feature 1..21: note = Description of Combined DNA/RNA Molecule: Synthetic oligonucleotide
  misc_feature 20..21: note = Deoxythymidine dinucleotide
  source 1..21: mol_type = other RNA
tacatttctacagctagcatt

SEQ ID NO: 1045 - RNA, 21 nt, synthetic construct
  modified_base 20..21: mod_base = OTHER; note = thymine
  misc_feature 1..21: note = Description of Artificial Sequence: Synthetic oligonucleotide
  misc_feature 1..21: note = Description of Combined DNA/RNA Molecule: Synthetic oligonucleotide
  misc_feature 20..21: note = Deoxythymidine dinucleotide
  source 1..21: mol_type = other RNA
taggatacatttctacagctt

SEQ ID NO: 1046 - RNA, 21 nt, synthetic construct
  modified_base 20..21: mod_base = OTHER; note = thymine
  misc_feature 1..21: note = Description of Artificial Sequence: Synthetic oligonucleotide
  misc_feature 1..21: note = Description of Combined DNA/RNA Molecule: Synthetic oligonucleotide
  misc_feature 20..21: note = Deoxythymidine dinucleotide
  source 1..21: mol_type = other RNA
tcaggatacatttctacagtt

SEQ ID NO: 1047 - RNA, 21 nt, synthetic construct
  modified_base 20..21: mod_base = OTHER; note = thymine
  misc_feature 1..21: note = Description of Artificial Sequence: Synthetic oligonucleotide
  misc_feature 1..21: note = Description of Combined DNA/RNA Molecule: Synthetic oligonucleotide
  misc_feature 20..21: note = Deoxythymidine dinucleotide
  source 1..21: mol_type = other RNA
ttcaggatacatttctacatt

SEQ ID NO: 1048 - RNA, 21 nt, synthetic construct
  modified_base 20..21: mod_base = OTHER; note = thymine
  misc_feature 1..21: note = Description of Artificial Sequence: Synthetic oligonucleotide
  misc_feature 1..21: note = Description of Combined DNA/RNA Molecule: Synthetic oligonucleotide
  misc_feature 20..21: note = Deoxythymidine dinucleotide
  source 1..21: mol_type = other RNA
tatcaggatacatttctactt

SEQ ID NO: 1049 - RNA, 21 nt, synthetic construct
  modified_base 20..21: mod_base = OTHER; note = thymine
  misc_feature 1..21: note = Description of Artificial Sequence: Synthetic oligonucleotide
  misc_feature 1..21: note = Description of Combined DNA/RNA Molecule: Synthetic oligonucleotide
  misc_feature 20..21: note = Deoxythymidine dinucleotide
  source 1..21: mol_type = other RNA
tgtttatcaggatacattttt

SEQ ID NO: 1050 - RNA, 21 nt, synthetic construct
  modified_base 20..21: mod_base = OTHER; note = thymine
  misc_feature 1..21: note = Description of Artificial Sequence: Synthetic oligonucleotide
  misc_feature 1..21: note = Description of Combined DNA/RNA Molecule: Synthetic oligonucleotide
  misc_feature 20..21: note = Deoxythymidine dinucleotide
  source 1..21: mol_type = other RNA
ttaatgtttatcaggatactt

SEQ ID NO: 1051 - RNA, 21 nt, synthetic construct
  modified_base 20..21: mod_base = OTHER; note = thymine
  misc_feature 1..21: note = Description of Artificial Sequence: Synthetic oligonucleotide
  misc_feature 1..21: note = Description of Combined DNA/RNA Molecule: Synthetic oligonucleotide
  misc_feature 20..21: note = Deoxythymidine dinucleotide
  source 1..21: mol_type = other RNA
ttaagattacagtgtttaatt

SEQ ID NO: 1052 - RNA, 21 nt, synthetic construct
  modified_base 20..21: mod_base = OTHER; note = thymine
  misc_feature 1..21: note = Description of Artificial Sequence: Synthetic oligonucleotide
  misc_feature 1..21: note = Description of Combined DNA/RNA Molecule: Synthetic oligonucleotide
  misc_feature 20..21: note = Deoxythymidine dinucleotide
  source 1..21: mol_type = other RNA
tcacttttaagattacagttt

SEQ ID NO: 1053 - RNA, 21 nt, synthetic construct
  modified_base 20..21: mod_base = OTHER; note = thymine
  misc_feature 1..21: note = Description of Artificial Sequence: Synthetic oligonucleotide
  misc_feature 1..21: note = Description of Combined DNA/RNA Molecule: Synthetic oligonucleotide
  misc_feature 20..21: note = Deoxythymidine dinucleotide
  source 1..21: mol_type = other RNA
tacacttttaagattacagtt

SEQ ID NO: 1054 - RNA, 21 nt, synthetic construct
  modified_base 20..21: mod_base = OTHER; note = thymine
  misc_feature 1..21: note = Description of Artificial Sequence: Synthetic oligonucleotide
  misc_feature 1..21: note = Description of Combined DNA/RNA Molecule: Synthetic oligonucleotide
  misc_feature 20..21: note = Deoxythymidine dinucleotide
  source 1..21: mol_type = other RNA
ttacacttttaagattacatt

SEQ ID NO: 1055 - RNA, 21 nt, synthetic construct
  modified_base 20..21: mod_base = OTHER; note = thymine
  misc_feature 1..21: note = Description of Artificial Sequence: Synthetic oligonucleotide
  misc_feature 1..21: note = Description of Combined DNA/RNA Molecule: Synthetic oligonucleotide
  misc_feature 20..21: note = Deoxythymidine dinucleotide
  source 1..21: mol_type = other RNA
tttacacttttaagattactt

SEQ ID NO: 1056 - RNA, 21 nt, synthetic construct
  modified_base 20..21: mod_base = OTHER; note = thymine
  misc_feature 1..21: note = Description of Artificial Sequence: Synthetic oligonucleotide
  misc_feature 1..21: note = Description of Combined DNA/RNA Molecule: Synthetic oligonucleotide
  misc_feature 20..21: note = Deoxythymidine dinucleotide
  source 1..21: mol_type = other RNA
tcacaattacacttttaagtt

SEQ ID NO: 1057 - RNA, 21 nt, synthetic construct
  modified_base 20..21: mod_base = OTHER; note = thymine
  misc_feature 1..21: note = Description of Artificial Sequence: Synthetic oligonucleotide
  misc_feature 1..21: note = Description of Combined DNA/RNA Molecule: Synthetic oligonucleotide
  misc_feature 20..21: note = Deoxythymidine dinucleotide
  source 1..21: mol_type = other RNA
tagtttctcactacaggtatt

SEQ ID NO: 1058 - RNA, 21 nt, synthetic construct
  modified_base 20..21: mod_base = OTHER; note = thymine
  misc_feature 1..21: note = Description of Artificial Sequence: Synthetic oligonucleotide
  misc_feature 1..21: note = Description of Combined DNA/RNA Molecule: Synthetic oligonucleotide
  misc_feature 20..21: note = Deoxythymidine dinucleotide
  source 1..21: mol_type = other RNA
ttcttccaagtgatcataatt

SEQ ID NO: 1059 - RNA, 21 nt, synthetic construct
  modified_base 20..21: mod_base = OTHER; note = thymine
  misc_feature 1..21: note = Description of Artificial Sequence: Synthetic oligonucleotide
  misc_feature 1..21: note = Description of Combined DNA/RNA Molecule: Synthetic oligonucleotide
  misc_feature 20..21: note = Deoxythymidine dinucleotide
  source 1..21: mol_type = other RNA
taatcttccaagtgatcattt

SEQ ID NO: 1060 - RNA, 21 nt, synthetic construct
  modified_base 20..21: mod_base = OTHER; note = thymine
  misc_feature 1..21: note = Description of Artificial Sequence: Synthetic oligonucleotide
  misc_feature 1..21: note = Description of Combined DNA/RNA Molecule: Synthetic oligonucleotide
  misc_feature 20..21: note = Deoxythymidine dinucleotide
  source 1..21: mol_type = other RNA
tacaaatcttccaagtgattt

SEQ ID NO: 1061 - RNA, 21 nt, synthetic construct
  modified_base 20..21: mod_base = OTHER; note = thymine
  misc_feature 1..21: note = Description of Artificial Sequence: Synthetic oligonucleotide
  misc_feature 1..21: note = Description of Combined DNA/RNA Molecule: Synthetic oligonucleotide
  misc_feature 20..21: note = Deoxythymidine dinucleotide
  source 1..21: mol_type = other RNA
taactatacaaatcttccatt

SEQ ID NO: 1062 - RNA, 21 nt, synthetic construct
  modified_base 20..21: mod_base = OTHER; note = thymine
  misc_feature 1..21: note = Description of Artificial Sequence: Synthetic oligonucleotide
  misc_feature 1..21: note = Description of Combined DNA/RNA Molecule: Synthetic oligonucleotide
  misc_feature 20..21: note = Deoxythymidine dinucleotide
  source 1..21: mol_type = other RNA
tttttaactgagttttatatt

SEQ ID NO: 1063 - RNA, 21 nt, synthetic construct
  modified_base 20..21: mod_base = OTHER; note = thymine
  misc_feature 1..21: note = Description of Artificial Sequence: Synthetic oligonucleotide
  misc_feature 1..21: note = Description of Combined DNA/RNA Molecule: Synthetic oligonucleotide
  misc_feature 20..21: note = Deoxythymidine dinucleotide
  source 1..21: mol_type = other RNA
tgacattttaactgagttttt

SEQ ID NO: 1064 - RNA, 21 nt, synthetic construct
  modified_base 20..21: mod_base = OTHER; note = thymine
  misc_feature 1..21: note = Description of Artificial Sequence: Synthetic oligonucleotide
  misc_feature 1..21: note = Description of Combined DNA/RNA Molecule: Synthetic oligonucleotide
  misc_feature 20..21: note = Deoxythymidine dinucleotide
  source 1..21: mol_type = other RNA
tcaggtcattgaaacagactt

SEQ ID NO: 1065 - RNA, 21 nt, synthetic construct
  modified_base 20..21: mod_base = OTHER; note = thymine
  misc_feature 1..21: note = Description of Artificial Sequence: Synthetic oligonucleotide
  misc_feature 1..21: note = Description of Combined DNA/RNA Molecule: Synthetic oligonucleotide
  misc_feature 20..21: note = Deoxythymidine dinucleotide
  source 1..21: mol_type = other RNA
ttggcaaaatacaggtcattt

SEQ ID NO: 1066 - RNA, 21 nt, synthetic construct
  modified_base 20..21: mod_base = OTHER; note = thymine
  misc_feature 1..21: note = Description of Artificial Sequence: Synthetic oligonucleotide
  misc_feature 1..21: note = Description of Combined DNA/RNA Molecule: Synthetic oligonucleotide
  misc_feature 20..21: note = Deoxythymidine dinucleotide
  source 1..21: mol_type = other RNA
tgtctggcaaaatacaggttt

SEQ ID NO: 1067 - RNA, 21 nt, synthetic construct
  modified_base 20..21: mod_base = OTHER; note = thymine
  misc_feature 1..21: note = Description of Artificial Sequence: Synthetic oligonucleotide
  misc_feature 1..21: note = Description of Combined DNA/RNA Molecule: Synthetic oligonucleotide
  misc_feature 20..21: note = Deoxythymidine dinucleotide
  source 1..21: mol_type = other RNA
tagtctggcaaaatacaggtt

SEQ ID NO: 1068 - RNA, 21 nt, synthetic construct
  modified_base 20..21: mod_base = OTHER; note = thymine
  misc_feature 1..21: note = Description of Artificial Sequence: Synthetic oligonucleotide
  misc_feature 1..21: note = Description of Combined DNA/RNA Molecule: Synthetic oligonucleotide
  misc_feature 20..21: note = Deoxythymidine dinucleotide
  source 1..21: mol_type = other RNA
tatacccatctgtgatttatt

SEQ ID NO: 1069 - RNA, 21 nt, synthetic construct
  modified_base 20..21: mod_base = OTHER; note = thymine
  misc_feature 1..21: note = Description of Artificial Sequence: Synthetic oligonucleotide
  misc_feature 1..21: note = Description of Combined DNA/RNA Molecule: Synthetic oligonucleotide
  misc_feature 20..21: note = Deoxythymidine dinucleotide
  source 1..21: mol_type = other RNA
tttaatacccatctgtgattt

SEQ ID NO: 1070 - RNA, 21 nt, synthetic construct
  modified_base 20..21: mod_base = OTHER; note = thymine
  misc_feature 1..21: note = Description of Artificial Sequence: Synthetic oligonucleotide
  misc_feature 1..21: note = Description of Combined DNA/RNA Molecule: Synthetic oligonucleotide
  misc_feature 20..21: note = Deoxythymidine dinucleotide
  source 1..21: mol_type = other RNA
ttttaatacccatctgtgatt

SEQ ID NO: 1071 - RNA, 21 nt, synthetic construct
  modified_base 20..21: mod_base = OTHER; note = thymine
  misc_feature 1..21: note = Description of Artificial Sequence: Synthetic oligonucleotide
  misc_feature 1..21: note = Description of Combined DNA/RNA Molecule: Synthetic oligonucleotide
  misc_feature 20..21: note = Deoxythymidine dinucleotide
  source 1..21: mol_type = other RNA
tagtttaatacccatctgttt

SEQ ID NO: 1072 - RNA, 21 nt, synthetic construct
  modified_base 20..21: mod_base = OTHER; note = thymine
  misc_feature 1..21: note = Description of Artificial Sequence: Synthetic oligonucleotide
  misc_feature 1..21: note = Description of Combined DNA/RNA Molecule: Synthetic oligonucleotide
  misc_feature 20..21: note = Deoxythymidine dinucleotide
  source 1..21: mol_type = other RNA
taagtttaatacccatctgtt

SEQ ID NO: 1073 - RNA, 21 nt, synthetic construct
  modified_base 20..21: mod_base = OTHER; note = thymine
  misc_feature 1..21: note = Description of Artificial Sequence: Synthetic oligonucleotide
  misc_feature 1..21: note = Description of Combined DNA/RNA Molecule: Synthetic oligonucleotide
  misc_feature 20..21: note = Deoxythymidine dinucleotide
  source 1..21: mol_type = other RNA
tcaagtttaatacccatcttt

SEQ ID NO: 1074 - RNA, 21 nt, synthetic construct
  modified_base 20..21: mod_base = OTHER; note = thymine
  misc_feature 1..21: note = Description of Artificial Sequence: Synthetic oligonucleotide
  misc_feature 1..21: note = Description of Combined DNA/RNA Molecule: Synthetic oligonucleotide
  misc_feature 20..21: note = Deoxythymidine dinucleotide
  source 1..21: mol_type = other RNA
tgacaagtttaatacccattt

SEQ ID NO: 1075 - RNA, 21 nt, synthetic construct
  modified_base 20..21: mod_base = OTHER; note = thymine
  misc_feature 1..21: note = Description of Artificial Sequence: Synthetic oligonucleotide
  misc_feature 1..21: note = Description of Combined DNA/RNA Molecule: Synthetic oligonucleotide
  misc_feature 20..21: note = Deoxythymidine dinucleotide
  source 1..21: mol_type = other RNA
tgaaattctgacaagtttatt

SEQ ID NO: 1076 - RNA, 21 nt, synthetic construct
  modified_base 20..21: mod_base = OTHER; note = thymine
  misc_feature 1..21: note = Description of Artificial Sequence: Synthetic oligonucleotide
  misc_feature 1..21: note = Description of Combined DNA/RNA Molecule: Synthetic oligonucleotide
  misc_feature 20..21: note = Deoxythymidine dinucleotide
  source 1..21: mol_type = other RNA
tattcacaggcttgaatgatt

SEQ ID NO: 1077 - RNA, 21 nt, synthetic construct
  modified_base 20..21: mod_base = OTHER; note = thymine
  misc_feature 1..21: note = Description of Artificial Sequence: Synthetic oligonucleotide
  misc_feature 1..21: note = Description of Combined DNA/RNA Molecule: Synthetic oligonucleotide
  misc_feature 20..21: note = Deoxythymidine dinucleotide
  source 1..21: mol_type = other RNA
ttattcacaggcttgaatgtt

SEQ ID NO: 1078 - RNA, 21 nt, synthetic construct
  modified_base 20..21: mod_base = OTHER; note = thymine
  misc_feature 1..21: note = Description of Artificial Sequence: Synthetic oligonucleotide
  misc_feature 1..21: note = Description of Combined DNA/RNA Molecule: Synthetic oligonucleotide
  misc_feature 20..21: note = Deoxythymidine dinucleotide
  source 1..21: mol_type = other RNA
tccatacagggtttttatttt

SEQ ID NO: 1079 - RNA, 21 nt, synthetic construct
  modified_base 20..21: mod_base = OTHER; note = thymine
  misc_feature 1..21: note = Description of Artificial Sequence: Synthetic oligonucleotide
  misc_feature 1..21: note = Description of Combined DNA/RNA Molecule: Synthetic oligonucleotide
  misc_feature 20..21: note = Deoxythymidine dinucleotide
  source 1..21: mol_type = other RNA
tgccatacagggtttttattt

SEQ ID NO: 1080 - RNA, 21 nt, synthetic construct
  modified_base 20..21: mod_base = OTHER; note = thymine
  misc_feature 1..21: note = Description of Artificial Sequence: Synthetic oligonucleotide
  misc_feature 1..21: note = Description of Combined DNA/RNA Molecule: Synthetic oligonucleotide
  misc_feature 20..21: note = Deoxythymidine dinucleotide
  source 1..21: mol_type = other RNA
ttaagtgccatacagggtttt

SEQ ID NO: 1081 - RNA, 21 nt, synthetic construct
  modified_base 20..21: mod_base = OTHER; note = thymine
  misc_feature 1..21: note = Description of Artificial Sequence: Synthetic oligonucleotide
  misc_feature 1..21: note = Description of Combined DNA/RNA Molecule: Synthetic oligonucleotide
  misc_feature 20..21: note = Deoxythymidine dinucleotide
  source 1..21: mol_type = other RNA
tataagtgccatacagggttt

SEQ ID NO: 1082 - RNA, 21 nt, synthetic construct
  modified_base 20..21: mod_base = OTHER; note = thymine
  misc_feature 1..21: note = Description of Artificial Sequence: Synthetic oligonucleotide
  misc_feature 1..21: note = Description of Combined DNA/RNA Molecule: Synthetic oligonucleotide
  misc_feature 20..21: note = Deoxythymidine dinucleotide
  source 1..21: mol_type = other RNA
tgattcttttaatagcctctt

SEQ ID NO: 1083 - RNA, 21 nt, synthetic construct
  modified_base 20..21: mod_base = OTHER; note = thymine
  misc_feature 1..21: note = Description of Artificial Sequence: Synthetic oligonucleotide
  misc_feature 1..21: note = Description of Combined DNA/RNA Molecule: Synthetic oligonucleotide
  misc_feature 20..21: note = Deoxythymidine dinucleotide
  source 1..21: mol_type = other RNA
ttttgaatttggattcttttt

SEQ ID NO: 1084 - RNA, 21 nt, synthetic construct
  modified_base 20..21: mod_base = OTHER; note = thymine
  misc_feature 1..21: note = Description of Artificial Sequence: Synthetic oligonucleotide
  misc_feature 1..21: note = Description of Combined DNA/RNA Molecule: Synthetic oligonucleotide
  misc_feature 20..21: note = Deoxythymidine dinucleotide
  source 1..21: mol_type = other RNA
ttagtttgaatttggattctt

SEQ ID NO: 1085 - RNA, 21 nt, synthetic construct
  modified_base 20..21: mod_base = OTHER; note = thymine
  misc_feature 1..21: note = Description of Artificial Sequence: Synthetic oligonucleotide
  misc_feature 1..21: note = Description of Combined DNA/RNA Molecule: Synthetic oligonucleotide
  misc_feature 20..21: note = Deoxythymidine dinucleotide
  source 1..21: mol_type = other RNA
cggaggtctggcctataactt

SEQ ID NO: 1086 - RNA, 21 nt, synthetic construct
  modified_base 20..21: mod_base = OTHER; note = thymine
  misc_feature 1..21: note = Description of Artificial Sequence: Synthetic oligonucleotide
  misc_feature 1..21: note = Description of Combined DNA/RNA Molecule: Synthetic oligonucleotide
  misc_feature 20..21: note = Deoxythymidine dinucleotide
  source 1..21: mol_type = other RNA
ggaggtctggcctataaactt

SEQ ID NO: 1087 - RNA, 21 nt, synthetic construct
  modified_base 20..21: mod_base = OTHER; note = thymine
  misc_feature 1..21: note = Description of Artificial Sequence: Synthetic oligonucleotide
  misc_feature 1..21: note = Description of Combined DNA/RNA Molecule: Synthetic oligonucleotide
  misc_feature 20..21: note = Deoxythymidine dinucleotide
  source 1..21: mol_type = other RNA
gaggtctggcctataaagctt

SEQ ID NO: 1088 - RNA, 21 nt, synthetic construct
  modified_base 20..21: mod_base = OTHER; note = thymine
  misc_feature 1..21: note = Description of Artificial Sequence: Synthetic oligonucleotide
  misc_feature 1..21: note = Description of Combined DNA/RNA Molecule: Synthetic oligonucleotide
  misc_feature 20..21: note = Deoxythymidine dinucleotide
  source 1..21: mol_type = other RNA
aggtctggcctataaagtctt

SEQ ID NO: 1089 - RNA, 21 nt, synthetic construct
  modified_base 20..21: mod_base = OTHER; note = thymine
  misc_feature 1..21: note = Description of Artificial Sequence: Synthetic oligonucleotide
  misc_feature 1..21: note = Description of Combined DNA/RNA Molecule: Synthetic oligonucleotide
  misc_feature 20..21: note = Deoxythymidine dinucleotide
  source 1..21: mol_type = other RNA
ggtctggcctataaagtactt

SEQ ID NO: 1090 - RNA, 21 nt, synthetic construct
  modified_base 20..21: mod_base = OTHER; note = thymine
  misc_feature 1..21: note = Description of Artificial Sequence: Synthetic oligonucleotide
  misc_feature 1..21: note = Description of Combined DNA/RNA Molecule: Synthetic oligonucleotide
  misc_feature 20..21: note = Deoxythymidine dinucleotide
  source 1..21: mol_type = other RNA
tctggcctataaagtagtctt

SEQ ID NO: 1091 - RNA, 21 nt, synthetic construct
  modified_base 20..21: mod_base = OTHER; note = thymine
  misc_feature 1..21: note = Description of Artificial Sequence: Synthetic oligonucleotide
  misc_feature 1..21: note = Description of Combined DNA/RNA Molecule: Synthetic oligonucleotide
  misc_feature 20..21: note = Deoxythymidine dinucleotide
  source 1..21: mol_type = other RNA
ctggcctataaagtagtcctt

SEQ ID NO: 1092 - RNA, 21 nt, synthetic construct
  modified_base 20..21: mod_base = OTHER; note = thymine
  misc_feature 1..21: note = Description of Artificial Sequence: Synthetic oligonucleotide
  misc_feature 1..21: note = Description of Combined DNA/RNA Molecule: Synthetic oligonucleotide
  misc_feature 20..21: note = Deoxythymidine dinucleotide
  source 1..21: mol_type = other RNA
tggcctataaagtagtcgctt

SEQ ID NO: 1093 - RNA, 21 nt, synthetic construct
  modified_base 20..21: mod_base = OTHER; note = thymine
  misc_feature 1..21: note = Description of Artificial Sequence: Synthetic oligonucleotide
  misc_feature 1..21: note = Description of Combined DNA/RNA Molecule: Synthetic oligonucleotide
  misc_feature 20..21: note = Deoxythymidine dinucleotide
  source 1..21: mol_type = other RNA
ggcctataaagtagtcgcctt

SEQ ID NO: 1094 - RNA, 21 nt, synthetic construct
  modified_base 20..21: mod_base = OTHER; note = thymine
  misc_feature 1..21: note = Description of Artificial Sequence: Synthetic oligonucleotide
  misc_feature 1..21: note = Description of Combined DNA/RNA Molecule: Synthetic oligonucleotide
  misc_feature 20..21: note = Deoxythymidine dinucleotide
  source 1..21: mol_type = other RNA
gcctataaagtagtcgcgctt

SEQ ID NO: 1095 - RNA, 21 nt, synthetic construct
  modified_base 20..21: mod_base = OTHER; note = thymine
  misc_feature 1..21: note = Description of Artificial Sequence: Synthetic oligonucleotide
  misc_feature 1..21: note = Description of Combined DNA/RNA Molecule: Synthetic oligonucleotide
  misc_feature 20..21: note = Deoxythymidine dinucleotide
  source 1..21: mol_type = other RNA
cctataaagtagtcgcggctt

SEQ ID NO: 1096 - RNA, 21 nt, synthetic construct
  modified_base 20..21: mod_base = OTHER; note = thymine
  misc_feature 1..21: note = Description of Artificial Sequence: Synthetic oligonucleotide
  misc_feature 1..21: note = Description of Combined DNA/RNA Molecule: Synthetic oligonucleotide
  misc_feature 20..21: note = Deoxythymidine dinucleotide
  source 1..21: mol_type = other RNA
gtcgtagtctcctgcagcctt

SEQ ID NO: 1097 - RNA, 21 nt, synthetic construct
  modified_base 20..21: mod_base = OTHER; note = thymine
  misc_feature 1..21: note = Description of Artificial Sequence: Synthetic oligonucleotide
  misc_feature 1..21: note = Description of Combined DNA/RNA Molecule: Synthetic oligonucleotide
  misc_feature 20..21: note = Deoxythymidine dinucleotide
  source 1..21: mol_type = other RNA
cgtagtctcctgcagcgtctt

SEQ ID NO: 1098 - RNA, 21 nt, synthetic construct
  modified_base 20..21: mod_base = OTHER; note = thymine
  misc_feature 1..21: note = Description of Artificial Sequence: Synthetic oligonucleotide
  misc_feature 1..21: note = Description of Combined DNA/RNA Molecule: Synthetic oligonucleotide
  misc_feature 20..21: note = Deoxythymidine dinucleotide
  source 1..21: mol_type = other RNA
gtagtctcctgcagcgtcctt

SEQ ID NO: 1099 - RNA, 21 nt, synthetic construct
  modified_base 20..21: mod_base = OTHER; note = thymine
  misc_feature 1..21: note = Description of Artificial Sequence: Synthetic oligonucleotide
  misc_feature 1..21: note = Description of Combined DNA/RNA Molecule: Synthetic oligonucleotide
  misc_feature 20..21: note = Deoxythymidine dinucleotide
  source 1..21: mol_type = other RNA
tagtctcctgcagcgtctctt

SEQ ID NO: 1100 - RNA, 21 nt, synthetic construct
  modified_base 20..21: mod_base = OTHER; note = thymine
  misc_feature 1..21: note = Description of Artificial Sequence: Synthetic oligonucleotide
  misc_feature 1..21: note = Description of Combined DNA/RNA Molecule: Synthetic oligonucleotide
  misc_feature 20..21: note = Deoxythymidine dinucleotide
  source 1..21: mol_type = other RNA
atggcgacgaaggccgtgctt

SEQ ID NO: 1101 - RNA, 21 nt, synthetic construct
  modified_base 20..21: mod_base = OTHER; note = thymine
  misc_feature 1..21: note = Description of Artificial Sequence: Synthetic oligonucleotide
  misc_feature 1..21: note = Description of Combined DNA/RNA Molecule: Synthetic oligonucleotide
  misc_feature 20..21: note = Deoxythymidine dinucleotide
  source 1..21: mol_type = other RNA
cgacgaaggccgtgtgcgctt

SEQ ID NO: 1102 - RNA, 21 nt, synthetic construct
  modified_base 20..21: mod_base = OTHER; note = thymine
  misc_feature 1..21: note = Description of Artificial Sequence: Synthetic oligonucleotide
  misc_feature 1..21: note = Description of Combined DNA/RNA Molecule: Synthetic oligonucleotide
  misc_feature 20..21: note = Deoxythymidine dinucleotide
  source 1..21: mol_type = other RNA
gaaggccgtgtgcgtgctctt

SEQ ID NO: 1103 - RNA, 21 nt, synthetic construct
  modified_base 20..21: mod_base = OTHER; note = thymine
  misc_feature 1..21: note = Description of Artificial Sequence: Synthetic oligonucleotide
  misc_feature 1..21: note = Description of Combined DNA/RNA Molecule: Synthetic oligonucleotide
  misc_feature 20..21: note = Deoxythymidine dinucleotide
  source 1..21: mol_type = other RNA
ggccgtgtgcgtgctgaactt

SEQ ID NO: 1104 - RNA, 21 nt, synthetic construct
  modified_base 20..21: mod_base = OTHER; note = thymine
  misc_feature 1..21: note = Description of Artificial Sequence: Synthetic oligonucleotide
  misc_feature 1..21: note = Description of Combined DNA/RNA Molecule: Synthetic oligonucleotide
  misc_feature 20..21: note = Deoxythymidine dinucleotide
  source 1..21: mol_type = other RNA
agggcgacggcccagtgcctt

SEQ ID NO: 1105 - RNA, 21 nt, synthetic construct
  modified_base 20..21: mod_base = OTHER; note = thymine
  misc_feature 1..21: note = Description of Artificial Sequence: Synthetic oligonucleotide
  misc_feature 1..21: note = Description of Combined DNA/RNA Molecule: Synthetic oligonucleotide
  misc_feature 20..21: note = Deoxythymidine dinucleotide
  source 1..21: mol_type = other RNA
tgcagggcatcatcaattctt

SEQ ID NO: 1106 - RNA, 21 nt, synthetic construct
  modified_base 20..21: mod_base = OTHER; note = thymine
  misc_feature 1..21: note = Description of Artificial Sequence: Synthetic oligonucleotide
  misc_feature 1..21: note = Description of Combined DNA/RNA Molecule: Synthetic oligonucleotide
  misc_feature 20..21: note = Deoxythymidine dinucleotide
  source 1..21: mol_type = other RNA
gcagggcatcatcaatttctt

SEQ ID NO: 1107 - RNA, 21 nt, synthetic construct
  modified_base 20..21: mod_base = OTHER; note = thymine
  misc_feature 1..21: note = Description of Artificial Sequence: Synthetic oligonucleotide
  misc_feature 1..21: note = Description of Combined DNA/RNA Molecule: Synthetic oligonucleotide
  misc_feature 20..21: note = Deoxythymidine dinucleotide
  source 1..21: mol_type = other RNA
agggcatcatcaatttcgctt

SEQ ID NO: 1108 - RNA, 21 nt, synthetic construct
  modified_base 20..21: mod_base = OTHER; note = thymine
  misc_feature 1..21: note = Description of Artificial Sequence: Synthetic oligonucleotide
  misc_feature 1..21: note = Description of Combined DNA/RNA Molecule: Synthetic oligonucleotide
  misc_feature 20..21: note = Deoxythymidine dinucleotide
  source 1..21: mol_type = other RNA
gggcatcatcaatttcgactt

SEQ ID NO: 1109 - RNA, 21 nt, synthetic construct
  modified_base 20..21: mod_base = OTHER; note = thymine
  misc_feature 1..21: note = Description of Artificial Sequence: Synthetic oligonucleotide
  misc_feature 1..21: note = Description of Combined DNA/RNA Molecule: Synthetic oligonucleotide
  misc_feature 20..21: note = Deoxythymidine dinucleotide
  source 1..21: mol_type = other RNA
ggcatcatcaatttcgagctt

SEQ ID NO: 1110 - RNA, 21 nt, synthetic construct
  modified_base 20..21: mod_base = OTHER; note = thymine
  misc_feature 1..21: note = Description of Artificial Sequence: Synthetic oligonucleotide
  misc_feature 1..21: note = Description of Combined DNA/RNA Molecule: Synthetic oligonucleotide
  misc_feature 20..21: note = Deoxythymidine dinucleotide
  source 1..21: mol_type = other RNA
gcatcatcaatttcgagcctt

SEQ ID NO: 1111 - RNA, 21 nt, synthetic construct
  modified_base 20..21: mod_base = OTHER; note = thymine
  misc_feature 1..21: note = Description of Artificial Sequence: Synthetic oligonucleotide
  misc_feature 1..21: note = Description of Combined DNA/RNA Molecule: Synthetic oligonucleotide
  misc_feature 20..21: note = Deoxythymidine dinucleotide
  source 1..21: mol_type = other RNA
catcatcaatttcgagcactt

SEQ ID NO: 1112 - RNA, 21 nt, synthetic construct
  modified_base 20..21: mod_base = OTHER; note = thymine
  misc_feature 1..21: note = Description of Artificial Sequence: Synthetic oligonucleotide
  misc_feature 1..21: note = Description of Combined DNA/RNA Molecule: Synthetic oligonucleotide
  misc_feature 20..21: note = Deoxythymidine dinucleotide
  source 1..21: mol_type = other RNA
aatttcgagcagaaggaactt

SEQ ID NO: 1113 - RNA, 21 nt, synthetic construct
  modified_base 20..21: mod_base = OTHER; note = thymine
  misc_feature 1..21: note = Description of Artificial Sequence: Synthetic oligonucleotide
  misc_feature 1..21: note = Description of Combined DNA/RNA Molecule: Synthetic oligonucleotide
  misc_feature 20..21: note = Deoxythymidine dinucleotide
  source 1..21: mol_type = other RNA
ttcgagcagaaggaaagtctt

SEQ ID NO: 1114 - RNA, 21 nt, synthetic construct
  modified_base 20..21: mod_base = OTHER; note = thymine
  misc_feature 1..21: note = Description of Artificial Sequence: Synthetic oligonucleotide
  misc_feature 1..21: note = Description of Combined DNA/RNA Molecule: Synthetic oligonucleotide
  misc_feature 20..21: note = Deoxythymidine dinucleotide
  source 1..21: mol_type = other RNA
tcgagcagaaggaaagtactt

SEQ ID NO: 1115 - RNA, 21 nt, synthetic construct
  modified_base 20..21: mod_base = OTHER; note = thymine
  misc_feature 1..21: note = Description of Artificial Sequence: Synthetic oligonucleotide
  misc_feature 1..21: note = Description of Combined DNA/RNA Molecule: Synthetic oligonucleotide
  misc_feature 20..21: note = Deoxythymidine dinucleotide
  source 1..21: mol_type = other RNA
aaggtgtggggaagcattctt

SEQ ID NO: 1116 - RNA, 21 nt, synthetic construct
  modified_base 20..21: mod_base = OTHER; note = thymine
  misc_feature 1..21: note = Description of Artificial Sequence: Synthetic oligonucleotide
  misc_feature 1..21: note = Description of Combined DNA/RNA Molecule: Synthetic oligonucleotide
  misc_feature 20..21: note = Deoxythymidine dinucleotide
  source 1..21: mol_type = other RNA
ggtgtggggaagcattaactt

SEQ ID NO: 1117 - RNA, 21 nt, synthetic construct
  modified_base 20..21: mod_base = OTHER; note = thymine
  misc_feature 1..21: note = Description of Artificial Sequence: Synthetic oligonucleotide
  misc_feature 1..21: note = Description of Combined DNA/RNA Molecule: Synthetic oligonucleotide
  misc_feature 20..21: note = Deoxythymidine dinucleotide
  source 1..21: mol_type = other RNA
gactgactgaaggcctgcctt

SEQ ID NO: 1118 - RNA, 21 nt, synthetic construct
  modified_base 20..21: mod_base = OTHER; note = thymine
  misc_feature 1..21: note = Description of Artificial Sequence: Synthetic oligonucleotide
  misc_feature 1..21: note = Description of Combined DNA/RNA Molecule: Synthetic oligonucleotide
  misc_feature 20..21: note = Deoxythymidine dinucleotide
  source 1..21: mol_type = other RNA
ctgactgaaggcctgcatctt

SEQ ID NO: 1119 - RNA, 21 nt, synthetic construct
  modified_base 20..21: mod_base = OTHER; note = thymine
  misc_feature 1..21: note = Description of Artificial Sequence: Synthetic oligonucleotide
  misc_feature 1..21: note = Description of Combined DNA/RNA Molecule: Synthetic oligonucleotide
  misc_feature 20..21: note = Deoxythymidine dinucleotide
  source 1..21: mol_type = other RNA
tgactgaaggcctgcatgctt

SEQ ID NO: 1120 - RNA, 21 nt, synthetic construct
  modified_base 20..21: mod_base = OTHER; note = thymine
  misc_feature 1..21: note = Description of Artificial Sequence: Synthetic oligonucleotide
  misc_feature 1..21: note = Description of Combined DNA/RNA Molecule: Synthetic oligonucleotide
  misc_feature 20..21: note = Deoxythymidine dinucleotide
  source 1..21: mol_type = other RNA
tgaaggcctgcatggattctt

SEQ ID NO: 1121 - RNA, 21 nt, synthetic construct
  modified_base 20..21: mod_base = OTHER; note = thymine
  misc_feature 1..21: note = Description of Artificial Sequence: Synthetic oligonucleotide
  misc_feature 1..21: note = Description of Combined DNA/RNA Molecule: Synthetic oligonucleotide
  misc_feature 20..21: note = Deoxythymidine dinucleotide
  source 1..21: mol_type = other RNA
gaaggcctgcatggattcctt

SEQ ID NO: 1122 - RNA, 21 nt, synthetic construct
  modified_base 20..21: mod_base = OTHER; note = thymine
  misc_feature 1..21: note = Description of Artificial Sequence: Synthetic oligonucleotide
  misc_feature 1..21: note = Description of Combined DNA/RNA Molecule: Synthetic oligonucleotide
  misc_feature 20..21: note = Deoxythymidine dinucleotide
  source 1..21: mol_type = other RNA
tgcatggattccatgttcctt

SEQ ID NO: 1123 - RNA, 21 nt, synthetic construct
  modified_base 20..21: mod_base = OTHER; note = thymine
  misc_feature 1..21: note = Description of Artificial Sequence: Synthetic oligonucleotide
  misc_feature 1..21: note = Description of Combined DNA/RNA Molecule: Synthetic oligonucleotide
  misc_feature 20..21: note = Deoxythymidine dinucleotide
  source 1..21: mol_type = other RNA
catggattccatgttcatctt

SEQ ID NO: 1124 - RNA, 21 nt, synthetic construct
  modified_base 20..21: mod_base = OTHER; note = thymine
  misc_feature 1..21: note = Description of Artificial Sequence: Synthetic oligonucleotide
  misc_feature 1..21: note = Description of Combined DNA/RNA Molecule: Synthetic oligonucleotide
  misc_feature 20..21: note = Deoxythymidine dinucleotide
  source 1..21: mol_type = other RNA
ggattccatgttcatgagctt

SEQ ID NO: 1125 - RNA, 21 nt, synthetic construct
  modified_base 20..21: mod_base = OTHER; note = thymine
  misc_feature 1..21: note = Description of Artificial Sequence: Synthetic oligonucleotide
  misc_feature 1..21: note = Description of Combined DNA/RNA Molecule: Synthetic oligonucleotide
  misc_feature 20..21: note = Deoxythymidine dinucleotide
  source 1..21: mol_type = other RNA
ttccatgttcatgagtttctt

SEQ ID NO: 1126 - RNA, 21 nt, synthetic construct
  modified_base 20..21: mod_base = OTHER; note = thymine
  misc_feature 1..21: note = Description of Artificial Sequence: Synthetic oligonucleotide
  misc_feature 1..21: note = Description of Combined DNA/RNA Molecule: Synthetic oligonucleotide
  misc_feature 20..21: note = Deoxythymidine dinucleotide
  source 1..21: mol_type = other RNA
gttcatgagtttggagatctt

SEQ ID NO: 1127 - RNA, 21 nt, synthetic construct
  modified_base 20..21: mod_base = OTHER; note = thymine
  misc_feature 1..21: note = Description of Artificial Sequence: Synthetic oligonucleotide
  misc_feature 1..21: note = Description of Combined DNA/RNA Molecule: Synthetic oligonucleotide
  misc_feature 20..21: note = Deoxythymidine dinucleotide
  source 1..21: mol_type = other RNA
ttcatgagtttggagatactt

SEQ ID NO: 1128 - RNA, 21 nt, synthetic construct
  modified_base 20..21: mod_base = OTHER; note = thymine
  misc_feature 1..21: note = Description of Artificial Sequence: Synthetic oligonucleotide
  misc_feature 1..21: note = Description of Combined DNA/RNA Molecule: Synthetic oligonucleotide
  misc_feature 20..21: note = Deoxythymidine dinucleotide
  source 1..21: mol_type = other RNA
tgagtttggagataatacctt

SEQ ID NO: 1129 - RNA, 21 nt, synthetic construct
  modified_base 20..21: mod_base = OTHER; note = thymine
  misc_feature 1..21: note = Description of Artificial Sequence: Synthetic oligonucleotide
  misc_feature 1..21: note = Description of Combined DNA/RNA Molecule: Synthetic oligonucleotide
  misc_feature 20..21: note = Deoxythymidine dinucleotide
  source 1..21: mol_type = other RNA
gagtttggagataatacactt

SEQ ID NO: 1130 - RNA, 21 nt, synthetic construct
  modified_base 20..21: mod_base = OTHER; note = thymine
  misc_feature 1..21: note = Description of Artificial Sequence: Synthetic oligonucleotide
  misc_feature 1..21: note = Description of Combined DNA/RNA Molecule: Synthetic oligonucleotide
  misc_feature 20..21: note = Deoxythymidine dinucleotide
  source 1..21: mol_type = other RNA
aggctgtaccagtgcaggctt

SEQ ID NO: 1131 - RNA, 21 nt, synthetic construct
  modified_base 20..21: mod_base = OTHER; note = thymine
  misc_feature 1..21: note = Description of Artificial Sequence: Synthetic oligonucleotide
  misc_feature 1..21: note = Description of Combined DNA/RNA Molecule: Synthetic oligonucleotide
  misc_feature 20..21: note = Deoxythymidine dinucleotide
  source 1..21: mol_type = other RNA
ggctgtaccagtgcaggtctt

SEQ ID NO: 1132 - RNA, 21 nt, synthetic construct
  modified_base 20..21: mod_base = OTHER; note = thymine
  misc_feature 1..21: note = Description of Artificial Sequence: Synthetic oligonucleotide
  misc_feature 1..21: note = Description of Combined DNA/RNA Molecule: Synthetic oligonucleotide
  misc_feature 20..21: note = Deoxythymidine dinucleotide
  source 1..21: mol_type = other RNA
gcaggtcctcactttaatctt

SEQ ID NO: 1133 - RNA, 21 nt, synthetic construct
  modified_base 20..21: mod_base = OTHER; note = thymine
  misc_feature 1..21: note = Description of Artificial Sequence: Synthetic oligonucleotide
  misc_feature 1..21: note = Description of Combined DNA/RNA Molecule: Synthetic oligonucleotide
  misc_feature 20..21: note = Deoxythymidine dinucleotide
  source 1..21: mol_type = other RNA
caggtcctcactttaatcctt

SEQ ID NO: 1134 - RNA, 21 nt, synthetic construct
  modified_base 20..21: mod_base = OTHER; note = thymine
  misc_feature 1..21: note = Description of Artificial Sequence: Synthetic oligonucleotide
  misc_feature 1..21: note = Description of Combined DNA/RNA Molecule: Synthetic oligonucleotide
  misc_feature 20..21: note = Deoxythymidine dinucleotide
  source 1..21: mol_type = other RNA
tcactttaatcctctatcctt

SEQ ID NO: 1135 - RNA, 21 nt, synthetic construct
  modified_base 20..21: mod_base = OTHER; note = thymine
  misc_feature 1..21: note = Description of Artificial Sequence: Synthetic oligonucleotide
  misc_feature 1..21: note = Description of Combined DNA/RNA Molecule: Synthetic oligonucleotide
  misc_feature 20..21: note = Deoxythymidine dinucleotide
  source 1..21: mol_type = other RNA
ctatccagaaaacacggtctt

SEQ ID NO: 1136 - RNA, 21 nt, synthetic construct
  modified_base 20..21: mod_base = OTHER; note = thymine
  misc_feature 1..21: note = Description of Artificial Sequence: Synthetic oligonucleotide
  misc_feature 1..21: note = Description of Combined DNA/RNA Molecule: Synthetic oligonucleotide
  misc_feature 20..21: note = Deoxythymidine dinucleotide
  source 1..21: mol_type = other RNA
tatccagaaaacacggtgctt

SEQ ID NO: 1137 - RNA, 21 nt, synthetic construct
  modified_base 20..21: mod_base = OTHER; note = thymine
  misc_feature 1..21: note = Description of Artificial Sequence: Synthetic oligonucleotide
  misc_feature 1..21: note = Description of Combined DNA/RNA Molecule: Synthetic oligonucleotide
  misc_feature 20..21: note = Deoxythymidine dinucleotide
  source 1..21: mol_type = other RNA
atccagaaaacacggtggctt

SEQ ID NO: 1138 - RNA, 21 nt, synthetic construct
  modified_base 20..21: mod_base = OTHER; note = thymine
  misc_feature 1..21: note = Description of Artificial Sequence: Synthetic oligonucleotide
  misc_feature 1..21: note = Description of Combined DNA/RNA Molecule: Synthetic oligonucleotide
  misc_feature 20..21: note = Deoxythymidine dinucleotide
  source 1..21: mol_type = other RNA
ccagaaaacacggtgggcctt

SEQ ID NO: 1139 - RNA, 21 nt, synthetic construct
  modified_base 20..21: mod_base = OTHER; note = thymine
  misc_feature 1..21: note = Description of Artificial Sequence: Synthetic oligonucleotide
  misc_feature 1..21: note = Description of Combined DNA/RNA Molecule: Synthetic oligonucleotide
  misc_feature 20..21: note = Deoxythymidine dinucleotide
  source 1..21: mol_type = other RNA
gaaaacacggtgggccaactt

SEQ ID NO: 1140 - RNA, 21 nt, synthetic construct
  modified_base 20..21: mod_base = OTHER; note = thymine
  misc_feature 1..21: note = Description of Artificial Sequence: Synthetic oligonucleotide
  misc_feature 1..21: note = Description of Combined DNA/RNA Molecule: Synthetic oligonucleotide
  misc_feature 20..21: note = Deoxythymidine dinucleotide
  source 1..21: mol_type = other RNA
aaaacacggtgggccaaactt

SEQ ID NO: 1141 - RNA, 21 nt, synthetic construct
  modified_base 20..21: mod_base = OTHER; note = thymine
  misc_feature 1..21: note = Description of Artificial Sequence: Synthetic oligonucleotide
  misc_feature 1..21: note = Description of Combined DNA/RNA Molecule: Synthetic oligonucleotide
  misc_feature 20..21: note = Deoxythymidine dinucleotide
  source 1..21: mol_type = other RNA
cggtgggccaaaggatgactt

SEQ ID NO: 1142 - RNA, 21 nt, synthetic construct
  modified_base 20..21: mod_base = OTHER; note = thymine
  misc_feature 1..21: note = Description of Artificial Sequence: Synthetic oligonucleotide
  misc_feature 1..21: note = Description of Combined DNA/RNA Molecule: Synthetic oligonucleotide
  misc_feature 20..21: note = Deoxythymidine dinucleotide
  source 1..21: mol_type = other RNA
aggatgaagagaggcatgctt

SEQ ID NO: 1143 - RNA, 21 nt, synthetic construct
  modified_base 20..21: mod_base = OTHER; note = thymine
  misc_feature 1..21: note = Description of Artificial Sequence: Synthetic oligonucleotide
  misc_feature 1..21: note = Description of Combined DNA/RNA Molecule: Synthetic oligonucleotide
  misc_feature 20..21: note = Deoxythymidine dinucleotide
  source 1..21: mol_type = other RNA
atgaagagaggcatgttgctt

SEQ ID NO: 1144 - RNA, 21 nt, synthetic construct
  modified_base 20..21: mod_base = OTHER; note = thymine
  misc_feature 1..21: note = Description of Artificial Sequence: Synthetic oligonucleotide
  misc_feature 1..21: note = Description of Combined DNA/RNA Molecule: Synthetic oligonucleotide
  misc_feature 20..21: note = Deoxythymidine dinucleotide
  source 1..21: mol_type = other RNA
gagaggcatgttggagacctt

SEQ ID NO: 1145 - RNA, 21 nt, synthetic construct
  modified_base 20..21: mod_base = OTHER; note = thymine
  misc_feature 1..21: note = Description of Artificial Sequence: Synthetic oligonucleotide
  misc_feature 1..21: note = Description of Combined DNA/RNA Molecule: Synthetic oligonucleotide
  misc_feature 20..21: note = Deoxythymidine dinucleotide
  source 1..21: mol_type = other RNA
agaggcatgttggagactctt

SEQ ID NO: 1146 - RNA, 21 nt, synthetic construct
  modified_base 20..21: mod_base = OTHER; note = thymine
  misc_feature 1..21: note = Description of Artificial Sequence: Synthetic oligonucleotide
  misc_feature 1..21: note = Description of Combined DNA/RNA Molecule: Synthetic oligonucleotide
  misc_feature 20..21: note = Deoxythymidine dinucleotide
  source 1..21: mol_type = other RNA
atgttggagacttgggcactt

SEQ ID NO: 1147 - RNA, 21 nt, synthetic construct
  modified_base 20..21: mod_base = OTHER; note = thymine
  misc_feature 1..21: note = Description of Artificial Sequence: Synthetic oligonucleotide
  misc_feature 1..21: note = Description of Combined DNA/RNA Molecule: Synthetic oligonucleotide
  misc_feature 20..21: note = Deoxythymidine dinucleotide
  source 1..21: mol_type = other RNA
gttggagacttgggcaatctt

SEQ ID NO: 1148 - RNA, 21 nt, synthetic construct
  modified_base 20..21: mod_base = OTHER; note = thymine
  misc_feature 1..21: note = Description of Artificial Sequence: Synthetic oligonucleotide
  misc_feature 1..21: note = Description of Combined DNA/RNA Molecule: Synthetic oligonucleotide
  misc_feature 20..21: note = Deoxythymidine dinucleotide
  source 1..21: mol_type = other RNA
ggagacttgggcaatgtgctt

SEQ ID NO: 1149 - RNA, 21 nt, synthetic construct
  modified_base 20..21: mod_base = OTHER; note = thymine
  misc_feature 1..21: note = Description of Artificial Sequence: Synthetic oligonucleotide
  misc_feature 1..21: note = Description of Combined DNA/RNA Molecule: Synthetic oligonucleotide
  misc_feature 20..21: note = Deoxythymidine dinucleotide
  source 1..21: mol_type = other RNA
ggcaatgtgactgctgacctt

SEQ ID NO: 1150 - RNA, 21 nt, synthetic construct
  modified_base 20..21: mod_base = OTHER; note = thymine
  misc_feature 1..21: note = Description of Artificial Sequence: Synthetic oligonucleotide
  misc_feature 1..21: note = Description of Combined DNA/RNA Molecule: Synthetic oligonucleotide
  misc_feature 20..21: note = Deoxythymidine dinucleotide
  source 1..21: mol_type = other RNA
caatgtgactgctgacaactt

SEQ ID NO: 1151 - RNA, 21 nt, synthetic construct
  modified_base 20..21: mod_base = OTHER; note = thymine
  misc_feature 1..21: note = Description of Artificial Sequence: Synthetic oligonucleotide
  misc_feature 1..21: note = Description of Combined DNA/RNA Molecule: Synthetic oligonucleotide
  misc_feature 20..21: note = Deoxythymidine dinucleotide
  source 1..21: mol_type = other RNA
ctgacaaagatggtgtggctt

SEQ ID NO: 1152 - RNA, 21 nt, synthetic construct
  modified_base 20..21: mod_base = OTHER; note = thymine
  misc_feature 1..21: note = Description of Artificial Sequence: Synthetic oligonucleotide
  misc_feature 1..21: note = Description of Combined DNA/RNA Molecule: Synthetic oligonucleotide
  misc_feature 20..21: note = Deoxythymidine dinucleotide
  source 1..21: mol_type = other RNA
tgacaaagatggtgtggcctt

SEQ ID NO: 1153 - RNA, 21 nt, synthetic construct
  modified_base 20..21: mod_base = OTHER; note = thymine
  misc_feature 1..21: note = Description of Artificial Sequence: Synthetic oligonucleotide
  misc_feature 1..21: note = Description of Combined DNA/RNA Molecule: Synthetic oligonucleotide
  misc_feature 20..21: note = Deoxythymidine dinucleotide
  source 1..21: mol_type = other RNA
ctcaggagaccattgcatctt

SEQ ID NO: 1154 - RNA, 21 nt, synthetic construct
  modified_base 20..21: mod_base = OTHER; note = thymine
  misc_feature 1..21: note = Description of Artificial Sequence: Synthetic oligonucleotide
  misc_feature 1..21: note = Description of Combined DNA/RNA Molecule: Synthetic oligonucleotide
  misc_feature 20..21: note = Deoxythymidine dinucleotide
  source 1..21: mol_type = other RNA
tcaggagaccattgcatcctt

SEQ ID NO: 1155 - RNA, 21 nt, synthetic construct
  modified_base 20..21: mod_base = OTHER; note = thymine
  misc_feature 1..21: note = Description of Artificial Sequence: Synthetic oligonucleotide
  misc_feature 1..21: note = Description of Combined DNA/RNA Molecule: Synthetic oligonucleotide
  misc_feature 20..21: note = Deoxythymidine dinucleotide
  source 1..21: mol_type = other RNA
agaccattgcatcattggctt

SEQ ID NO: 1156 - RNA, 21 nt, synthetic construct
  modified_base 20..21: mod_base = OTHER; note = thymine
  misc_feature 1..21: note = Description of Artificial Sequence: Synthetic oligonucleotide
  misc_feature 1..21: note = Description of Combined DNA/RNA Molecule: Synthetic oligonucleotide
  misc_feature 20..21: note = Deoxythymidine dinucleotide
  source 1..21: mol_type = other RNA
gaccattgcatcattggcctt

SEQ ID NO: 1157 - RNA, 21 nt, synthetic construct
  modified_base 20..21: mod_base = OTHER; note = thymine
  misc_feature 1..21: note = Description of Artificial Sequence: Synthetic oligonucleotide
  misc_feature 1..21: note = Description of Combined DNA/RNA Molecule: Synthetic oligonucleotide
  misc_feature 20..21: note = Deoxythymidine dinucleotide
  source 1..21: mol_type = other RNA
attgcatcattggccgcactt

SEQ ID NO: 1158 - RNA, 21 nt, synthetic construct
  modified_base 20..21: mod_base = OTHER; note = thymine
  misc_feature 1..21: note = Description of Artificial Sequence: Synthetic oligonucleotide
  misc_feature 1..21: note = Description of Combined DNA/RNA Molecule: Synthetic oligonucleotide
  misc_feature 20..21: note = Deoxythymidine dinucleotide
  source 1..21: mol_type = other RNA
cattggccgcacactggtctt

SEQ ID NO: 1159 - RNA, 21 nt, synthetic construct
  modified_base 20..21: mod_base = OTHER; note = thymine
  misc_feature 1..21: note = Description of Artificial Sequence: Synthetic oligonucleotide
  misc_feature 1..21: note = Description of Combined DNA/RNA Molecule: Synthetic oligonucleotide
  misc_feature 20..21: note = Deoxythymidine dinucleotide
  source 1..21: mol_type = other RNA
cgcacactggtggtccatctt

SEQ ID NO: 1160 - RNA, 21 nt, synthetic construct
  modified_base 20..21: mod_base = OTHER; note = thymine
  misc_feature 1..21: note = Description of Artificial Sequence: Synthetic oligonucleotide
  misc_feature 1..21: note = Description of Combined DNA/RNA Molecule: Synthetic oligonucleotide
  misc_feature 20..21: note = Deoxythymidine dinucleotide
  source 1..21: mol_type = other RNA
cacactggtggtccatgactt

SEQ ID NO: 1161 - RNA, 21 nt, synthetic construct
  modified_base 20..21: mod_base = OTHER; note = thymine
  misc_feature 1..21: note = Description of Artificial Sequence: Synthetic oligonucleotide
  misc_feature 1..21: note = Description of Combined DNA/RNA Molecule: Synthetic oligonucleotide
  misc_feature 20..21: note = Deoxythymidine dinucleotide
  source 1..21: mol_type = other RNA
acactggtggtccatgaactt

SEQ ID NO: 1162 - RNA, 21 nt, synthetic construct
  modified_base 20..21: mod_base = OTHER; note = thymine
  misc_feature 1..21: note = Description of Artificial Sequence: Synthetic oligonucleotide
  misc_feature 1..21: note = Description of Combined DNA/RNA Molecule: Synthetic oligonucleotide
  misc_feature 20..21: note = Deoxythymidine dinucleotide
  source 1..21: mol_type = other RNA
tggtggtccatgaaaaagctt

SEQ ID NO: 1163 - RNA, 21 nt, synthetic construct
  modified_base 20..21: mod_base = OTHER; note = thymine
  misc_feature 1..21: note = Description of Artificial Sequence: Synthetic oligonucleotide
  misc_feature 1..21: note = Description of Combined DNA/RNA Molecule: Synthetic oligonucleotide
  misc_feature 20..21: note = Deoxythymidine dinucleotide
  source 1..21: mol_type = other RNA
tggtccatgaaaaagcagctt

SEQ ID NO: 1164 - RNA, 21 nt, synthetic construct
  modified_base 20..21: mod_base = OTHER; note = thymine
  misc_feature 1..21: note = Description of Artificial Sequence: Synthetic oligonucleotide
  misc_feature 1..21: note = Description of Combined DNA/RNA Molecule: Synthetic oligonucleotide
  misc_feature 20..21: note = Deoxythymidine dinucleotide
  source 1..21: mol_type = other RNA
aaagcagatgacttgggcctt

SEQ ID NO: 1165 - RNA, 21 nt, synthetic construct
  modified_base 20..21: mod_base = OTHER; note = thymine
  misc_feature 1..21: note = Description of Artificial Sequence: Synthetic oligonucleotide
  misc_feature 1..21: note = Description of Combined DNA/RNA Molecule: Synthetic oligonucleotide
  misc_feature 20..21: note = Deoxythymidine dinucleotide
  source 1..21: mol_type = other RNA
gcagatgacttgggcaaactt

SEQ ID NO: 1166 - RNA, 21 nt, synthetic construct
  modified_base 20..21: mod_base = OTHER; note = thymine
  misc_feature 1..21: note = Description of Artificial Sequence: Synthetic oligonucleotide
  misc_feature 1..21: note = Description of Combined DNA/RNA Molecule: Synthetic oligonucleotide
  misc_feature 20..21: note = Deoxythymidine dinucleotide
  source 1..21: mol_type = other RNA
atgacttgggcaaaggtgctt

SEQ ID NO: 1167 - RNA, 21 nt, synthetic construct
  modified_base 20..21: mod_base = OTHER; note = thymine
  misc_feature 1..21: note = Description of Artificial Sequence: Synthetic oligonucleotide
  misc_feature 1..21: note = Description of Combined DNA/RNA Molecule: Synthetic oligonucleotide
  misc_feature 20..21: note = Deoxythymidine dinucleotide
  source 1..21: mol_type = other RNA
tgacttgggcaaaggtggctt

SEQ ID NO: 1168 - RNA, 21 nt, synthetic construct
  modified_base 20..21: mod_base = OTHER; note = thymine
  misc_feature 1..21: note = Description of Artificial Sequence: Synthetic oligonucleotide
  misc_feature 1..21: note = Description of Combined DNA/RNA Molecule: Synthetic oligonucleotide
  misc_feature 20..21: note = Deoxythymidine dinucleotide
  source 1..21: mol_type = other RNA
gacttgggcaaaggtggactt

SEQ ID NO: 1169 - RNA, 21 nt, synthetic construct
  modified_base 20..21: mod_base = OTHER; note = thymine
  misc_feature 1..21: note = Description of Artificial Sequence: Synthetic oligonucleotide
  misc_feature 1..21: note = Description of Combined DNA/RNA Molecule: Synthetic oligonucleotide
  misc_feature 20..21: note = Deoxythymidine dinucleotide
  source 1..21: mol_type = other RNA
gtacaaagacaggaaacgctt

SEQ ID NO: 1170 - RNA, 21 nt, synthetic construct
  modified_base 20..21: mod_base = OTHER; note = thymine
  misc_feature 1..21: note = Description of Artificial Sequence: Synthetic oligonucleotide
  misc_feature 1..21: note = Description of Combined DNA/RNA Molecule: Synthetic oligonucleotide
  misc_feature 20..21: note = Deoxythymidine dinucleotide
  source 1..21: mol_type = other RNA
acaaagacaggaaacgctctt

SEQ ID NO: 1171 - RNA, 21 nt, synthetic construct
  modified_base 20..21: mod_base = OTHER; note = thymine
  misc_feature 1..21: note = Description of Artificial Sequence: Synthetic oligonucleotide
  misc_feature 1..21: note = Description of Combined DNA/RNA Molecule: Synthetic oligonucleotide
  misc_feature 20..21: note = Deoxythymidine dinucleotide
  source 1..21: mol_type = other RNA
caaagacaggaaacgctgctt

SEQ ID NO: 1172 - RNA, 21 nt, synthetic construct
  modified_base 20..21: mod_base = OTHER; note = thymine
  misc_feature 1..21: note = Description of Artificial Sequence: Synthetic oligonucleotide
  misc_feature 1..21: note = Description of Combined DNA/RNA Molecule: Synthetic oligonucleotide
  misc_feature 20..21: note = Deoxythymidine dinucleotide
  source 1..21: mol_type = other RNA
aggaaacgctggaagtcgctt

SEQ ID NO: 1173 - RNA, 21 nt, synthetic construct
  modified_base 20..21: mod_base = OTHER; note = thymine
  misc_feature 1..21: note = Description of Artificial Sequence: Synthetic oligonucleotide
  misc_feature 1..21: note = Description of Combined DNA/RNA Molecule: Synthetic oligonucleotide
  misc_feature 20..21: note = Deoxythymidine dinucleotide
  source 1..21: mol_type = other RNA
gtcgtttggcttgtggtgctt

SEQ ID NO: 1174 - RNA, 21 nt, synthetic construct
  modified_base 20..21: mod_base = OTHER; note = thymine
  misc_feature 1..21: note = Description of Artificial Sequence: Synthetic oligonucleotide
  misc_feature 1..21: note = Description of Combined DNA/RNA Molecule: Synthetic oligonucleotide
  misc_feature 20..21: note = Deoxythymidine dinucleotide
  source 1..21: mol_type = other RNA
tcgtttggcttgtggtgtctt

SEQ ID NO: 1175 - RNA, 21 nt, synthetic construct
  modified_base 20..21: mod_base = OTHER; note = thymine
  misc_feature 1..21: note = Description of Artificial Sequence: Synthetic oligonucleotide
  misc_feature 1..21: note = Description of Combined DNA/RNA Molecule: Synthetic oligonucleotide
  misc_feature 20..21: note = Deoxythymidine dinucleotide
  source 1..21: mol_type = other RNA
cgtttggcttgtggtgtactt

SEQ ID NO: 1176 - RNA, 21 nt, synthetic construct
  modified_base 20..21: mod_base = OTHER; note = thymine
  misc_feature 1..21: note = Description of Artificial Sequence: Synthetic oligonucleotide
  misc_feature 1..21: note = Description of Combined DNA/RNA Molecule: Synthetic oligonucleotide
  misc_feature 20..21: note = Deoxythymidine dinucleotide
  source 1..21: mol_type = other RNA
gtttggcttgtggtgtaactt

SEQ ID NO: 1177 - RNA, 21 nt, synthetic construct
  modified_base 20..21: mod_base = OTHER; note = thymine
  misc_feature 1..21: note = Description of Artificial Sequence: Synthetic oligonucleotide
  misc_feature 1..21: note = Description of Combined DNA/RNA Molecule: Synthetic oligonucleotide
  misc_feature 20..21: note = Deoxythymidine dinucleotide
  source 1..21: mol_type = other RNA
ttggcttgtggtgtaattctt

SEQ ID NO: 1178 - RNA, 21 nt, synthetic construct
  modified_base 20..21: mod_base = OTHER; note = thymine
  misc_feature 1..21: note = Description of Artificial Sequence: Synthetic oligonucleotide
  misc_feature 1..21: note = Description of Combined DNA/RNA Molecule: Synthetic oligonucleotide
  misc_feature 20..21: note = Deoxythymidine dinucleotide
  source 1..21: mol_type = other RNA
ggcttgtggtgtaattggctt

SEQ ID NO: 1179 - RNA, 21 nt, synthetic construct
  modified_base 20..21: mod_base = OTHER; note = thymine
  misc_feature 1..21: note = Description of Artificial Sequence: Synthetic oligonucleotide
  misc_feature 1..21: note = Description of Combined DNA/RNA Molecule: Synthetic oligonucleotide
  misc_feature 20..21: note = Deoxythymidine dinucleotide
  source 1..21: mol_type = other RNA
gcttgtggtgtaattgggctt

SEQ ID NO: 1180 - RNA, 21 nt, synthetic construct
  modified_base 20..21: mod_base = OTHER; note = thymine
  misc_feature 1..21: note = Description of Artificial Sequence: Synthetic oligonucleotide
  misc_feature 1..21: note = Description of Combined DNA/RNA Molecule: Synthetic oligonucleotide
  misc_feature 20..21: note = Deoxythymidine dinucleotide
  source 1..21: mol_type = other RNA
cttgtggtgtaattgggactt

SEQ ID NO: 1181 - RNA, 21 nt, synthetic construct
  modified_base 20..21: mod_base = OTHER; note = thymine
  misc_feature 1..21: note = Description of Artificial Sequence: Synthetic oligonucleotide
  misc_feature 1..21: note = Description of Combined DNA/RNA Molecule: Synthetic oligonucleotide
  misc_feature 20..21: note = Deoxythymidine dinucleotide
  source 1..21: mol_type = other RNA
tgtggtgtaattgggatcctt

SEQ ID NO: 1182 - RNA, 21 nt, synthetic construct
  modified_base 20..21: mod_base = OTHER; note = thymine
  misc_feature 1..21: note = Description of Artificial Sequence: Synthetic oligonucleotide
  misc_feature 1..21: note = Description of Combined DNA/RNA Molecule: Synthetic oligonucleotide
  misc_feature 20..21: note = Deoxythymidine dinucleotide
  source 1..21: mol_type = other RNA
gtggtgtaattgggatcgctt

SEQ ID NO: 1183 - RNA, 21 nt, synthetic construct
  modified_base 20..21: mod_base = OTHER; note = thymine
  misc_feature 1..21: note = Description of Artificial Sequence: Synthetic oligonucleotide
  misc_feature 1..21: note = Description of Combined DNA/RNA Molecule: Synthetic oligonucleotide
  misc_feature 20..21: note = Deoxythymidine dinucleotide
  source 1..21: mol_type = other RNA
tggtgtaattgggatcgcctt

SEQ ID NO: 1184 - RNA, 21 nt, synthetic construct
  modified_base 20..21: mod_base = OTHER; note = thymine
  misc_feature 1..21: note = Description of Artificial Sequence: Synthetic oligonucleotide
  misc_feature 1..21: note = Description of Combined DNA/RNA Molecule: Synthetic oligonucleotide
  misc_feature 20..21: note = Deoxythymidine dinucleotide
  source 1..21: mol_type = other RNA
gtaattgggatcgcccaactt

SEQ ID NO: 1185 - RNA, 21 nt, synthetic construct
  modified_base 20..21: mod_base = OTHER; note = thymine
  misc_feature 1..21: note = Description of Artificial Sequence: Synthetic oligonucleotide
  misc_feature 1..21: note = Description of Combined DNA/RNA Molecule: Synthetic oligonucleotide
  misc_feature 20..21: note = Deoxythymidine dinucleotide
  source 1..21: mol_type = other RNA
taattgggatcgcccaatctt

SEQ ID NO: 1186 - RNA, 21 nt, synthetic construct
  modified_base 20..21: mod_base = OTHER; note = thymine
  misc_feature 1..21: note = Description of Artificial Sequence: Synthetic oligonucleotide
  misc_feature 1..21: note = Description of Combined DNA/RNA Molecule: Synthetic oligonucleotide
  misc_feature 20..21: note = Deoxythymidine dinucleotide
  source 1..21: mol_type = other RNA
aattgggatcgcccaatactt

SEQ ID NO: 1187 - RNA, 21 nt, synthetic construct
  modified_base 20..21: mod_base = OTHER; note = thymine
  misc_feature 1..21: note = Description of Artificial Sequence: Synthetic oligonucleotide
  misc_feature 1..21: note = Description of Combined DNA/RNA Molecule: Synthetic oligonucleotide
  misc_feature 20..21: note = Deoxythymidine dinucleotide
  source 1..21: mol_type = other RNA
attgggatcgcccaataactt

SEQ ID NO: 1188 - RNA, 21 nt, synthetic construct
  modified_base 20..21: mod_base = OTHER; note = thymine
  misc_feature 1..21: note = Description of Artificial Sequence: Synthetic oligonucleotide
  misc_feature 1..21: note = Description of Combined DNA/RNA Molecule: Synthetic oligonucleotide
  misc_feature 20..21: note = Deoxythymidine dinucleotide
  source 1..21: mol_type = other RNA
ttgggatcgcccaataaactt

SEQ ID NO: 1189 - RNA, 21 nt, synthetic construct
  modified_base 20..21: mod_base = OTHER; note = thymine
  misc_feature 1..21: note = Description of Artificial Sequence: Synthetic oligonucleotide
  misc_feature 1..21: note = Description of Combined DNA/RNA Molecule: Synthetic oligonucleotide
  misc_feature 20..21: note = Deoxythymidine dinucleotide
  source 1..21: mol_type = other RNA
tgggatcgcccaataaacctt

SEQ ID NO: 1190 - RNA, 21 nt, synthetic construct
  modified_base 20..21: mod_base = OTHER; note = thymine
  misc_feature 1..21: note = Description of Artificial Sequence: Synthetic oligonucleotide
  misc_feature 1..21: note = Description of Combined DNA/RNA Molecule: Synthetic oligonucleotide
  misc_feature 20..21: note = Deoxythymidine dinucleotide
  source 1..21: mol_type = other RNA
gggatcgcccaataaacactt

SEQ ID NO: 1191 - RNA, 21 nt, synthetic construct
  modified_base 20..21: mod_base = OTHER; note = thymine
  misc_feature 1..21: note = Description of Artificial Sequence: Synthetic oligonucleotide
  misc_feature 1..21: note = Description of Combined DNA/RNA Molecule: Synthetic oligonucleotide
  misc_feature 20..21: note = Deoxythymidine dinucleotide
  source 1..21: mol_type = other RNA
atcgcccaataaacattcctt

SEQ ID NO: 1192 - RNA, 21 nt, synthetic construct
  modified_base 20..21: mod_base = OTHER; note = thymine
  misc_feature 1..21: note = Description of Artificial Sequence: Synthetic oligonucleotide
  misc_feature 1..21: note = Description of Combined DNA/RNA Molecule: Synthetic oligonucleotide
  misc_feature 20..21: note = Deoxythymidine dinucleotide
  source 1..21: mol_type = other RNA
ccaataaacattcccttgctt

SEQ ID NO: 1193 - RNA, 21 nt, synthetic construct
  modified_base 20..21: mod_base = OTHER; note = thymine
  misc_feature 1..21: note = Description of Artificial Sequence: Synthetic oligonucleotide
  misc_feature 1..21: note = Description of Combined DNA/RNA Molecule: Synthetic oligonucleotide
  misc_feature 20..21: note = Deoxythymidine dinucleotide
  source 1..21: mol_type = other RNA
caataaacattcccttggctt

SEQ ID NO: 1194 - RNA, 21 nt, synthetic construct
  modified_base 20..21: mod_base = OTHER; note = thymine
  misc_feature 1..21: note = Description of Artificial Sequence: Synthetic oligonucleotide
  misc_feature 1..21: note = Description of Combined DNA/RNA Molecule: Synthetic oligonucleotide
  misc_feature 20..21: note = Deoxythymidine dinucleotide
  source 1..21: mol_type = other RNA
aataaacattcccttggactt

SEQ ID NO: 1195 - RNA, 21 nt, synthetic construct
  modified_base 20..21: mod_base = OTHER; note = thymine
  misc_feature 1..21: note = Description of Artificial Sequence: Synthetic oligonucleotide
  misc_feature 1..21: note = Description of Combined DNA/RNA Molecule: Synthetic oligonucleotide
  misc_feature 20..21: note = Deoxythymidine dinucleotide
  source 1..21: mol_type = other RNA
ataaacattcccttggatctt

SEQ ID NO: 1196 - RNA, 21 nt, synthetic construct
  modified_base 20..21: mod_base = OTHER; note = thymine
  misc_feature 1..21: note = Description of Artificial Sequence: Synthetic oligonucleotide
  misc_feature 1..21: note = Description of Combined DNA/RNA Molecule: Synthetic oligonucleotide
  misc_feature 20..21: note = Deoxythymidine dinucleotide
  source 1..21: mol_type = other RNA
taaacattcccttggatgctt

SEQ ID NO: 1197 - RNA, 21 nt, synthetic construct
  modified_base 20..21: mod_base = OTHER; note = thymine
  misc_feature 1..21: note = Description of Artificial Sequence: Synthetic oligonucleotide
  misc_feature 1..21: note = Description of Combined DNA/RNA Molecule: Synthetic oligonucleotide
  misc_feature 20..21: note = Deoxythymidine dinucleotide
  source 1..21: mol_type = other RNA
aaacattcccttggatgtctt

SEQ ID NO: 1198 - RNA, 21 nt, synthetic construct
  modified_base 20..21: mod_base = OTHER; note = thymine
  misc_feature 1..21: note = Description of Artificial Sequence: Synthetic oligonucleotide
  misc_feature 1..21: note = Description of Combined DNA/RNA Molecule: Synthetic oligonucleotide
  misc_feature 20..21: note = Deoxythymidine dinucleotide
  source 1..21: mol_type = other RNA
aacattcccttggatgtactt

SEQ ID NO: 1199 - RNA, 21 nt, synthetic construct
  modified_base 20..21: mod_base = OTHER; note = thymine
  misc_feature 1..21: note = Description of Artificial Sequence: Synthetic oligonucleotide
  misc_feature 1..21: note = Description of Combined DNA/RNA Molecule: Synthetic oligonucleotide
  misc_feature 20..21: note = Deoxythymidine dinucleotide
  source 1..21: mol_type = other RNA
attcccttggatgtagtcctt

SEQ ID NO: 1200 - RNA, 21 nt, synthetic construct
  modified_base 20..21: mod_base = OTHER; note = thymine
  misc_feature 1..21: note = Description of Artificial Sequence: Synthetic oligonucleotide
  misc_feature 1..21: note = Description of Combined DNA/RNA Molecule: Synthetic oligonucleotide
  misc_feature 20..21: note = Deoxythymidine dinucleotide
  source 1..21: mol_type = other RNA
cttggatgtagtctgaggctt

SEQ ID NO: 1201 - RNA, 21 nt, synthetic construct
  modified_base 20..21: mod_base = OTHER; note = thymine
  misc_feature 1..21: note = Description of Artificial Sequence: Synthetic oligonucleotide
  misc_feature 1..21: note = Description of Combined DNA/RNA Molecule: Synthetic oligonucleotide
  misc_feature 20..21: note = Deoxythymidine dinucleotide
  source 1..21: mol_type = other RNA
ctgaggccccttaactcactt

SEQ ID NO: 1202 - RNA, 21 nt, synthetic construct
  modified_base 20..21: mod_base = OTHER; note = thymine
  misc_feature 1..21: note = Description of Artificial Sequence: Synthetic oligonucleotide
  misc_feature 1..21: note = Description of Combined DNA/RNA Molecule: Synthetic oligonucleotide
  misc_feature 20..21: note = Deoxythymidine dinucleotide
  source 1..21: mol_type = other RNA
gaggccccttaactcatcctt

SEQ ID NO: 1203 - RNA, 21 nt, synthetic construct
  modified_base 20..21: mod_base = OTHER; note = thymine
  misc_feature 1..21: note = Description of Artificial Sequence: Synthetic oligonucleotide
  misc_feature 1..21: note = Description of Combined DNA/RNA Molecule: Synthetic oligonucleotide
  misc_feature 20..21: note = Deoxythymidine dinucleotide
  source 1..21: mol_type = other RNA
aggccccttaactcatctctt

SEQ ID NO: 1204 - RNA, 21 nt, synthetic construct
  modified_base 20..21: mod_base = OTHER; note = thymine
  misc_feature 1..21: note = Description of Artificial Sequence: Synthetic oligonucleotide
  misc_feature 1..21: note = Description of Combined DNA/RNA Molecule: Synthetic oligonucleotide
  misc_feature 20..21: note = Deoxythymidine dinucleotide
  source 1..21: mol_type = other RNA
ccccttaactcatctgttctt

SEQ ID NO: 1205 - RNA, 21 nt, synthetic construct
  modified_base 20..21: mod_base = OTHER; note = thymine
  misc_feature 1..21: note = Description of Artificial Sequence: Synthetic oligonucleotide
  misc_feature 1..21: note = Description of Combined DNA/RNA Molecule: Synthetic oligonucleotide
  misc_feature 20..21: note = Deoxythymidine dinucleotide
  source 1..21: mol_type = other RNA
cccttaactcatctgttactt

SEQ ID NO: 1206 - RNA, 21 nt, synthetic construct
  modified_base 20..21: mod_base = OTHER; note = thymine
  misc_feature 1..21: note = Description of Artificial Sequence: Synthetic oligonucleotide
  misc_feature 1..21: note = Description of Combined DNA/RNA Molecule: Synthetic oligonucleotide
  misc_feature 20..21: note = Deoxythymidine dinucleotide
  source 1..21: mol_type = other RNA
ccttaactcatctgttatctt

SEQ ID NO: 1207 - RNA, 21 nt, synthetic construct
  modified_base 20..21: mod_base = OTHER; note = thymine
  misc_feature 1..21: note = Description of Artificial Sequence: Synthetic oligonucleotide
  misc_feature 1..21: note = Description of Combined DNA/RNA Molecule: Synthetic oligonucleotide
  misc_feature 20..21: note = Deoxythymidine dinucleotide
  source 1..21: mol_type = other RNA
cttaactcatctgttatcctt

SEQ ID NO: 1208 - RNA, 21 nt, synthetic construct
  modified_base 20..21: mod_base = OTHER; note = thymine
  misc_feature 1..21: note = Description of Artificial Sequence: Synthetic oligonucleotide
  misc_feature 1..21: note = Description of Combined DNA/RNA Molecule: Synthetic oligonucleotide
  misc_feature 20..21: note = Deoxythymidine dinucleotide
  source 1..21: mol_type = other RNA
ttaactcatctgttatccctt

SEQ ID NO: 1209 - RNA, 21 nt, synthetic construct
  modified_base 20..21: mod_base = OTHER; note = thymine
  misc_feature 1..21: note = Description of Artificial Sequence: Synthetic oligonucleotide
  misc_feature 1..21: note = Description of Combined DNA/RNA Molecule: Synthetic oligonucleotide
  misc_feature 20..21: note = Deoxythymidine dinucleotide
  source 1..21: mol_type = other RNA
taactcatctgttatcctctt

SEQ ID NO: 1210 - RNA, 21 nt, synthetic construct
  modified_base 20..21: mod_base = OTHER; note = thymine
  misc_feature 1..21: note = Description of Artificial Sequence: Synthetic oligonucleotide
  misc_feature 1..21: note = Description of Combined DNA/RNA Molecule: Synthetic oligonucleotide
  misc_feature 20..21: note = Deoxythymidine dinucleotide
  source 1..21: mol_type = other RNA
aactcatctgttatcctgctt

SEQ ID NO: 1211 - RNA, 21 nt, synthetic construct
  modified_base 20..21: mod_base = OTHER; note = thymine
  misc_feature 1..21: note = Description of Artificial Sequence: Synthetic oligonucleotide
  misc_feature 1..21: note = Description of Combined DNA/RNA Molecule: Synthetic oligonucleotide
  misc_feature 20..21: note = Deoxythymidine dinucleotide
  source 1..21: mol_type = other RNA
gttatcctgctagctgtactt

SEQ ID NO: 1212 - RNA, 21 nt, synthetic construct
  modified_base 20..21: mod_base = OTHER; note = thymine
  misc_feature 1..21: note = Description of Artificial Sequence: Synthetic oligonucleotide
  misc_feature 1..21: note = Description of Combined DNA/RNA Molecule: Synthetic oligonucleotide
  misc_feature 20..21: note = Deoxythymidine dinucleotide
  source 1..21: mol_type = other RNA
ctgctagctgtagaaatgctt

SEQ ID NO: 1213 - RNA, 21 nt, synthetic construct
  modified_base 20..21: mod_base = OTHER; note = thymine
  misc_feature 1..21: note = Description of Artificial Sequence: Synthetic oligonucleotide
  misc_feature 1..21: note = Description of Combined DNA/RNA Molecule: Synthetic oligonucleotide
  misc_feature 20..21: note = Deoxythymidine dinucleotide
  source 1..21: mol_type = other RNA
tgctagctgtagaaatgtctt

SEQ ID NO: 1214 - RNA, 21 nt, synthetic construct
  modified_base 20..21: mod_base = OTHER; note = thymine
  misc_feature 1..21: note = Description of Artificial Sequence: Synthetic oligonucleotide
  misc_feature 1..21: note = Description of Combined DNA/RNA Molecule: Synthetic oligonucleotide
  misc_feature 20..21: note = Deoxythymidine dinucleotide
  source 1..21: mol_type = other RNA
gctgtagaaatgtatcctctt

SEQ ID NO: 1215 - RNA, 21 nt, synthetic construct
  modified_base 20..21: mod_base = OTHER; note = thymine
  misc_feature 1..21: note = Description of Artificial Sequence: Synthetic oligonucleotide
  misc_feature 1..21: note = Description of Combined DNA/RNA Molecule: Synthetic oligonucleotide
  misc_feature 20..21: note = Deoxythymidine dinucleotide
  source 1..21: mol_type = other RNA
ctgtagaaatgtatcctgctt

SEQ ID NO: 1216 - RNA, 21 nt, synthetic construct
  modified_base 20..21: mod_base = OTHER; note = thymine
  misc_feature 1..21: note = Description of Artificial Sequence: Synthetic oligonucleotide
  misc_feature 1..21: note = Description of Combined DNA/RNA Molecule: Synthetic oligonucleotide
  misc_feature 20..21: note = Deoxythymidine dinucleotide
  source 1..21: mol_type = other RNA
tgtagaaatgtatcctgactt

SEQ ID NO: 1217 - RNA, 21 nt, synthetic construct
  modified_base 20..21: mod_base = OTHER; note = thymine
  misc_feature 1..21: note = Description of Artificial Sequence: Synthetic oligonucleotide
  misc_feature 1..21: note = Description of Combined DNA/RNA Molecule: Synthetic oligonucleotide
  misc_feature 20..21: note = Deoxythymidine dinucleotide
  source 1..21: mol_type = other RNA
gtagaaatgtatcctgatctt

SEQ ID NO: 1218 - RNA, 21 nt, synthetic construct
  modified_base 20..21: mod_base = OTHER; note = thymine
  misc_feature 1..21: note = Description of Artificial Sequence: Synthetic oligonucleotide
  misc_feature 1..21: note = Description of Combined DNA/RNA Molecule: Synthetic oligonucleotide
  misc_feature 20..21: note = Deoxythymidine dinucleotide
  source 1..21: mol_type = other RNA
aaatgtatcctgataaacctt

SEQ ID NO: 1219 - RNA, 21 nt, synthetic construct
  modified_base 20..21: mod_base = OTHER; note = thymine
  misc_feature 1..21: note = Description of Artificial Sequence: Synthetic oligonucleotide
  misc_feature 1..21: note = Description of Combined DNA/RNA Molecule: Synthetic oligonucleotide
  misc_feature 20..21: note = Deoxythymidine dinucleotide
  source 1..21: mol_type = other RNA
gtatcctgataaacattactt

SEQ ID NO: 1220 - RNA, 21 nt, synthetic construct
  modified_base 20..21: mod_base = OTHER; note = thymine
  misc_feature 1..21: note = Description of Artificial Sequence: Synthetic oligonucleotide
  misc_feature 1..21: note = Description of Combined DNA/RNA Molecule: Synthetic oligonucleotide
  misc_feature 20..21: note = Deoxythymidine dinucleotide
  source 1..21: mol_type = other RNA
ttaaacactgtaatcttactt

SEQ ID NO: 1221 - RNA, 21 nt, synthetic construct
  modified_base 20..21: mod_base = OTHER; note = thymine
  misc_feature 1..21: note = Description of Artificial Sequence: Synthetic oligonucleotide
  misc_feature 1..21: note = Description of Combined DNA/RNA Molecule: Synthetic oligonucleotide
  misc_feature 20..21: note = Deoxythymidine dinucleotide
  source 1..21: mol_type = other RNA
actgtaatcttaaaagtgctt

SEQ ID NO: 1222 - RNA, 21 nt, synthetic construct
  modified_base 20..21: mod_base = OTHER; note = thymine
  misc_feature 1..21: note = Description of Artificial Sequence: Synthetic oligonucleotide
  misc_feature 1..21: note = Description of Combined DNA/RNA Molecule: Synthetic oligonucleotide
  misc_feature 20..21: note = Deoxythymidine dinucleotide
  source 1..21: mol_type = other RNA
ctgtaatcttaaaagtgtctt

SEQ ID NO: 1223 - RNA, 21 nt, synthetic construct
  modified_base 20..21: mod_base = OTHER; note = thymine
  misc_feature 1..21: note = Description of Artificial Sequence: Synthetic oligonucleotide
  misc_feature 1..21: note = Description of Combined DNA/RNA Molecule: Synthetic oligonucleotide
  misc_feature 20..21: note = Deoxythymidine dinucleotide
  source 1..21: mol_type = other RNA
tgtaatcttaaaagtgtactt

SEQ ID NO: 1224 - RNA, 21 nt, synthetic construct
  modified_base 20..21: mod_base = OTHER; note = thymine
  misc_feature 1..21: note = Description of Artificial Sequence: Synthetic oligonucleotide
  misc_feature 1..21: note = Description of Combined DNA/RNA Molecule: Synthetic oligonucleotide
  misc_feature 20..21: note = Deoxythymidine dinucleotide
  source 1..21: mol_type = other RNA
gtaatcttaaaagtgtaactt

SEQ ID NO: 1225 - RNA, 21 nt, synthetic construct
  modified_base 20..21: mod_base = OTHER; note = thymine
  misc_feature 1..21: note = Description of Artificial Sequence: Synthetic oligonucleotide
  misc_feature 1..21: note = Description of Combined DNA/RNA Molecule: Synthetic oligonucleotide
  misc_feature 20..21: note = Deoxythymidine dinucleotide
  source 1..21: mol_type = other RNA
cttaaaagtgtaattgtgctt

SEQ ID NO: 1226 - RNA, 21 nt, synthetic construct
  modified_base 20..21: mod_base = OTHER; note = thymine
  misc_feature 1..21: note = Description of Artificial Sequence: Synthetic oligonucleotide
  misc_feature 1..21: note = Description of Combined DNA/RNA Molecule: Synthetic oligonucleotide
  misc_feature 20..21: note = Deoxythymidine dinucleotide
  source 1..21: mol_type = other RNA
tacctgtagtgagaaactctt

SEQ ID NO: 1227 - RNA, 21 nt, synthetic construct
  modified_base 20..21: mod_base = OTHER; note = thymine
  misc_feature 1..21: note = Description of Artificial Sequence: Synthetic oligonucleotide
  misc_feature 1..21: note = Description of Combined DNA/RNA Molecule: Synthetic oligonucleotide
  misc_feature 20..21: note = Deoxythymidine dinucleotide
  source 1..21: mol_type = other RNA
ttatgatcacttggaagactt

SEQ ID NO: 1228 - RNA, 21 nt, synthetic construct
  modified_base 20..21: mod_base = OTHER; note = thymine
  misc_feature 1..21: note = Description of Artificial Sequence: Synthetic oligonucleotide
  misc_feature 1..21: note = Description of Combined DNA/RNA Molecule: Synthetic oligonucleotide
  misc_feature 20..21: note = Deoxythymidine dinucleotide
  source 1..21: mol_type = other RNA
atgatcacttggaagattctt

SEQ ID NO: 1229 - RNA, 21 nt, synthetic construct
  modified_base 20..21: mod_base = OTHER; note = thymine
  misc_feature 1..21: note = Description of Artificial Sequence: Synthetic oligonucleotide
  misc_feature 1..21: note = Description of Combined DNA/RNA Molecule: Synthetic oligonucleotide
  misc_feature 20..21: note = Deoxythymidine dinucleotide
  source 1..21: mol_type = other RNA
atcacttggaagatttgtctt

SEQ ID NO: 1230 - RNA, 21 nt, synthetic construct
  modified_base 20..21: mod_base = OTHER; note = thymine
  misc_feature 1..21: note = Description of Artificial Sequence: Synthetic oligonucleotide
  misc_feature 1..21: note = Description of Combined DNA/RNA Molecule: Synthetic oligonucleotide
  misc_feature 20..21: note = Deoxythymidine dinucleotide
  source 1..21: mol_type = other RNA
tggaagatttgtatagttctt

SEQ ID NO: 1231 - RNA, 21 nt, synthetic construct
  modified_base 20..21: mod_base = OTHER; note = thymine
  misc_feature 1..21: note = Description of Artificial Sequence: Synthetic oligonucleotide
  misc_feature 1..21: note = Description of Combined DNA/RNA Molecule: Synthetic oligonucleotide
  misc_feature 20..21: note = Deoxythymidine dinucleotide
  source 1..21: mol_type = other RNA
tataaaactcagttaaaactt

SEQ ID NO: 1232 - RNA, 21 nt, synthetic construct
  modified_base 20..21: mod_base = OTHER; note = thymine
  misc_feature 1..21: note = Description of Artificial Sequence: Synthetic oligonucleotide
  misc_feature 1..21: note = Description of Combined DNA/RNA Molecule: Synthetic oligonucleotide
  misc_feature 20..21: note = Deoxythymidine dinucleotide
  source 1..21: mol_type = other RNA
aaactcagttaaaatgtcctt

SEQ ID NO: 1233 - RNA, 21 nt, synthetic construct
  modified_base 20..21: mod_base = OTHER; note = thymine
  misc_feature 1..21: note = Description of Artificial Sequence: Synthetic oligonucleotide
  misc_feature 1..21: note = Description of Combined DNA/RNA Molecule: Synthetic oligonucleotide
  misc_feature 20..21: note = Deoxythymidine dinucleotide
  source 1..21: mol_type = other RNA
gtctgtttcaatgacctgctt

SEQ ID NO: 1234 - RNA, 21 nt, synthetic construct
  modified_base 20..21: mod_base = OTHER; note = thymine
  misc_feature 1..21: note = Description of Artificial Sequence: Synthetic oligonucleotide
  misc_feature 1..21: note = Description of Combined DNA/RNA Molecule: Synthetic oligonucleotide
  misc_feature 20..21: note = Deoxythymidine dinucleotide
  source 1..21: mol_type = other RNA
atgacctgtattttgccactt

SEQ ID NO: 1235 - RNA, 21 nt, synthetic construct
  modified_base 20..21: mod_base = OTHER; note = thymine
  misc_feature 1..21: note = Description of Artificial Sequence: Synthetic oligonucleotide
  misc_feature 1..21: note = Description of Combined DNA/RNA Molecule: Synthetic oligonucleotide
  misc_feature 20..21: note = Deoxythymidine dinucleotide
  source 1..21: mol_type = other RNA
acctgtattttgccagacctt

SEQ ID NO: 1236 - RNA, 21 nt, synthetic construct
  modified_base 20..21: mod_base = OTHER; note = thymine
  misc_feature 1..21: note = Description of Artificial Sequence: Synthetic oligonucleotide
  misc_feature 1..21: note = Description of Combined DNA/RNA Molecule: Synthetic oligonucleotide
  misc_feature 20..21: note = Deoxythymidine dinucleotide
  source 1..21: mol_type = other RNA
cctgtattttgccagactctt

SEQ ID NO: 1237 - RNA, 21 nt, synthetic construct
  modified_base 20..21: mod_base = OTHER; note = thymine
  misc_feature 1..21: note = Description of Artificial Sequence: Synthetic oligonucleotide
  misc_feature 1..21: note = Description of Combined DNA/RNA Molecule: Synthetic oligonucleotide
  misc_feature 20..21: note = Deoxythymidine dinucleotide
  source 1..21: mol_type = other RNA
taaatcacagatgggtatctt

SEQ ID NO: 1238 - RNA, 21 nt, synthetic construct
  modified_base 20..21: mod_base = OTHER; note = thymine
  misc_feature 1..21: note = Description of Artificial Sequence: Synthetic oligonucleotide
  misc_feature 1..21: note = Description of Combined DNA/RNA Molecule: Synthetic oligonucleotide
  misc_feature 20..21: note = Deoxythymidine dinucleotide
  source 1..21: mol_type = other RNA
atcacagatgggtattaactt

SEQ ID NO: 1239 - RNA, 21 nt, synthetic construct
  modified_base 20..21: mod_base = OTHER; note = thymine
  misc_feature 1..21: note = Description of Artificial Sequence: Synthetic oligonucleotide
  misc_feature 1..21: note = Description of Combined DNA/RNA Molecule: Synthetic oligonucleotide
  misc_feature 20..21: note = Deoxythymidine dinucleotide
  source 1..21: mol_type = other RNA
tcacagatgggtattaaactt

SEQ ID NO: 1240 - RNA, 21 nt, synthetic construct
  modified_base 20..21: mod_base = OTHER; note = thymine
  misc_feature 1..21: note = Description of Artificial Sequence: Synthetic oligonucleotide
  misc_feature 1..21: note = Description of Combined DNA/RNA Molecule: Synthetic oligonucleotide
  misc_feature 20..21: note = Deoxythymidine dinucleotide
  source 1..21: mol_type = other RNA
acagatgggtattaaactctt

SEQ ID NO: 1241 - RNA, 21 nt, synthetic construct
  modified_base 20..21: mod_base = OTHER; note = thymine
  misc_feature 1..21: note = Description of Artificial Sequence: Synthetic oligonucleotide
  misc_feature 1..21: note = Description of Combined DNA/RNA Molecule: Synthetic oligonucleotide
  misc_feature 20..21: note = Deoxythymidine dinucleotide
  source 1..21: mol_type = other RNA
cagatgggtattaaacttctt

SEQ ID NO: 1242 - RNA, 21 nt, synthetic construct
  modified_base 20..21: mod_base = OTHER; note = thymine
  misc_feature 1..21: note = Description of Artificial Sequence: Synthetic oligonucleotide
  misc_feature 1..21: note = Description of Combined DNA/RNA Molecule: Synthetic oligonucleotide
  misc_feature 20..21: note = Deoxythymidine dinucleotide
  source 1..21: mol_type = other RNA
agatgggtattaaacttgctt

SEQ ID NO: 1243 - RNA, 21 nt, synthetic construct
  modified_base 20..21: mod_base = OTHER; note = thymine
  misc_feature 1..21: note = Description of Artificial Sequence: Synthetic oligonucleotide
  misc_feature 1..21: note = Description of Combined DNA/RNA Molecule: Synthetic oligonucleotide
  misc_feature 20..21: note = Deoxythymidine dinucleotide
  source 1..21: mol_type = other RNA
atgggtattaaacttgtcctt

SEQ ID NO: 1244 - RNA, 21 nt, synthetic construct
  modified_base 20..21: mod_base = OTHER; note = thymine
  misc_feature 1..21: note = Description of Artificial Sequence: Synthetic oligonucleotide
  misc_feature 1..21: note = Description of Combined DNA/RNA Molecule: Synthetic oligonucleotide
  misc_feature 20..21: note = Deoxythymidine dinucleotide
  source 1..21: mol_type = other RNA
taaacttgtcagaatttcctt

SEQ ID NO: 1245 - RNA, 21 nt, synthetic construct
  modified_base 20..21: mod_base = OTHER; note = thymine
  misc_feature 1..21: note = Description of Artificial Sequence: Synthetic oligonucleotide
  misc_feature 1..21: note = Description of Combined DNA/RNA Molecule: Synthetic oligonucleotide
  misc_feature 20..21: note = Deoxythymidine dinucleotide
  source 1..21: mol_type = other RNA
tcattcaagcctgtgaatctt

SEQ ID NO: 1246 - RNA, 21 nt, synthetic construct
  modified_base 20..21: mod_base = OTHER; note = thymine
  misc_feature 1..21: note = Description of Artificial Sequence: Synthetic oligonucleotide
  misc_feature 1..21: note = Description of Combined DNA/RNA Molecule: Synthetic oligonucleotide
  misc_feature 20..21: note = Deoxythymidine dinucleotide
  source 1..21: mol_type = other RNA
cattcaagcctgtgaatactt

SEQ ID NO: 1247 - RNA, 21 nt, synthetic construct
  modified_base 20..21: mod_base = OTHER; note = thymine
  misc_feature 1..21: note = Description of Artificial Sequence: Synthetic oligonucleotide
  misc_feature 1..21: note = Description of Combined DNA/RNA Molecule: Synthetic oligonucleotide
  misc_feature 20..21: note = Deoxythymidine dinucleotide
  source 1..21: mol_type = other RNA
aataaaaaccctgtatggctt

SEQ ID NO: 1248 - RNA, 21 nt, synthetic construct
  modified_base 20..21: mod_base = OTHER; note = thymine
  misc_feature 1..21: note = Description of Artificial Sequence: Synthetic oligonucleotide
  misc_feature 1..21: note = Description of Combined DNA/RNA Molecule: Synthetic oligonucleotide
  misc_feature 20..21: note = Deoxythymidine dinucleotide
  source 1..21: mol_type = other RNA
ataaaaaccctgtatggcctt

SEQ ID NO: 1249 - RNA, 21 nt, synthetic construct
  modified_base 20..21: mod_base = OTHER; note = thymine
  misc_feature 1..21: note = Description of Artificial Sequence: Synthetic oligonucleotide
  misc_feature 1..21: note = Description of Combined DNA/RNA Molecule: Synthetic oligonucleotide
  misc_feature 20..21: note = Deoxythymidine dinucleotide
  source 1..21: mol_type = other RNA
aaccctgtatggcacttactt

SEQ ID NO: 1250 - RNA, 21 nt, synthetic construct
  modified_base 20..21: mod_base = OTHER; note = thymine
  misc_feature 1..21: note = Description of Artificial Sequence: Synthetic oligonucleotide
  misc_feature 1..21: note = Description of Combined DNA/RNA Molecule: Synthetic oligonucleotide
  misc_feature 20..21: note = Deoxythymidine dinucleotide
  source 1..21: mol_type = other RNA
accctgtatggcacttatctt

SEQ ID NO: 1251 - RNA, 21 nt, synthetic construct
  modified_base 20..21: mod_base = OTHER; note = thymine
  misc_feature 1..21: note = Description of Artificial Sequence: Synthetic oligonucleotide
  misc_feature 1..21: note = Description of Combined DNA/RNA Molecule: Synthetic oligonucleotide
  misc_feature 20..21: note = Deoxythymidine dinucleotide
  source 1..21: mol_type = other RNA
gaggctattaaaagaatcctt

SEQ ID NO: 1252 - RNA, 21 nt, synthetic construct
  modified_base 20..21: mod_base = OTHER; note = thymine
  misc_feature 1..21: note = Description of Artificial Sequence: Synthetic oligonucleotide
  misc_feature 1..21: note = Description of Combined DNA/RNA Molecule: Synthetic oligonucleotide
  misc_feature 20..21: note = Deoxythymidine dinucleotide
  source 1..21: mol_type = other RNA
aaagaatccaaattcaaactt

SEQ ID NO: 1253 - RNA, 21 nt, synthetic construct
  misc_feature 1..21: note = Description of Artificial Sequence: Synthetic oligonucleotide
  misc_feature 1..21: note = Description of Combined DNA/RNA Molecule: Synthetic oligonucleotide
  misc_feature 20..21: note = Deoxythymidine dinucleotide
  source 1..21: mol_type = other RNA
  modified_base 20..21: mod_base = OTHER; note = thymine
gaatccaaattcaaactactt

SEQ ID NO: 1254 - DNA, 981 bp, Homo sapiens
  source 1..981: mol_type = genomic DNA
gtttggggccagagtgggcgaggcgcggaggtctggcctataaagtagtcgcggagacggggtgctggtttgcgtcgtagtctcctgcagcgtctggggtttccgttgcagtcctcggaaccaggacctcggcgtggcctagcgagttatggcgacgaaggccgtgtgcgtgctgaagggcgacggcccagtgcagggcatcatcaatttcgagcagaaggaaagtaatggaccagtgaaggtgtggggaagcattaaaggactgactgaaggcctgcatggattccatgttcatgagtttggagataatacagcaggctgtaccagtgcaggtcctcactttaatcctctatccagaaaacacggtgggccaaaggatgaagagaggcatgttggagacttgggcaatgtgactgctgacaaagatggtgtggccgatgtgtctattgaagattctgtgatctcactctcaggagaccattgcatcattggccgcacactggtggtccatgaaaaagcagatgacttgggcaaaggtggaaatgaagaaagtacaaagacaggaaacgctggaagtcgtttggcttgtggtgtaattgggatcgcccaataaacattcccttggatgtagtctgaggccccttaactcatctgttatcctgctagctgtagaaatgtatcctgataaacattaaacactgtaatcttaaaagtgtaattgtgtgactttttcagagttgctttaaagtacctgtagtgagaaactgatttatgatcacttggaagatttgtatagttttataaaactcagttaaaatgtctgtttcaatgacctgtattttgccagacttaaatcacagatgggtattaaacttgtcagaatttctttgtcattcaagcctgtgaataaaaaccctgtatggcacttattatgaggctattaaaagaatccaaattcaaactaaaaaaaaaaaaaaaaaa

SEQ ID NO: 1255 - DNA, 54 bp, synthetic construct
  misc_feature 1..54: note = Description of Artificial Sequence: Synthetic oligonucleotide
  source 1..54: mol_type = other DNA
gtgctgggcggggggcggcgggccctcccgcagaacaccatgcgctcttcggaa

SEQ ID NO: 1256 - DNA, 100 bp, synthetic construct
  misc_feature 1..100: note = Description of Artificial Sequence: Synthetic oligonucleotide
  source 1..100: mol_type = other DNA
gaagcaaagaaggggcagagggagcccgtgagctgagtgggccagggactgggagaaggagtgaggaggcagggccggcatgcctctgctgctggccaga

SEQ ID NO: 1257 - DNA, 54 bp, synthetic construct
  misc_feature 1..54: note = Description of Artificial Sequence: Synthetic oligonucleotide
  source 1..54: mol_type = other DNA
gtgctgggcggggggcggcgggccctcccgcagaacaccatgcgctccacggaa

SEQ ID NO: 1258 - DNA, 35 bp, synthetic construct
  misc_feature 1..35: note = Description of Artificial Sequence: Synthetic oligonucleotide
  source 1..35: mol_type = other DNA
gggccctcccgcagaacaccatgcgctccacggaa

SEQ ID NO: 1259 - DNA, 30 bp, synthetic construct
  misc_feature 1..30: note = Description of Artificial Sequence: Synthetic oligonucleotide
  source 1..30: mol_type = other DNA
ctcccgcagaacaccatgcgctccacggaa

SEQ ID NO: 1260 - DNA, 55 bp, synthetic construct
  misc_feature 1..55: note = Description of Artificial Sequence: Synthetic oligonucleotide
  source 1..55: mol_type = other DNA
gtgctgggcggggggcggcgggccctcccgcagaacaccatgcgctccacggaag

SEQ ID NO: 1261 - DNA, 54 bp, synthetic construct
  misc_feature 1..54: note = Description of Artificial Sequence: Synthetic oligonucleotide
  source 1..54: mol_type = other DNA
gtgctgggcggggggcggcgggccctcccgcagaacaccatgcgctcctcggaa

SEQ ID NO: 1262 - DNA, 50 bp, synthetic construct
  misc_feature 1..50: note = Description of Artificial Sequence: Synthetic oligonucleotide
  source 1..50: mol_type = other DNA
tttatgcctcatcctctgagtgctgaaggcttgctgtaggctgtatgctg

SEQ ID NO: 1263 - DNA, 54 bp, synthetic construct
  misc_feature 1..54: note = Description of Artificial Sequence: Synthetic oligonucleotide
  source 1..54: mol_type = other DNA
gtgctgggcggggggcggcgggccctcccgcagaacaccatgcgctcttcggga

SEQ ID NO: 1264 - DNA, 10 bp, synthetic construct
  misc_feature 1..10: note = Description of Artificial Sequence: Synthetic oligonucleotide
  source 1..10: mol_type = other DNA
tgtgacctgg

SEQ ID NO: 1265 - DNA, 10 bp, synthetic construct
  misc_feature 1..10: note = Description of Artificial Sequence: Synthetic oligonucleotide
  source 1..10: mol_type = other DNA
tgtgatttgg

SEQ ID NO: 1266 - DNA, 18 bp, synthetic construct
  misc_feature 1..18: note = Description of Artificial Sequence: Synthetic oligonucleotide
  source 1..18: mol_type = other DNA
gtctgcacctgtcactag

SEQ ID NO: 1267 - DNA, 10 bp, synthetic construct
  misc_feature 1..10: note = Description of Artificial Sequence: Synthetic oligonucleotide
  source 1..10: mol_type = other DNA
gtgacccaag

SEQ ID NO: 1268 - DNA, 15 bp, synthetic construct
  misc_feature 1..15: note = Description of Artificial Sequence: Synthetic oligonucleotide
  source 1..15: mol_type = other DNA
gtggccactgagaag

SEQ ID NO: 1269 - DNA, 10 bp, synthetic construct
  misc_feature 1..10: note = Description of Artificial Sequence: Synthetic oligonucleotide
  source 1..10: mol_type = other DNA
gtgacccaat

SEQ ID NO: 1270 - DNA, 10 bp, synthetic construct
  misc_feature 1..10: note = Description of Artificial Sequence: Synthetic oligonucleotide
  source 1..10: mol_type = other DNA
gtgacccaac

SEQ ID NO: 1271 - DNA, 15 bp, synthetic construct
  misc_feature 1..15: note = Description of Artificial Sequence: Synthetic oligonucleotide
  source 1..15: mol_type = other DNA
gtggccactgagaaa

SEQ ID NO: 1272 - DNA, 10 bp, synthetic construct
  misc_feature 1..10: note = Description of Artificial Sequence: Synthetic oligonucleotide
  source 1..10: mol_type = other DNA
tataatttgg

SEQ ID NO: 1273 - DNA, 11 bp, synthetic construct
  misc_feature 1..11: note = Description of Artificial Sequence: Synthetic oligonucleotide
  source 1..11: mol_type = other DNA
cctgacccagt

SEQ ID NO: 1274 - DNA, 52 bp, synthetic construct
  misc_feature 1..52: note = Description of Artificial Sequence: Synthetic oligonucleotide
  source 1..52: mol_type = other DNA
ctgaggagcgccttgacagcagccatgggagggccgccccctacctcagtga

SEQ ID NO: 1275 - DNA, 52 bp, synthetic construct
  misc_feature 1..52: note = Description of Artificial Sequence: Synthetic oligonucleotide
  source 1..52: mol_type = other DNA
ctgtggagcgccttgacagcagccatgggagggccgccccctacctcagtga

SEQ ID NO: 1276 - DNA, 100 bp, synthetic construct
  misc_feature 1..100: note = Description of Artificial Sequence: Synthetic oligonucleotide
  source 1..100: mol_type = other DNA
tggccgtgtagtgctacccagcgctggctgcctcctcagcattgcaattcctctcccatctgggcaccagtcagctaccctggtgggaatctgggtagcc

SEQ ID NO: 1277 - DNA, 35 bp, synthetic construct
  misc_feature 1..35: note = Description of Artificial Sequence: Synthetic oligonucleotide
  source 1..35: mol_type = other DNA
ctgaggagcgccttgacagcagccatgggagggcc

SEQ ID NO: 1278 - DNA, 52 bp, synthetic construct
  misc_feature 1..52: note = Description of Artificial Sequence: Synthetic oligonucleotide
  source 1..52: mol_type = other DNA
ctgcggagcgccttgacagcagccatgggagggccgccccctacctcagtga

SEQ ID NO: 1279 - DNA, 50 bp, synthetic construct
  misc_feature 1..50: note = Description of Artificial Sequence: Synthetic oligonucleotide
  source 1..50: mol_type = other DNA
agtgtatgatgcctgttactagcattcacatggaacaaattgctgccgtg

SEQ ID NO: 1280 - DNA, 54 bp, synthetic construct
  misc_feature 1..54: note = Description of Artificial Sequence: Synthetic oligonucleotide
  source 1..54: mol_type = other DNA
tcctgaggagcgccttgacagcagccatgggagggccgccccctacctcagtga

SEQ ID NO: 1281 - DNA, 152 bp, synthetic construct
  misc_feature 1..152: note = Description of Artificial Sequence: Synthetic oligonucleotide
  source 1..152: mol_type = other DNA
tttatgcctcatcctctgagtgctgaaggcttgctgtaggctgtatgctgcaatgtgactgctgacaaccctgtgacctggtttgtcagcagtcacattgttagtgtatgatgcctgttactagcattcacatggaacaaattgctgccgtg

SEQ ID NO: 1282 - DNA, 158 bp, synthetic construct
  misc_feature 1..158: note = Description of Artificial Sequence: Synthetic oligonucleotide
  source 1..158: mol_type = other DNA
gtgctgggcggggggcggcgggccctcccgcagaacaccatgcgctcttcggaacaatgtgactgctgacaaccctgtgacctggtttgtcagcagtcacattgttctgaggagcgccttgacagcagccatgggagggccgccccctacctcagtga

SEQ ID NO: 1283 - DNA, 158 bp, synthetic construct
  misc_feature 1..158: note = Description of Artificial Sequence: Synthetic oligonucleotide
  source 1..158: mol_type = other DNA
gtgctgggcggggggcggcgggccctcccgcagaacaccatgcgctcttcggaacaatgtgactgctgacaatcctgtgacctggtttgtcagcagtcacattgttctgaggagcgccttgacagcagccatgggagggccgccccctacctcagtga

SEQ ID NO: 1284 - DNA, 158 bp, synthetic construct
  misc_feature 1..158: note = Description of Artificial Sequence: Synthetic oligonucleotide
  source 1..158: mol_type = other DNA
gtgctgggcggggggcggcgggccctcccgcagaacaccatgcgctcttcggaacaatgtgactgctgacaagcctgtgacctggtttgtcagcagtcacattgttctgaggagcgccttgacagcagccatgggagggccgccccctacctcagtga

SEQ ID NO: 1285 - DNA, 158 bp, synthetic construct
  misc_feature 1..158: note = Description of Artificial Sequence: Synthetic oligonucleotide
  source 1..158: mol_type = other DNA
gtgctgggcggggggcggcgggccctcccgcagaacaccatgcgctcttcggaacaatgtgactgctgacaaacctgtgacctggtttgtcagcagtcacattgttctgaggagcgccttgacagcagccatgggagggccgccccctacctcagtga

SEQ ID NO: 1286 - DNA, 158 bp, synthetic construct
  misc_feature 1..158: note = Description of Artificial Sequence: Synthetic oligonucleotide
  source 1..158: mol_type = other DNA
gtgctgggcggggggcggcgggccctcccgcagaacaccatgcgctcttcggaacaatgtgacagctgacaaacctgtgacctggtttgtcagcagtcacattgttctgaggagcgccttgacagcagccatgggagggccgccccctacctcagtga

SEQ ID NO: 1287 - DNA, 157 bp, synthetic construct
  misc_feature 1..157: note = Description of Artificial Sequence: Synthetic oligonucleotide
  source 1..157: mol_type = other DNA
gtgctgggcggggggcggcgggccctcccgcagaacaccatgcgctcttcggaacaatgtgactgctgacaacctgtgacctggtttgtcagcagtcacattgttctgaggagcgccttgacagcagccatgggagggccgccccctacctcagtga

SEQ ID NO: 1288 - DNA, 159 bp, synthetic construct
  misc_feature 1..159: note = Description of Artificial Sequence: Synthetic oligonucleotide
  source 1..159: mol_type = other DNA
gtgctgggcggggggcggcgggccctcccgcagaacaccatgcgctcttcggaacaatgtgactgctgacaatccctgtgacctggtttgtcagcagtcacattgttctgaggagcgccttgacagcagccatgggagggccgccccctacctcagtga

SEQ ID NO: 1289 - DNA, 158 bp, synthetic construct
  misc_feature 1..158: note = Description of Artificial Sequence: Synthetic oligonucleotide
  source 1..158: mol_type = other DNA
gtgctgggcggggggcggcgggccctcccgcagaacaccatgcgctcttcggaacaatgtgactgctgacaaccctgtgatttggtttgtcagcagtcacattgttctgaggagcgccttgacagcagccatgggagggccgccccctacctcagtga

SEQ ID NO: 1290 - DNA, 158 bp, synthetic construct
  misc_feature 1..158: note = Description of Artificial Sequence: Synthetic oligonucleotide
  source 1..158: mol_type = other DNA
gtgctgggcggggggcggcgggccctcccgcagaacaccatgcgctcttcggaacaatgtgactgctgacaaccctataatttggtttgtcagcagtcacattgttctgaggagcgccttgacagcagccatgggagggccgccccctacctcagtga

SEQ ID NO: 1291 - DNA, 159 bp, synthetic construct
  misc_feature 1..159: note = Description of Artificial Sequence: Synthetic oligonucleotide
  source 1..159: mol_type = other DNA
gtgctgggcggggggcggcgggccctcccgcagaacaccatgcgctcttcggaacaatgtgactgctgacaacaccctgacccagttttgtcagcagtcacattgttctgaggagcgccttgacagcagccatgggagggccgccccctacctcagtga

SEQ ID NO: 1292 - DNA, 158 bp, synthetic construct
  misc_feature 1..158: note = Description of Artificial Sequence: Synthetic oligonucleotide
  source 1..158: mol_type = other DNA
gtgctgggcggggggcggcgggccctcccgcagaacaccatgcgctcttcggaacaatgtgactgctgacaaccctgtgacctggtttgtcagcagtcacattgttctgtggagcgccttgacagcagccatgggagggccgccccctacctcagtga

SEQ ID NO: 1293 - DNA, 158 bp, synthetic construct
  misc_feature 1..158: note = Description of Artificial Sequence: Synthetic oligonucleotide
  source 1..158: mol_type = other DNA
gtgctgggcggggggcggcgggccctcccgcagaacaccatgcgctcttcggaacaatgtgactgctgacaatcctgtgacctggtttgtcagcagtcacattgttctgtggagcgccttgacagcagccatgggagggccgccccctacctcagtga

SEQ ID NO: 1294 - DNA, 158 bp, synthetic construct
  misc_feature 1..158: note = Description of Artificial Sequence: Synthetic oligonucleotide
  source 1..158: mol_type = other DNA
gtgctgggcggggggcggcgggccctcccgcagaacaccatgcgctcttcggaacaatgtgacagctgacaaacctgtgacctggtttgtcagcagtcacattgttctgtggagcgccttgacagcagccatgggagggccgccccctacctcagtga

SEQ ID NO: 1295 - DNA, 159 bp, synthetic construct
  misc_feature 1..159: note = Description of Artificial Sequence: Synthetic oligonucleotide
  source 1..159: mol_type = other DNA
gtgctgggcggggggcggcgggccctcccgcagaacaccatgcgctcttcggaacaatgtgactgctgacaacaccctgacccagttttgtcagcagtcacattgttctgtggagcgccttgacagcagccatgggagggccgccccctacctcagtga

SEQ ID NO: 1296 - DNA, 158 bp, synthetic construct
  misc_feature 1..158: note = Description of Artificial Sequence: Synthetic oligonucleotide
  source 1..158: mol_type = other DNA
gtgctgggcggggggcggcgggccctcccgcagaacaccatgcgctcttcggaacaatgtgactgctgacaagcctgtgacctggtttgtcagcagtcacattgttctgtggagcgccttgacagcagccatgggagggccgccccctacctcagtga

SEQ ID NO: 1297 - DNA, 158 bp, synthetic construct
  misc_feature 1..158: note = Description of Artificial Sequence: Synthetic oligonucleotide
  source 1..158: mol_type = other DNA
gtgctgggcggggggcggcgggccctcccgcagaacaccatgcgctcttcggaacgacgaaggccgtgtgcgccctgtgacctggtcgcacacggccttcgtcgttctgaggagcgccttgacagcagccatgggagggccgccccctacctcagtga

SEQ ID NO: 1298 - DNA, 158 bp, synthetic construct
  misc_feature 1..158: note = Description of Artificial Sequence: Synthetic oligonucleotide
  source 1..158: mol_type = other DNA
gtgctgggcggggggcggcgggccctcccgcagaacaccatgcgctcttcggaatgacttgggcaaaggtggccctgtgacctggtccacctttgcccaagtcattctgaggagcgccttgacagcagccatgggagggccgccccctacctcagtga

SEQ ID NO: 1299 - DNA, 158 bp, synthetic construct
  misc_feature 1..158: note = Description of Artificial Sequence: Synthetic oligonucleotide
  source 1..158: mol_type = other DNA
gtgctgggcggggggcggcgggccctcccgcagaacaccatgcgctcttcggaaaactcatctgttatcctgccctgtgacctggtcaggataacagatgagttttctgaggagcgccttgacagcagccatgggagggccgccccctacctcagtga

SEQ ID NO: 1300 - DNA, 260 bp, synthetic construct
  misc_feature 1..260: note = Description of Artificial Sequence: Synthetic oligonucleotide
  source 1..260: mol_type = other DNA
gaagcaaagaaggggcagagggagcccgtgagctgagtgggccagggactgggagaaggagtgaggaggcagggccggcatgcctctgctgctggccagacaatgtgactgctgacaacccgtctgcacctgtcactagtttgtcagcagtcacattgtttggccgtgtagtgctacccagcgctggctgcctcctcagcattgcaattcctctcccatctgggcaccagtcagctaccctggtgggaatctgggtagcc

SEQ ID NO: 1301 - DNA, 158 bp, synthetic construct
  misc_feature 1..158: note = Description of Artificial Sequence: Synthetic oligonucleotide
  source 1..158: mol_type = other DNA
gtgctgggcggggggcggcgggccctcccgcagaacaccatgcgctcttcggaaccccttaactcatctgttccctgtgacctggtaacagatgagttaaggggttctgaggagcgccttgacagcagccatgggagggccgccccctacctcagtga

SEQ ID NO: 1302 - DNA, 158 bp, synthetic construct
  misc_feature 1..158: note = Description of Artificial Sequence: Synthetic oligonucleotide
  source 1..158: mol_type = other DNA
gtgctgggcggggggcggcgggccctcccgcagaacaccatgcgctcttcggaacccttaactcatctgttaccctgtgacctggttaacagatgagttaagggttctgaggagcgccttgacagcagccatgggagggccgccccctacctcagtga

SEQ ID NO: 1303 - DNA, 158 bp, synthetic construct
  misc_feature 1..158: note = Description of Artificial Sequence: Synthetic oligonucleotide
  source 1..158: mol_type = other DNA
gtgctgggcggggggcggcgggccctcccgcagaacaccatgcgctcttcggaaaactcatctgttatcttgccctgtgacctggtcaggataacagatgagttttctgaggagcgccttgacagcagccatgggagggccgccccctacctcagtga

SEQ ID NO: 1304 - DNA, 158 bp, synthetic construct
  misc_feature 1..158: note = Description of Artificial Sequence: Synthetic oligonucleotide
  source 1..158: mol_type = other DNA
gtgctgggcggggggcggcgggccctcccgcagaacaccatgcgctcttcggaagctgtggaaatgtatcttccctgtgacctggtaggatacatttctacagcttctgaggagcgccttgacagcagccatgggagggccgccccctacctcagtga

SEQ ID NO: 1305 - DNA, 158 bp, synthetic construct
  misc_feature 1..158: note = Description of Artificial Sequence: Synthetic oligonucleotide
  source 1..158: mol_type = other DNA
gtgctgggcggggggcggcgggccctcccgcagaacaccatgcgctcttcggaatgacttgggcaaaggtgagcctgtgacctggtccacctttgcccaagtcattctgaggagcgccttgacagcagccatgggagggccgccccctacctcagtga

SEQ ID NO: 1306 - DNA, 158 bp, synthetic construct
  misc_feature 1..158: note = Description of Artificial Sequence: Synthetic oligonucleotide
  source 1..158: mol_type = other DNA
gtgctgggcggggggcggcgggccctcccgcagaacaccatgcgctcttcggaaccccttaactcatctgttgcctgtgacctggtaacagatgagttaaggggttctgaggagcgccttgacagcagccatgggagggccgccccctacctcagtga

SEQ ID NO: 1307 - DNA, 158 bp, synthetic construct
  misc_feature 1..158: note = Description of Artificial Sequence: Synthetic oligonucleotide
  source 1..158: mol_type = other DNA
gtgctgggcggggggcggcgggccctcccgcagaacaccatgcgctcttcggaacccttaactcatctgttagcctgtgacctggttaacagatgagttaagggttctgaggagcgccttgacagcagccatgggagggccgccccctacctcagtga

SEQ ID NO: 1308 - DNA, 158 bp, synthetic construct
  misc_feature 1..158: note = Description of Artificial Sequence: Synthetic oligonucleotide
  source 1..158: mol_type = other DNA
gtgctgggcggggggcggcgggccctcccgcagaacaccatgcgctcttcggaaaactcatctgttatcttagcctgtgacctggtcaggataacagatgagttttctgaggagcgccttgacagcagccatgggagggccgccccctacctcagtga

SEQ ID NO: 1309 - DNA, 158 bp, synthetic construct
  misc_feature 1..158: note = Description of Artificial Sequence: Synthetic oligonucleotide
  source 1..158: mol_type = other DNA
gtgctgggcggggggcggcgggccctcccgcagaacaccatgcgctcttcggaagctgtggaaatgtatcttgcctgtgacctggtaggatacatttctacagcttctgaggagcgccttgacagcagccatgggagggccgccccctacctcagtga

SEQ ID NO: 1310 - DNA, 158 bp, synthetic construct
  misc_feature 1..158: note = Description of Artificial Sequence: Synthetic oligonucleotide
  source 1..158: mol_type = other DNA
gtgctgggcggggggcggcgggccctcccgcagaacaccatgcgctcttcggaatgacttgggcaaaggtaggcctgtgacctggtccacctttgcccaagtcattctgaggagcgccttgacagcagccatgggagggccgccccctacctcagtga

SEQ ID NO: 1311 - DNA, 158 bp, synthetic construct
  misc_feature 1..158: note = Description of Artificial Sequence: Synthetic oligonucleotide
  source 1..158: mol_type = other DNA
gtgctgggcggggggcggcgggccctcccgcagaacaccatgcgctcttcggaaccccttaactcatctgttccctgtgatttggtaacagatgagttaaggggttctgaggagcgccttgacagcagccatgggagggccgccccctacctcagtga

SEQ ID NO: 1312 - DNA, 158 bp, synthetic construct
  misc_feature 1..158: note = Description of Artificial Sequence: Synthetic oligonucleotide
  source 1..158: mol_type = other DNA
gtgctgggcggggggcggcgggccctcccgcagaacaccatgcgctcttcggaacccttaactcatctgttaccctgtgatttggttaacagatgagttaagggttctgaggagcgccttgacagcagccatgggagggccgccccctacctcagtga

SEQ ID NO: 1313 - DNA, 158 bp, synthetic construct
  misc_feature 1..158: note = Description of Artificial Sequence: Synthetic oligonucleotide
  source 1..158: mol_type = other DNA
gtgctgggcggggggcggcgggccctcccgcagaacaccatgcgctcttcggaaaactcatctgttatcttgccctgtgatttggtcaggataacagatgagttttctgaggagcgccttgacagcagccatgggagggccgccccctacctcagtga

SEQ ID NO: 1314 - DNA, 158 bp, synthetic construct
  misc_feature 1..158: note = Description of Artificial Sequence: Synthetic oligonucleotide
  source 1..158: mol_type = other DNA
gtgctgggcggggggcggcgggccctcccgcagaacaccatgcgctcttcggaagctgtggaaatgtatcttccctgtgatttggtaggatacatttctacagcttctgaggagcgccttgacagcagccatgggagggccgccccctacctcagtga

SEQ ID NO: 1315 - DNA, 158 bp, synthetic construct
  misc_feature 1..158: note = Description of Artificial Sequence: Synthetic oligonucleotide
  source 1..158: mol_type = other DNA
gtgctgggcggggggcggcgggccctcccgcagaacaccatgcgctcttcggaatgacttgggcaaaggtgagcctgtgatttggtccacctttgcccaagtcattctgaggagcgccttgacagcagccatgggagggccgccccctacctcagtga

SEQ ID NO: 1316 - DNA, 158 bp, synthetic construct
  misc_feature 1..158: note = Description of Artificial Sequence: Synthetic oligonucleotide
  source 1..158: mol_type = other DNA
gtgctgggcggggggcggcgggccctcccgcagaacaccatgcgctcttcggaaccccttaacacatctgttacctgtgacctggtaacagatgagttaaggggttctgtggagcgccttgacagcagccatgggagggccgccccctacctcagtga

SEQ ID NO: 1317 - DNA, 158 bp, synthetic construct
  misc_feature 1..158: note = Description of Artificial Sequence: Synthetic oligonucleotide
  source 1..158: mol_type = other DNA
gtgctgggcggggggcggcgggccctcccgcagaacaccatgcgctcttcggaacccttaactgatctgttaacctgtgacctggttaacagatgagttaagggttctgtggagcgccttgacagcagccatgggagggccgccccctacctcagtga

SEQ ID NO: 1318 - DNA, 158 bp, synthetic construct
  misc_feature 1..158: note = Description of Artificial Sequence: Synthetic oligonucleotide
  source 1..158: mol_type = other DNA
gtgctgggcggggggcggcgggccctcccgcagaacaccatgcgctcttcggaaaactcatctcttatcttgccctgtgacctggtcaggataacagatgagttttctgtggagcgccttgacagcagccatgggagggccgccccctacctcagtga

SEQ ID NO: 1319 - DNA, 158 bp, synthetic construct
  misc_feature 1..158: note = Description of Artificial Sequence: Synthetic oligonucleotide
  source 1..158: mol_type = other DNA
gtgctgggcggggggcggcgggccctcccgcagaacaccatgcgctcttcggaagctgtggaattgtatcttgcctgtgacctggtaggatacatttctacagcttctgtggagcgccttgacagcagccatgggagggccgccccctacctcagtga

SEQ ID NO: 1320 - DNA, 158 bp, synthetic construct
  misc_feature 1..158: note = Description of Artificial Sequence: Synthetic oligonucleotide
  source 1..158: mol_type = other DNA
gtgctgggcggggggcggcgggccctcccgcagaacaccatgcgctcttcggaatgacttggggaaaggtgagcctgtgacctggtccacctttgcccaagtcattctgtggagcgccttgacagcagccatgggagggccgccccctacctcagtga

SEQ ID NO: 1321 - DNA, 158 bp, synthetic construct
  misc_feature 1..158: note = Description of Artificial Sequence: Synthetic oligonucleotide
  source 1..158: mol_type = other DNA
gtgctgggcggggggcggcgggccctcccgcagaacaccatgcgctcttcggaaccccttaactcatctgttgcctgtgacctggtaacagatgagttaaggggttctgtggagcgccttgacagcagccatgggagggccgccccctacctcagtga

SEQ ID NO: 1322 - DNA, 158 bp, synthetic construct
  misc_feature 1..158: note = Description of Artificial Sequence: Synthetic oligonucleotide
  source 1..158: mol_type = other DNA
gtgctgggcggggggcggcgggccctcccgcagaacaccatgcgctcttcggaacccttaactcatctgttagcctgtgacctggttaacagatgagttaagggttctgtggagcgccttgacagcagccatgggagggccgccccctacctcagtga

SEQ ID NO: 1323 - DNA, 158 bp, synthetic construct
  misc_feature 1..158: note = Description of Artificial Sequence: Synthetic oligonucleotide
  source 1..158: mol_type = other DNA
gtgctgggcggggggcggcgggccctcccgcagaacaccatgcgctcttcggaaaactcatctgttatcttggcctgtgacctggtcaggataacagatgagttttctgtggagcgccttgacagcagccatgggagggccgccccctacctcagtga

SEQ ID NO: 1324 - DNA, 158 bp, synthetic construct
  misc_feature 1..158: note = Description of Artificial Sequence: Synthetic oligonucleotide
  source 1..158: mol_type = other DNA
gtgctgggcggggggcggcgggccctcccgcagaacaccatgcgctcttcggaagctgtggaaatgtatcttgcctgtgacctggtaggatacatttctacagcttctgtggagcgccttgacagcagccatgggagggccgccccctacctcagtga

SEQ ID NO: 1325 - DNA, 158 bp, synthetic construct
  misc_feature 1..158: note = Description of Artificial Sequence: Synthetic oligonucleotide
  source 1..158: mol_type = other DNA
gtgctgggcggggggcggcgggccctcccgcagaacaccatgcgctcttcggaatgacttgggcaaaggtaggcctgtgacctggtccacctttgcccaagtcattctgtggagcgccttgacagcagccatgggagggccgccccctacctcagtga

SEQ ID NO: 1326 - DNA, 260 bp, synthetic construct
  misc_feature 1..260: note = Description of Artificial Sequence: Synthetic oligonucleotide
  source 1..260: mol_type = other DNA
gaagcaaagaaggggcagagggagcccgtgagctgagtgggccagggactgggagaaggagtgaggaggcagggccggcatgcctctgctgctggccagaccccttaactcatttgttcccgtctgcacctgtcactagtaacagatgagttaaggggtttggccgtgtagtgctacccagcgctggctgcctcctcagcattgcaattcctctcccatctgggcaccagtcagctaccctggtgggaatctgggtagcc

SEQ ID NO: 1327 - DNA, 260 bp, synthetic construct
  misc_feature 1..260: note = Description of Artificial Sequence: Synthetic oligonucleotide
  source 1..260: mol_type = other DNA
gaagcaaagaaggggcagagggagcccgtgagctgagtgggccagggactgggagaaggagtgaggaggcagggccggcatgcctctgctgctggccagacccttaactcatctgttacccgtctgcacctgtcactagttaacagatgagttaagggtttggccgtgtagtgctacccagcgctggctgcctcctcagcattgcaattcctctcccatctgggcaccagtcagctaccctggtgggaatctgggtagcc

SEQ ID NO: 1328 - DNA, 260 bp, synthetic construct
  misc_feature 1..260: note = Description of Artificial Sequence: Synthetic oligonucleotide
  source 1..260: mol_type = other DNA
gaagcaaagaaggggcagagggagcccgtgagctgagtgggccagggactgggagaaggagtgaggaggcagggccggcatgcctctgctgctggccagaaactcatctgttatcttgcccgtctgcacctgtcactagtcaggataacagatgagtttttggccgtgtagtgctacccagcgctggctgcctcctcagcattgcaattcctctcccatctgggcaccagtcagctaccctggtgggaatctgggtagcc

SEQ ID NO: 1329 - DNA, 260 bp, synthetic construct
  misc_feature 1..260: note = Description of Artificial Sequence: Synthetic oligonucleotide
  source 1..260: mol_type = other DNA
gaagcaaagaaggggcagagggagcccgtgagctgagtgggccagggactgggagaaggagtgaggaggcagggccggcatgcctctgctgctggccagagctgtggaaatgtatcttcccgtctgcacctgtcactagtaggatacatttctacagctttggccgtgtagtgctacccagcgctggctgcctcctcagcattgcaattcctctcccatctgggcaccagtcagctaccctggtgggaatctgggtagcc

SEQ ID NO: 1330 - DNA, 260 bp, synthetic construct
  misc_feature 1..260: note = Description of Artificial Sequence: Synthetic oligonucleotide
  source 1..260: mol_type = other DNA
gaagcaaagaaggggcagagggagcccgtgagctgagtgggccagggactgggagaaggagtgaggaggcagggccggcatgcctctgctgctggccagatgacttgggcaaaggtagcccgtctgcacctgtcactagtccacctttgcccaagtcatttggccgtgtagtgctacccagcgctggctgcctcctcagcattgcaattcctctcccatctgggcaccagtcagctaccctggtgggaatctgggtagcc

SEQ ID NO: 1331 - DNA, 21 bp, synthetic construct
  misc_feature 1..21: note = Description of Artificial Sequence: Synthetic oligonucleotide
  source 1..21: mol_type = other DNA
caatgtgactgctgacaaccc

SEQ ID NO: 1332 - DNA, 21 bp, synthetic construct
  misc_feature 1..21: note = Description of Artificial Sequence: Synthetic oligonucleotide
  source 1..21: mol_type = other DNA
tttgtcagcagtcacattgtt

SEQ ID NO: 1333 - DNA, 21 bp, synthetic construct
  misc_feature 1..21: note = Description of Artificial Sequence: Synthetic oligonucleotide
  source 1..21: mol_type = other DNA
caatgtgactgctgacaatcc

SEQ ID NO: 1334 - DNA, 21 bp, synthetic construct
  misc_feature 1..21: note = Description of Artificial Sequence: Synthetic oligonucleotide
  source 1..21: mol_type = other DNA
caatgtgactgctgacaagcc

SEQ ID NO: 1335 - DNA, 21 bp, synthetic construct
  misc_feature 1..21: note = Description of Artificial Sequence: Synthetic oligonucleotide
  source 1..21: mol_type = other DNA
caatgtgactgctgacaaacc

SEQ ID NO: 1336 - DNA, 21 bp, synthetic construct
  misc_feature 1..21: note = Description of Artificial Sequence: Synthetic oligonucleotide
  source 1..21: mol_type = other DNA
caatgtgacagctgacaaacc

SEQ ID NO: 1337 - DNA, 20 bp, synthetic construct
  misc_feature 1..20: note = Description of Artificial Sequence: Synthetic oligonucleotide
  source 1..20: mol_type = other DNA
caatgtgactgctgacaacc

SEQ ID NO: 1338 - DNA, 21 bp, synthetic construct
  misc_feature 1..21: note = Description of Artificial Sequence: Synthetic oligonucleotide
  source 1..21: mol_type = other DNA
caatgtgactgctgacaacac

SEQ ID NO: 1339 - DNA, 22 bp, synthetic construct
  misc_feature 1..22: note = Description of Artificial Sequence: Synthetic oligonucleotide
  source 1..22: mol_type = other DNA
caatgtgactgctgacaatccc

SEQ ID NO: 1340 - DNA, 21 bp, synthetic construct
  misc_feature 1..21: note = Description of Artificial Sequence: Synthetic oligonucleotide
  source 1..21: mol_type = other DNA
cgacgaaggccgtgtgcgccc

SEQ ID NO: 1341 - DNA, 21 bp, synthetic construct
  misc_feature 1..21: note = Description of Artificial Sequence: Synthetic oligonucleotide
  source 1..21: mol_type = other DNA
tcgcacacggccttcgtcgtt

SEQ ID NO: 1342 - DNA, 21 bp, synthetic construct
  misc_feature 1..21: note = Description of Artificial Sequence: Synthetic oligonucleotide
  source 1..21: mol_type = other DNA
tgacttgggcaaaggtggccc

SEQ ID NO: 1343 - DNA, 21 bp, synthetic construct
  misc_feature 1..21: note = Description of Artificial Sequence: Synthetic oligonucleotide
  source 1..21: mol_type = other DNA
tccacctttgcccaagtcatt

SEQ ID NO: 1344 - DNA, 21 bp, synthetic construct
  misc_feature 1..21: note = Description of Artificial Sequence: Synthetic oligonucleotide
  source 1..21: mol_type = other DNA
aactcatctgttatcctgccc

SEQ ID NO: 1345 - DNA, 21 bp, synthetic construct
  misc_feature 1..21: note = Description of Artificial Sequence: Synthetic oligonucleotide
  source 1..21: mol_type = other DNA
tcaggataacagatgagtttt

SEQ ID NO: 1346 - DNA, 21 bp, synthetic construct
  misc_feature 1..21: note = Description of Artificial Sequence: Synthetic oligonucleotide
  source 1..21: mol_type = other DNA
ccccttaactcatctgttccc

SEQ ID NO: 1347 - DNA, 21 bp, synthetic construct
  misc_feature 1..21: note = Description of Artificial Sequence: Synthetic oligonucleotide
  source 1..21: mol_type = other DNA
taacagatgagttaaggggtt

SEQ ID NO: 1348 - DNA, 21 bp, synthetic construct
  misc_feature 1..21: note = Description of Artificial Sequence: Synthetic oligonucleotide
  source 1..21: mol_type = other DNA
cccttaactcatctgttaccc

SEQ ID NO: 1349 - DNA, 21 bp, synthetic construct
  misc_feature 1..21: note = Description of Artificial Sequence: Synthetic oligonucleotide
  source 1..21: mol_type = other DNA
ttaacagatgagttaagggtt

SEQ ID NO: 1350 - DNA, 21 bp, synthetic construct
  misc_feature 1..21: note = Description of Artificial Sequence: Synthetic oligonucleotide
  source 1..21: mol_type = other DNA
aactcatctgttatcttgccc

SEQ ID NO: 1351 - DNA, 21 bp, synthetic construct
  misc_feature 1..21: note = Description of Artificial Sequence: Synthetic oligonucleotide
  source 1..21: mol_type = other DNA
gctgtggaaatgtatcttccc

SEQ ID NO: 1352 - DNA, 21 bp, synthetic construct
  misc_feature 1..21: note = Description of Artificial Sequence: Synthetic oligonucleotide
  source 1..21: mol_type = other DNA
taggatacatttctacagctt

SEQ ID NO: 1353 - DNA, 21 bp, synthetic construct
  misc_feature 1..21: note = Description of Artificial Sequence: Synthetic oligonucleotide
  source 1..21: mol_type = other DNA
tgacttgggcaaaggtgagcc

SEQ ID NO: 1354 - DNA, 21 bp, synthetic construct
  misc_feature 1..21: note = Description of Artificial Sequence: Synthetic oligonucleotide
  source 1..21: mol_type = other DNA
ccccttaactcatctgttgcc

SEQ ID NO: 1355 - DNA, 21 bp, synthetic construct
  misc_feature 1..21: note = Description of Artificial Sequence: Synthetic oligonucleotide
  source 1..21: mol_type = other DNA
cccttaactcatctgttagcc

SEQ ID NO: 1356 - DNA, 21 bp, synthetic construct
  misc_feature 1..21: note = Description of Artificial Sequence: Synthetic oligonucleotide
  source 1..21: mol_type = other DNA
aactcatctgttatcttagcc

SEQ ID NO: 1357 - DNA, 21 bp, synthetic construct
  misc_feature 1..21: note = Description of Artificial Sequence: Synthetic oligonucleotide
  source 1..21: mol_type = other DNA
gctgtggaaatgtatcttgcc

SEQ ID NO: 1358 - DNA, 21 bp, synthetic construct
  misc_feature 1..21: note = Description of Artificial Sequence: Synthetic oligonucleotide
  source 1..21: mol_type = other DNA
tgacttgggcaaaggtaggcc

SEQ ID NO: 1359 - DNA, 21 bp, synthetic construct
  misc_feature 1..21: note = Description of Artificial Sequence: Synthetic oligonucleotide
  source 1..21: mol_type = other DNA
ccccttaacacatctgttacc

SEQ ID NO: 1360 - DNA, 21 bp, synthetic construct
  misc_feature 1..21: note = Description of Artificial Sequence: Synthetic oligonucleotide
  source 1..21: mol_type = other DNA
cccttaactgatctgttaacc

SEQ ID NO: 1361 - DNA, 21 bp, synthetic construct
  misc_feature 1..21: note = Description of Artificial Sequence: Synthetic oligonucleotide
  source 1..21: mol_type = other DNA
aactcatctcttatcttgccc

SEQ ID NO: 1362 - DNA, 21 bp, synthetic construct
  misc_feature 1..21: note = Description of Artificial Sequence: Synthetic oligonucleotide
  source 1..21: mol_type = other DNA
gctgtggaattgtatcttgcc

SEQ ID NO: 1363 - DNA, 21 bp, synthetic construct
  misc_feature 1..21: note = Description of Artificial Sequence: Synthetic oligonucleotide
  source 1..21: mol_type = other DNA
tgacttggggaaaggtgagcc

SEQ ID NO: 1364 - DNA, 21 bp, synthetic construct
  misc_feature 1..21: note = Description of Artificial Sequence: Synthetic oligonucleotide
  source 1..21: mol_type = other DNA
aactcatctgttatcttggcc

SEQ ID NO: 1365 - DNA, 21 bp, synthetic construct
  misc_feature 1..21: note = Description of Artificial Sequence: Synthetic oligonucleotide
  source 1..21: mol_type = other DNA
ccccttaactcatttgttccc

SEQ ID NO: 1366 - DNA, 21 bp, synthetic construct
  misc_feature 1..21: note = Description of Artificial Sequence: Synthetic oligonucleotide
  source 1..21: mol_type = other DNA
tgacttgggcaaaggtagccc

SEQ ID NO: 1367 - DNA, 158 bp, synthetic construct
  misc_feature 1..158: note = Description of Artificial Sequence: Synthetic oligonucleotide
  source 1..158: mol_type = other DNA
gtgctgggcggggggcggcgggccctcccgcagaacaccatgcgctcttcgggatttgtcagcagtcacattgtctgtgacctggcaatgtgactgctgacaaatcctgaggagcgccttgacagcagccatgggagggccgccccctacctcagtga

SEQ ID NO: 1368 - DNA, 21 bp, synthetic construct
  misc_feature 1..21: note = Description of Artificial Sequence: Synthetic oligonucleotide
  source 1..21: mol_type = other DNA
tttgtcagcagtcacattgtc

SEQ ID NO: 1369 - DNA, 19 bp, synthetic construct
  misc_feature 1..19: note = Description of Artificial Sequence: Synthetic oligonucleotide
  source 1..19: mol_type = other DNA
caatgtgactgctgacaaa

SEQ ID NO: 1370 - DNA, 141 bp, synthetic construct
  misc_feature 1..141: note = Description of Artificial Sequence: Synthetic oligonucleotide
  source 1..141: mol_type = other DNA
cctgcaggcagctgcgcgctcgctcgctcactgaggccgcccgggcaaagcccgggcgtcgggcgacctttggtcgcccggcctcagtgagcgagcgagcgcgcagagagggagtggccaactccatcactaggggttcct

SEQ ID NO: 1371 - DNA, 105 bp, synthetic construct
  misc_feature 1..105: note = Description of Artificial Sequence: Synthetic oligonucleotide
  source 1..105: mol_type = other DNA
ctgcgcgctcgctcgctcactgaggccgcccgggcaaagcccgggcgtcgggcgacctttggtcgcccggcctcagtgagcgagcgagcgcgcagagagggagtg

SEQ ID NO: 1372 - DNA, 141 bp, synthetic construct
  misc_feature 1..141: note = Description of Artificial Sequence: Synthetic oligonucleotide
  source 1..141: mol_type = other DNA
aggaacccctagtgatggagttggccactccctctctgcgcgctcgctcgctcactgaggccgggcgaccaaaggtcgcccgacgcccgggctttgcccgggcggcctcagtgagcgagcgagcgcgcagctgcctgcagg

SEQ ID NO: 1373 - DNA, 130 bp, synthetic construct
  misc_feature 1..130: note = Description of Artificial Sequence: Synthetic oligonucleotide
  source 1..130: mol_type = other DNA
aggaacccctagtgatggagttggccactccctctctgcgcgctcgctcgctcactgaggccgggcgaccaaaggtcgcccgacgcccgggctttgcccgggcggcctcagtgagcgagcgagcgcgcag

SEQ ID NO: 1374 - DNA, 10 bp, synthetic construct
  misc_feature 1..10: note = Description of Artificial Sequence: Synthetic oligonucleotide
  source 1..10: mol_type = other DNA
gtcgacataa

SEQ ID NO: 1375 - DNA, 121 bp, synthetic construct
  misc_feature 1..121: note = Description of Artificial Sequence: Synthetic oligonucleotide
  source 1..121: mol_type = other DNA
gtcgacataacgcgtaattcgcccttgggcctaggcaattggatccgccggcagagaaaacatcccagggatttacagatcacatgcaggcagggaccagctcaacccttctacgcgtata

SEQ ID NO: 1376 - DNA, 73 bp, synthetic construct
  misc_feature 1..73: note = Description of Artificial Sequence: Synthetic oligonucleotide
  source 1..73: mol_type = other DNA
gtcgacataacgcgtaattcgcccttgggcctaggcaattggatccgccggcagagaaaacatcacgcgtata

SEQ ID NO: 1377 - DNA, 18 bp, synthetic construct
  misc_feature 1..18: note = Description of Artificial Sequence: Synthetic oligonucleotide
  source 1..18: mol_type = other DNA
gtcgacataacgcgtata

SEQ ID NO: 1378 - DNA, 14 bp, synthetic construct
  misc_feature 1..14: note = Description of Artificial Sequence: Synthetic oligonucleotide
  source 1..14: mol_type = other DNA
ctcgagagatctac

SEQ ID NO: 1379 - DNA, 3013 bp, synthetic construct
  misc_feature 1..3013: note = Description of Artificial Sequence: Synthetic oligonucleotide
  source 1..3013: mol_type = other DNA
aattcgcccttgggcctaggcaattggatccgccggcagagaaaacatcccagggatttacagatcacatgcaggcagggaccagctcaacccttctttaatgtcatccagggagggggccagggatggaggggaggggttgaggagcgagaggcagttatttttgggtgggattcaccacttttcccatgaagaggggagacttggtattttgttcaatcattaagaagacaaagggtttgttgaacttgacctcgggggggatagacatgggtatggcctctaaaaacatggccccagcagcttcagtccctttctcgtcgatggtcagcacagccttatgcacggcctggaggggagagaagcagagacacgttgtaaggctgatcccaggcctcgagcaaggctcacgtggacacctcccaggaagcgctcactccccctggacggccctggccctgcacatcctctccctccctgtcacataggccttgctcctcctcaaggctttggctgatggggctggctcccctctgtccatcttcctgacaagcgcctctccccctgctcaggtgcacccacaactcagaacagggaagagcatcgtcactccacgtctgcctccagggctctctcctttctagtacacggcttgaagctccttgaggacacggaccctggcagtgaccttcacagtgcccagaccccaagataatgcagccattcatggaactgcaggttgttcattggtcgcctttagttttccaaaataagtgtcactttagctgaaatcattcattaattcagacaccaaatctcacagatcgaaggagtcagaaattcctttgaaacaacttagcccaaacctttctgtgtcagtatggataaatcaaggcccaatgtctagaaggtcttgggcaaagttgaaattcagggtcagtgacacaacctcaagggaggccccgaaagtgccagctgcacagcagcccctgcctggctttgctgtttgcccaccgtcccgtgtcagtgaatcacgggcatcttcaggagctcagcctgggtcttcatttgtttccctcggccccttcctcagcctcaggacagtgctgcagcccccacacattcttccctacagataccatggtgcaacaaggtcgtcagggtgatctcaccttggagagcttcaggggtgcctcctctgtgaccccggagaggtcagccccattgctgaagaccttagtgatgcccagttgacccaggacgctcttcagatcataggttccagtaatggacagtttgggtaaatgtaagctggcagacctgtcgtgcagaaaagaaattcaaggcatggcacagcattcctcttgttcttctgggacccaccacagtgcaagtgttttcttttctgattatttctgccacttactcctgtgtcctccacccacactaagatgggaactcggctttggtttgttctacttttagctcttctacattgagtcaaagaatgttaacatcgaatgaatcacaaaagcttgaaatgccacctcctctgatattctaggtgtcctggaagcctgtctcatcttgccctgtagtgttgggtcacctggcccccagcctgtaacatccccagggccctacacccagagaaacacggggctggtggcagtgcccagtgacaaccgtttagtggataagagaagagtgaccacaccaggctgagtgctcctctctggttttccatggggagacaatgccaccctgagcagggtctggtgtgagcggcagctggctctgggctctctgatccgttaccctctcagcctctttgttctttctcaacccctggagcagagacctcaggaggtgctggcatggaacagagaaattccagcctcgattcctattatgaacccgacaccttttgtattttcatcttggttttacagtgtacaaaacgaactagatcagcagggcatgggcataatcacgaatgcacacacatacactaatgtgtggctcatgtttaagtatcacttactacaggacacccaatctaacagcaccgataaagtgacagagaaacgcaagccttctgcgaacatggcctggctgttccaattccgaaccttgcttttctgggccttgccacacaggctcttcccccgtccccccagggacattctacccttgaactccacactccactgctgcctttgccaggaagcccatctgttcctttttggttctgccagaacgtgtggtggtgctgctgtccctgccttgggcactggatattgggaagggacagtgtccacactggagtgggaagttcccagggacgagacctttacctcctcaccctgggtactgttctcctcatggagcatggacggcgctgcctgaactcagtggtggcctcattctggaagccaagtttatacagagtagcagtgacccagggatgtggggttcaccctcctcagccctctggccagtcctgatgggcctcagtcccaacatggctaagaggtgtgggcagcttcttggtcaccctcaggttggggaatcaccttctgtcttcattttccaggaacttggtgatgatatcgtgggtgagttcatttaccaggtgctgtagtttcccctcatcaggcaggaagaagatggcggtggcattgcccaggtatttcatcagcagcacccagctggacagcttcttacagtgctggatgttaaacatgcctaaacgcttcatcataggcaccttcacggtggtcacctggtccacgtggaagtcctcttcctcggtgtccttgacttcaaagggtctctcccatttgcctggagagaggggaaggtgggcatcaccaggggtgagtgaaggtttggaagagtgtagcagaataagaaaccatgagtcccctccctgagaagccctgagcccccttgacgacacacatccctcgaggctcagcttcatcatctgtaaaaggtgctgaaactgacc

SEQ ID NO: 1380 - DNA, 712 bp, synthetic construct
  misc_feature 1..712: note = Description of Artificial Sequence: Synthetic oligonucleotide
  source 1..712: mol_type = other DNA
aattcgcccttgggcctaggcaattggatccgccggcagagaaaacatcccagggatttacagatcacatgcaggcagggaccagctcaacccttctttaatgtcatccagggagggggccagggatggaggggaggggttgaggagcgagaggcagttatttttgggtgggattcaccacttttcccatgaagaggggagacttggtattttgttcaatcattaagaagacaaagggtttgttgaacttgacctcgggggggatagacatgggtatggcctctaaaaacatggccccagcagcttcagtccctttctcgtcgatggtcagcacagccttatgcacggcctggaggggagagaagcagagacacgttgtaaggctgatcccaggcctcgagcaaggctcacgtggacacctcccaggaagcgctcactccccctggacggccctggccctgcacatcctctccctccctgtcacataggccttgctcctcctcaaggctttggctgatggggctggctcccctctgtccatcttcctgacaagcgcctctccccctgctcaggtgcacccacaactcagaacagggaagagcatcgtcactccacgtctgcctccagggctctctcctttctagtacacggcttgaagctccttgaggacacggaccctggcagtgaccttcacagtgcccagaccacgcgt

SEQ ID NO: 1381 - DNA, 2405 bp, synthetic construct
  misc_feature 1..2405: note = Description of Artificial Sequence: Synthetic oligonucleotide
  source 1..2405: mol_type = other DNA
aattcgcccttgggcctaggcaattggatccgccggcagagaaaacatcccagggatttacagatcacatgcaggcagggaccagctcaacccttctttaatgtcatccagggagggggccagggatggaggggaggggttgaggagcgagaggcagttatttttgggtgggattcaccacttttcccatgaagaggggagacttggtattttgttcaatcattaagaagacaaagggtttgttgaacttgacctcgggggggatagacatgggtatggcctctaaaaacatggccccagcagcttcagtccctttctcgtcgatggtcagcacagccttatgcacggcctggaggggagagaagcagagacacgttgtaaggctgatcccaggcctcgagcaaggctcacgtggacacctcccaggaagcgctcactccccctggacggccctggccctgcacatcctctccctccctgtcacataggccttgctcctcctcaaggctttggctgatggggctggctcccctctgtccatcttcctgacaagcgcctctccccctgctcaggtgcacccacaactcagaacagggaagagcatcgtcactccacgtctgcctccagggctctctcctttctagtacacggcttgaagctccttgaggacacggaccctggcagtgaccttcacagtgcccagaccccaagataatgcagccattcatggaactgcagttgttcattggtcgcctttagttttccaaaataagtgtcatctttagctgaaatcattcattaattcagacaccaaatctcacagatcgaaggagtcagaaattcctttgaaacaacttagcccaaacctttctgtgtcagtatggataaatcaaggcccaatgtctagaaggtcttgggcaaagttgaaattcagggtcagtgacacaacctcaagggaggccccgaaagtgccagctgcacagcagtcccctgcctggctttgctgtttgaccacgtcccgtgtcagtgaatcacgggcatcttcaggagctcagcctgggtcttcatttgtttccctcggccccttcctcagcctcaggacagagctgcagcccccacacattcttccctacagataccagggtgcaacaaggtcgtcagggtgatctcaccttggagagcttcaggggtgcctcctctgtgaccccggagaggtcagccccattgctgaagaccttagtgatgcccagttgacccaggacgctcttcagatcataggttccagtaatggacagtttgggtaaatgtaagctggcagacctgtcgtgcagaaaagaaattcaaggcatggcacagcattcctcttgttcttctgggacccaccacagtgcaagtgttttcttttctgattatttctgccacttactcctgtgtcctccacccacactaagatgggaactcggctttggtttgttctacttttagctcttctacattgagtcaaagaatgttaacatcgaatgaatcacaaaagcttgaaatgccacctcctctgatattctaggtgtcctggaagcctgtctcatcttgccctgtagtgttgggtcacctggcccccagcctgtaacatccccagggccctacacccagagaaacacggggctggtggcagtgcccagtgacaaccgtttagtggataagagaagagtgaccacaccaggctgagtgctcctctctggttttccatgggggagacaatgccaccctgagcagggtctggtgtgagcgggcagcttggctctgggctctctgatccgttaccctctcagcctctttgttctttctcaacccctggagcagagacctcaggaggtgctggcatggaacagagaaattccagcctcgattcctattatgaacccgacaccttttgtattttcatcttggttttacagtgtacaaaacgaactagatcagcagggcatgggcataatcacgaatgcacacacatacactaatgtgtggctcatgtttaagtatcacttactacaggacacccaatctaacagcaccgataaagtgacagagaaacgcaagccttctgcgaacatggcctggctgttccaattccgaaccttgcttttctgggccttgccacacaggctcttcccccgtccccccagggacattctacccttgaactccacactccactgctgcctttgccaggaagcccatctgttcctttttggttctgccagaacgtgtggtggtgctgctgtccctgccctgggcactggatattgggaagggacagtgtccacactggagtgggaagtccccagggacgagacctttacctcctcacccctgggtactgttctcctcatggagcatggacgcgt

SEQ ID NO: 1382 - DNA, 1203 bp, synthetic construct
  misc_feature 1..1203: note = Description of Artificial Sequence: Synthetic oligonucleotide
  source 1..1203: mol_type = other DNA
aattcgcccttgggcctaggcaattggatccgccggcagagaaaacatcccagggatttacagatcacatgcaggcagggaccagctcaacccttctttaatgtcatccagggagggggccagggatggaggggaggggttgaggagcgagaggcagttatttttgggtgggattcaccacttttcccatgaagaggggagacttggtattttgttcaatcattaagaagacaaagggtttgttgaacttgacctcgggggggatagacatgggtatggcctctaaaaacatggccccagcagcttcagtccctttctcgtcgatggtcagcacagccttatgcacggcctggaggggagagaagcagagacacgttgtaaggctgatcccaggcctcgagcaaggctcacgtggacacctcccaggaagcgctcactccccctggacggccctggccctgcacatcctctccctccctgtcacataggccttgctcctcctcaaggctttggctgatggggctggctcccctctgtccatcttcctgacaagcgcctctccccctgctcaggtgcacccacaactcagaacagggaagagcatcgtcactccacgtctgcctccagggctctctcctttctagtacacggcttgaagctccttgaggacacggaccctggcagtgaccttcacagtgcccagaccccaagataatgcagccattcatggaactgcagttgttcattggtcgcctttagttttccaaaataagtgtcatctttagctgaaatcattcattaattcagacaccaaatctcacagatcgaaggagtcagaaattcctttgaaacaacttagcccaaacctttctgtgtcagtatggataaatcaaggcccaatgtctagaaggtcttgggcaaagttgaaattcagggtcagtgacacaacctcaagggaggccccgaaagtgccagctgcacagcagtcccctgcctggctttgctgtttgaccacgtcccgtgtcagtgaatcacgggcatcttcaggagctcagcctgggtcttcatttgtttccctcggccccttcctcagcctcaggacagagctgcagcccccacacattcttccctacagataccagggtgcaacaaggtcgtcagggtgatctcaccttggagagcttcaggggtgcctccacgcgt

SEQ ID NO: 1383 - DNA, 103 bp, synthetic construct
  misc_feature 1..103: note = Description of Artificial Sequence: Synthetic oligonucleotide
  source 1..103: mol_type = other DNA
aattcgcccttgggcctaggcaattggatccgccggcagagaaaacatcccagggatttacagatcacatgcaggcagggaccagctcaacccttctacgcgt

SEQ ID NO: 1384 - DNA, 55 bp, synthetic construct
  misc_feature 1..55: note = Description of Artificial Sequence: Synthetic oligonucleotide
  source 1..55: mol_type = other DNA
aattcgcccttgggcctaggcaattggatccgccggcagagaaaacatcacgcgt

SEQ ID NO: 1385 - DNA, 1512 bp, synthetic construct
  misc_feature 1..1512: note = Description of Artificial Sequence: Synthetic oligonucleotide
  source 1..1512: mol_type = other DNA
cgcgtaattcgcccttgggcctaggcaattggatccgccggcagagaaaacatcccagggatttacagatcacatgcaggcagggaccagctcaacccttctttaatgtcatccagggagggggccagggatggaggggaggggttgaggagcgagaggcagttatttttgggtgggattcaccacttttcccatgaagaggggagacttggtattttgttcaatcattaagaagacaaagggtttgttgaacttgacctcgggggggatagacatgggtatggcctctaaaaacatggccccagcagcttcagtccctttctcgtcgatggtcagcacagccttatgcacggcctggaggggagagaagcagagacacgttgtaaggctgatcccaggcctcgagcaaggctcacgtggacacctcccaggaagcgctcactccccctggacggccctggccctgcacatcctctccctccctgtcacataggccttgctcctcctcaaggctttggctgatggggctggctcccctctgtccatcttcctgacaagcgcctctccccctgctcaggtgcacccacaactcagaacagggaagagcatcgtcactccacgtctgcctccagggctctctcctttctagtacacggcttgaagctccttgaggacacggaccctggcagtgaccttcacagtgcccagaccccaagataatgcagccattcatggaactgcagttgttcattggtcgcctttagttttccaaaataagtgtcatctttagctgaaatcattcattaattcagacaccaaatctcacagatcgaaggagtcagaaattcctttgaaacaacttagcccaaacctttctgtgtcagtatggataaatcaaggcccaatgtctagaaggtcttgggcaaagttgaaattcagggtcagtgacacaacctcaagggaggccccgaaagtgccagctgcacagcagtcccctgcctggctttgctgtttgaccacgtcccgtgtcagtgaatcacgggcatcttcaggagctcagcctgggtcttcatttgtttccctcggccccttcctcagcctcaggacagagctgcagcccccacacattcttccctacagataccatggtgcaacaaggtcgtcagggtgatctcaccttggagagcttcaggggtgcctcctctgtgaccccggagaggtcagccccattgctgaagaccttagtgatgcccagttgacccaggacgctcttcagatcataggttccagtaatggacagtttgggtaaatgtaagctggcagacctgtcgtgcagaaaagaaattcaaggcatggcacagcattcctcttgttcttctgggacccaccacagtgcaagtgttttcttttctgattatttctgccacttactcctgtgtcctccacccacactaagatgggaactcggctttggtttgttctacttttagctcttctacattgagtcaaaga

SEQ ID NO: 1386 - DNA, 363 bp, synthetic construct
  misc_feature 1..363: note = Description of Artificial Sequence: Synthetic oligonucleotide
  source 1..363: mol_type = other DNA
aattcgcccttgggcctaggcaattggatccgccggcagagaaaacatcccagggatttacagatcacatgcaggcagggaccagctcaacccttctttaatgtcatccagggagggggccagggatggaggggaggggttgaggagcgagaggcagttatttttgggtgggattcaccacttttcccatgaagaggggagacttggtattttgttcaatcattaagaagacaaagggtttgttgaacttgacctcgggggggatagacatgggtatggcctctaaaaacatggccccagcagcttcagtccctttctcgtcgatggtcagcacagccttatgcacggcctggagggacgcgt

SEQ ID NO: 1387 - DNA, 2395 bp, synthetic construct
  misc_feature 1..2395: note = Description of Artificial Sequence: Synthetic oligonucleotide
  source 1..2395: mol_type = other DNA
aattcgcccttgggcctaggcaattggatccgccggcagagaaaacatcccagggatttacagatcacatgcaggcagggaccagctcaacccttctttaatgtcatccagggagggggccagggatggaggggaggggttgaggagcgagaggcagttatttttgggtgggattcaccacttttcccatgaagaggggagacttggtattttgttcaatcattaagaagacaaagggtttgttgaacttgacctcgggggggatagacatgggtatggcctctaaaaacatggccccagcagcttcagtccctttctcgtcgatggtcagcacagccttatgcacggcctggaggggagagaagcagagacacgttgtaaggctgatcccaggcctcgagcaaggctcacgtggacacctcccaggaagcgctcactccccctggacggccctggccctgcacatcctctccctccctgtcacataggccttgctcctcctcaaggctttggctgatggggctggctcccctctgtccatcttcctgacaagcgcctctccccctgctcaggtgcacccacaactcagaacagggaagagcatcgtcactccacgtctgcctccagggctctctcctttctagtacacggcttgaagctccttgaggacacggaccctggcagtgaccttcacagtgcccagaccccaagataatgcagccattcatggaactgcaggttgttcattggtcgcctttagttttccaaaataagtgtcactttagctgaaatcattcattaattcagacaccaaatctcacagatcgaaggagtcagaaattcctttgaaacaacttagcccaaacctttctgtgtcagtatggataaatcaaggcccaatgtctagaaggtcttgggcaaagttgaaattcagggtcagtgacacaacctcaagggaggccccgaaagtgccagctgcacagcagcccctgcctggctttgctgtttgcccaccgtcccgtgtcagtgaatcacgggcatcttcaggagctcagcctgggtcttcatttgtttccctcggccccttcctcagcctcaggacagtgctgcagcccccacacattcttccctacagataccatggtgcaacaaggtcgtcagggtgatctcaccttggagagcttcaggggtgcctcctctgtgaccccggagaggtcagccccattgctgaagaccttagtgatgcccagttgacccaggacgctcttcagatcataggttccagtaatggacagtttgggtaaatgtaagctggcagacctgtcgtgcagaaaagaaattcaaggcatggcacagcattcctcttgttcttctgggacccaccacagtgcaagtgttttcttttctgattatttctgccacttactcctgtgtcctccacccacactaagatgggaactcggctttggtttgttctacttttagctcttctacattgagtcaaagaatgttaacatcgaatgaatcacaaaagcttgaaatgccacctcctctgatattctaggtgtcctggaagcctgtctcatcttgccctgtagtgttgggtcacctggcccccagcctgtaacatccccagggccctacacccagagaaacacggggctggtggcagtgcccagtgacaaccgtttagtggataagagaagagtgaccacaccaggctgagtgctcctctctggttttccatggggagacaatgccaccctgagcagggtctggtgtgagcggcagctggctctgggctctctgatccgttaccctctcagcctctttgttctttctcaacccctggagcagagacctcaggaggtgctggcatggaacagagaaattccagcctcgattcctattatgaacccgacaccttttgtattttcatcttggttttacagtgtacaaaacgaactagatcagcagggcatgggcataatcacgaatgcacacacatacactaatgtgtggctcatgtttaagtatcacttactacaggacacccaatctaacagcaccgataaagtgacagagaaacgcaagccttctgcgaacatggcctggctgttccaattccgaaccttgcttttctgggccttgccacacaggctcttcccccgtccccccagggacattctacccttgaactccacactccactgctgcctttgccaggaagcccatctgttcctttttggttctgccagaacgtgtggtggtgctgctgtccctgccttgggcactggatattgggaagggacagtgtccacactggagtgggaagttcccagggacgagacctttacctcctcaccctgggtactgttctcctcatggagcatgg

SEQ ID NO: 1388 - DNA, 97 bp, synthetic construct
  misc_feature 1..97: note = Description of Artificial Sequence: Synthetic oligonucleotide
  source 1..97: mol_type = other DNA
aattcgcccttgggcctaggcaattggatccgccggcagagaaaacatcccagggatttacagatcacatgcaggcagggaccagctcaacccttct

SEQ ID NO: 1389 - DNA, 714 bp, synthetic construct
  misc_feature 1..714: note = Description of Artificial Sequence: Synthetic oligonucleotide
  source 1..714: mol_type = other DNA
aattcgcccttgggcctaggcaattggatccgccggcagagaaaacatcccagggatttacagatcacatgcaggcagggaccagctcaacccttctttaatgtcatccagggagggggccagggatggaggggaggggttgaggagcgagaggcagttatttttgggtgggattcaccacttttcccatgaagaggggagacttggtattttgttcaatcattaagaagacaaagggtttgttgaacttgacctcgggggggatagacatgggtatggcctctaaaaacatggccccagcagcttcagtccctttctcgtcgatggtcagcacagccttatgcacggcctggaggggagagaagcagagacacgttgtaaggctgatcccaggcctcgagcaaggctcacgtggacacctcccaggaagcgctcactccccctggacggccctggccctgcacatcctctccctccctgtcacataggccttgctcctcctcaaggctttggctgatggggctggctcccctctgtccatcttcctgacaagcgcctctccccctgctcaggtgcacccacaactcagaacagggaagagcatcgtcactccacgtctgcctccagggctctctcctttctagtacacggcttgaagctccttgaggacacggaccctggcagtgaccttcacagtgcccagaccatttaaat

SEQ ID NO: 1390 - DNA, 3021 bp, synthetic construct
  misc_feature 1..3021: note = Description of Artificial Sequence: Synthetic oligonucleotide
  source 1..3021: mol_type = other DNA
aattcgcccttgggcctaggcaattggatccgccggcagagaaaacatcccagggatttacagatcacatgcaggcagggaccagctcaacccttctttaatgtcatccagggagggggccagggatggaggggaggggttgaggagcgagaggcagttatttttgggtgggattcaccacttttcccatgaagaggggagacttggtattttgttcaatcattaagaagacaaagggtttgttgaacttgacctcgggggggatagacatgggtatggcctctaaaaacatggccccagcagcttcagtccctttctcgtcgatggtcagcacagccttatgcacggcctggaggggagagaagcagagacacgttgtaaggctgatcccaggcctcgagcaaggctcacgtggacacctcccaggaagcgctcactccccctggacggccctggccctgcacatcctctccctccctgtcacataggccttgctcctcctcaaggctttggctgatggggctggctcccctctgtccatcttcctgacaagcgcctctccccctgctcaggtgcacccacaactcagaacagggaagagcatcgtcactccacgtctgcctccagggctctctcctttctagtacacggcttgaagctccttgaggacacggaccctggcagtgaccttcacagtgcccagaccccaagataatgcagccattcatggaactgcaggttgttcattggtcgcctttagttttccaaaataagtgtcactttagctgaaatcattcattaattcagacaccaaatctcacagatcgaaggagtcagaaattcctttgaaacaacttagcccaaacctttctgtgtcagtatggataaatcaaggcccaatgtctagaaggtcttgggcaaagttgaaattcagggtcagtgacacaacctcaagggaggccccgaaagtgccagctgcacagcagcccctgcctggctttgctgtttgcccaccgtcccgtgtcagtgaatcacgggcatcttcaggagctcagcctgggtcttcatttgtttccctcggccccttcctcagcctcaggacagtgctgcagcccccacacattcttccctacagataccatggtgcaacaaggtcgtcagggtgatctcaccttggagagcttcaggggtgcctcctctgtgaccccggagaggtcagccccattgctgaagaccttagtgatgcccagttgacccaggacgctcttcagatcataggttccagtaatggacagtttgggtaaatgtaagctggcagacctgtcgtgcagaaaagaaattcaaggcatggcacagcattcctcttgttcttctgggacccaccacagtgcaagtgttttcttttctgattatttctgccacttactcctgtgtcctccacccacactaagatgggaactcggctttggtttgttctacttttagctcttctacattgagtcaaagaatgttaacatcgaatgaatcacaaaagcttgaaatgccacctcctctgatattctaggtgtcctggaagcctgtctcatcttgccctgtagtgttgggtcacctggcccccagcctgtaacatccccagggccctacacccagagaaacacggggctggtggcagtgcccagtgacaaccgtttagtggataagagaagagtgaccacaccaggctgagtgctcctctctggttttccatggggagacaatgccaccctgagcagggtctggtgtgagcggcagctggctctgggctctctgatccgttaccctctcagcctctttgttctttctcaacccctggagcagagacctcaggaggtgctggcatggaacagagaaattccagcctcgattcctattatgaacccgacaccttttgtattttcatcttggttttacagtgtacaaaacgaactagatcagcagggcatgggcataatcacgaatgcacacacatacactaatgtgtggctcatgtttaagtatcacttactacaggacacccaatctaacagcaccgataaagtgacagagaaacgcaagccttctgcgaacatggcctggctgttccaattccgaaccttgcttttctgggccttgccacacaggctcttcccccgtccccccagggacattctacccttgaactccacactccactgctgcctttgccaggaagcccatctgttcctttttggttctgccagaacgtgtggtggtgctgctgtccctgccttgggcactggatattgggaagggacagtgtccacactggagtgggaagttcccagggacgagacctttacctcctcaccctgggtactgttctcctcatggagcatggacggcgctgcctgaactcagtggtggcctcattctggaagccaagtttatacagagtagcagtgacccagggatgtggggttcaccctcctcagccctctggccagtcctgatgggcctcagtcccaacatggctaagaggtgtgggcagcttcttggtcaccctcaggttggggaatcaccttctgtcttcattttccaggaacttggtgatgatatcgtgggtgagttcatttaccaggtgctgtagtttcccctcatcaggcaggaagaagatggcggtggcattgcccaggtatttcatcagcagcacccagctggacagcttcttacagtgctggatgttaaacatgcctaaacgcttcatcataggcaccttcacggtggtcacctggtccacgtggaagtcctcttcctcggtgtccttgacttcaaagggtctctcccatttgcctggagagaggggaaggtgggcatcaccaggggtgagtgaaggtttggaagagtgtagcagaataagaaaccatgagtcccctccctgagaagccctgagcccccttgacgacacacatccctcgaggctcagcttcatcatctgtaaaaggtgctgaaactgaccatttaaat

SEQ ID NO: 1391 - DNA, 1209 bp, synthetic construct
  misc_feature 1..1209: note = Description of Artificial Sequence: Synthetic oligonucleotide
  source 1..1209: mol_type = other DNA
tctgtgaccccggagaggtcagccccattgctgaagaccttagtgatgcccagttgacccaggacgctcttcagatcataggttccagtaatggacagtttgggtaaatgtaagctggcagacctgtcgtgcagaaaagaaattcaaggcatggcacagcattcctcttgttcttctgggacccaccacagtgcaagtgttttcttttctgattatttctgccacttactcctgtgtcctccacccacactaagatgggaactcggctttggtttgttctacttttagctcttctacattgagtcaaagaatgttaacatcgaatgaatcacaaaagcttgaaatgccacctcctctgatattctaggtgtcctggaagcctgtctcatcttgccctgtagtgttgggtcacctggcccccagcctgtaacatccccagggccctacacccagagaaacacggggctggtggcagtgcccagtgacaaccgtttagtggataagagaagagtgaccacaccaggctgagtgctcctctctggttttccatggggagacaatgccaccctgagcagggtctggtgtgagcgggcagcttggctctgggctctctgatccgttaccctctcagcctctttgttctttctcaacccctggagcagagacctcaggaggtgctggcatggaacagagaaattccagcctcgattcctattatgaacccgacaccttttgtattttcatcttggttttacagtgtacaaaacgaactagatcagcagggcatgggcataatcacgaatgcacacacatacactaatgtgtggctcatgtttaagtatcacttactacaggacacccaatctaacagcaccgataaagtgacagagaaacgcaagccttctgcgaacatggcctggctgttccaattccgaaccttgcttttctgggccttgccacacaggctcttcccccgtccccccagggacattctacccttgaactccacactccactgctgcctttgccaggaagcccatctgttcctttttggttctgccagaacgtgtggtggtgctgctgtccctgccctgggcactggatattgggaagggacagtgtccacactggagtgggaagtccccagggacgagacctttacctcctcacccctgggtactgttctcctcatggagcatggatttaaat

SEQ ID NO: 1392 - DNA, 56 bp, synthetic construct
  misc_feature 1..56: note = Description of Artificial Sequence: Synthetic oligonucleotide
  source 1..56: mol_type = other DNA
ccagggatttacagatcacatgcaggcagggaccagctcaactcttctatttaaat

SEQ ID NO: 1393 - DNA, 1519 bp, synthetic construct
  misc_feature 1..1519: note = Description of Artificial Sequence: Synthetic oligonucleotide
  source 1..1519: mol_type = other DNA
aatgttaacatcgaatgaatcacaaaagcttgaaatgccacctcctctgatattctaggtgtcctggaagcctgtctcatcttgccctgtagtgttgggtcacctggcccccagcctgtaacatccccagggccctacacccagagaaacacggggctggtggcagtgcccagtgacaaccgtttagtggataagagaagagtgaccacaccaggctgagtgctcctctctggttttccatggggagacaatgccaccctgagcagggtctggtgtgagcgggcagcttggctctgggctctctgatccgttaccctctcagcctctttgttctttctcaacccctggagcagagacctcaggaggtgctggcatggaacagagaaattccagcctcgattcctattatgaacccgacaccttttgtattttcatcttggttttacagtgtacaaaacgaactagatcagcagggcatgggcataatcacgaatgcacacacatacactaatgtgtggctcatgtttaagtatcacttactacaggacacccaatctaacagcaccgataaagtgacagagaaacgcaagccttctgcgaacatggcctggctgttccaattccgaaccttgcttttctgggccttgccacacaggctcttcccccgtccccccagggacattctacccttgaactccacactccactgctgcctttgccaggaagcccatctgttcctttttggttctgccagaacgtgtggtggtgctgctgtccctgccctgggcactggatattgggaagggacagtgtccacactggagtgggaagtccccagggacgagacctttacctcctcacccctgggtactgtcctcctcatggagcatggatggcgctgcctgaactcagtggtggcctcattctggaagccaagtttatacagagtagcagtgacccagggatgtggggttcaccctcctcagccctctggccagtcctgatgggcctcagtcccaacatggctaagaggtgtgggcagcttcttggtcaccctcaggttggggaatcaccttctgtcttcattttccaggaacttggtgatgatatcgtgggtgagttcattttccaggtgctgtagtttcccctcatcaggcaggaagaagatggcggtggcattgcccaggtatttcatcagcagcacccagctggacagcttcttacagtgctggatgttaaacatgcctaaacgcttcatcataggcaccttcacggtggtcacctggtccacgtggaagtcctcttcctcggtgtccttgacttcaaagggtctctcccatttgcctggagagaggggaaggtgggcatcaccaggggtgagtgaaggtttggaagagtgtagcagaataaagaaaccatgagtcccctccctgagaagccctgagcccccttgacgacacacatccctcgaggctcagcttcatcatctgtaaaaggtgctgaaactgaccatttaaat

SEQ ID NO: 1394 - DNA, 357 bp, synthetic construct
  misc_feature 1..357: note = Description of Artificial Sequence: Synthetic oligonucleotide
  source 1..357: mol_type = other DNA
gagagaagcagagacacgttgtaaggctgatcccaggcctcgagcaaggctcacgtggacacctcccaggaagcgctcactccccctggacggccctggccctgcacatcctctccctccctgtcacataggccttgctcctcctcaaggctttggctgatggggctggctcccctctgtccatcttcctgacaagcgcctctccccctgctcaggtgcacccacaactcagaacagggaagagcatcgtcactccacgtctgcctccagggctctctcctttctagtacacggcttgaagctccttgaggacacggaccctggcagtgaccttcacagtgcccagaccatttaaat

SEQ ID NO: 1395 - DNA, 2403 bp, synthetic construct
  misc_feature 1..2403: note = Description of Artificial Sequence: Synthetic oligonucleotide
  source 1..2403: mol_type = other DNA
aattcgcccttgggcctaggcaattggatccgccggcagagaaaacatcccagggatttacagatcacatgcaggcagggaccagctcaacccttctttaatgtcatccagggagggggccagggatggaggggaggggttgaggagcgagaggcagttatttttgggtgggattcaccacttttcccatgaagaggggagacttggtattttgttcaatcattaagaagacaaagggtttgttgaacttgacctcgggggggatagacatgggtatggcctctaaaaacatggccccagcagcttcagtccctttctcgtcgatggtcagcacagccttatgcacggcctggaggggagagaagcagagacacgttgtaaggctgatcccaggcctcgagcaaggctcacgtggacacctcccaggaagcgctcactccccctggacggccctggccctgcacatcctctccctccctgtcacataggccttgctcctcctcaaggctttggctgatggggctggctcccctctgtccatcttcctgacaagcgcctctccccctgctcaggtgcacccacaactcagaacagggaagagcatcgtcactccacgtctgcctccagggctctctcctttctagtacacggcttgaagctccttgaggacacggaccctggcagtgaccttcacagtgcccagaccccaagataatgcagccattcatggaactgcaggttgttcattggtcgcctttagttttccaaaataagtgtcactttagctgaaatcattcattaattcagacaccaaatctcacagatcgaaggagtcagaaattcctttgaaacaacttagcccaaacctttctgtgtcagtatggataaatcaaggcccaatgtctagaaggtcttgggcaaagttgaaattcagggtcagtgacacaacctcaagggaggccccgaaagtgccagctgcacagcagcccctgcctggctttgctgtttgcccaccgtcccgtgtcagtgaatcacgggcatcttcaggagctcagcctgggtcttcatttgtttccctcggccccttcctcagcctcaggacagtgctgcagcccccacacattcttccctacagataccatggtgcaacaaggtcgtcagggtgatctcaccttggagagcttcaggggtgcctcctctgtgaccccggagaggtcagccccattgctgaagaccttagtgatgcccagttgacccaggacgctcttcagatcataggttccagtaatggacagtttgggtaaatgtaagctggcagacctgtcgtgcagaaaagaaattcaaggcatggcacagcattcctcttgttcttctgggacccaccacagtgcaagtgttttcttttctgattatttctgccacttactcctgtgtcctccacccacactaagatgggaactcggctttggtttgttctacttttagctcttctacattgagtcaaagaatgttaacatcgaatgaatcacaaaagcttgaaatgccacctcctctgatattctaggtgtcctggaagcctgtctcatcttgccctgtagtgttgggtcacctggcccccagcctgtaacatccccagggccctacacccagagaaacacggggctggtggcagtgcccagtgacaaccgtttagtggataagagaagagtgaccacaccaggctgagtgctcctctctggttttccatggggagacaatgccaccctgagcagggtctggtgtgagcggcagctggctctgggctctctgatccgttaccctctcagcctctttgttctttctcaacccctggagcagagacctcaggaggtgctggcatggaacagagaaattccagcctcgattcctattatgaacccgacaccttttgtattttcatcttggttttacagtgtacaaaacgaactagatcagcagggcatgggcataatcacgaatgcacacacatacactaatgtgtggctcatgtttaagtatcacttactacaggacacccaatctaacagcaccgataaagtgacagagaaacgcaagccttctgcgaacatggcctggctgttccaattccgaaccttgcttttctgggccttgccacacaggctcttcccccgtccccccagggacattctacccttgaactccacactccactgctgcctttgccaggaagcccatctgttcctttttggttctgccagaacgtgtggtggtgctgctgtccctgccttgggcactggatattgggaagggacagtgtccacactggagtgggaagttcccagggacgagacctttacctcctcaccctgggtactgttctcctcatggagcatggatttaaat

SEQ ID NO: 1396 - DNA, 105 bp, synthetic construct
  misc_feature 1..105: note = Description of Artificial Sequence: Synthetic oligonucleotide
  source 1..105: mol_type = other DNA
aattcgcccttgggcctaggcaattggatccgccggcagagaaaacatcccagggatttacagatcacatgcaggcagggaccagctcaacccttctatttaaat

SEQ ID NO: 1397 - DNA, 382 bp, synthetic construct
  misc_feature 1..382: note = Description of Artificial Sequence: Synthetic oligonucleotide
  source 1..382: mol_type = other DNA
cgcgtcgacattgattattgactagttattaatagtaatcaattacggggtcattagttcatagcccatatatggagttccgcgttacataacttacggtaaatggcccgcctggctgaccgcccaacgacccccgcccattgacgtcaataatgacgtatgttcccatagtaacgccaatagggactttccattgacgtcaatgggtggagtatttacggtaaactgcccacttggcagtacatcaagtgtatcatatgccaagtacgccccctattgacgtcaatgacggtaaatggcccgcctggcattatgcccagtacatgaccttatgggactttcctacttggcagtacatctacgtattagtcatcgctattac

SEQ ID NO: 1398 - DNA, 303 bp, synthetic construct
  misc_feature 1..303: note = Description of Artificial Sequence: Synthetic oligonucleotide
  source 1..303: mol_type = other DNA
cgttacataacttacggtaaatggcccgcctggctgaccgcccaacgacccccgcccattgacgtcaataatgacgtatgttcccatagtaacgccaatagggactttccattgacgtcaatgggtggagtatttacggtaaactgcccacttggcagtacatcaagtgtatcatatgccaagtacgccccctattgacgtcaatgacggtaaatggcccgcctggcattatgcccagtacatgaccttatgggactttcctacttggcagtacatctagtattagtcatcgctattaccatg

SEQ ID NO: 1399 - DNA, 260 bp, synthetic construct
  misc_feature 1..260: note = Description of Artificial Sequence: Synthetic oligonucleotide
  source 1..260: mol_type = other DNA
ccacgttctgcttcactctccccatctcccccccctccccacccccaattttgtatttatttattttttaattattttgtgcagcgatgggggcggggggggggggcgcgcgccaggcggggcggggcggggcgaggggcggggcggggcgaggcggagaggtgcggcggcagccaatcagagcggcgcgctccgaaagtttccttttatggcgaggcggcggcggcggcggccctataaaaagcgaagcgcgcggcggg

SEQ ID NO: 1400 - DNA, 588 bp, synthetic construct
  misc_feature 1..588: note = Description of Artificial Sequence: Synthetic oligonucleotide
  source 1..588: mol_type = other DNA
gttgacattgattattgactagttattaatagtaatcaattacggggtcattagttcatagcccatatatggagttccgcgttacataacttacggtaaatggcccgcctggctgaccgcccaacgacccccgcccattgacgtcaataatgacgtatgttcccatagtaacgccaatagggactttccattgacgtcaatgggtggagtatttacggtaaactgcccacttggcagtacatcaagtgtatcatatgccaagtacgccccctattgacgtcaatgacggtaaatggcccgcctggcattatgcccagtacatgaccttatgggactttcctacttggcagtacatctacgtattagtcatcgctattaccatggtgatgcggttttggcagtacatcaatgggcgtggatagcggtttgactcacggggatttccaagtctccaccccattgacgtcaatgggagtttgttttggcaccaaaatcaacgggactttccaaaatgtcgtaacaactccgccccattgacgcaaatgggcggtaggcgtgtacggtgggaggtctatataagcagagctc

SEQ ID NO: 1401 - DNA, 204 bp, synthetic construct
  misc_feature 1..204: note = Description of Artificial Sequence: Synthetic oligonucleotide
  source 1..204: mol_type = other DNA
gtgatgcggttttggcagtacatcaatgggcgtggatagcggtttgactcacggggatttccaagtctccaccccattgacgtcaatgggagtttgttttggcaccaaaatcaacgggactttccaaaatgtcgtaacaactccgccccattgacgcaaatgggcggtaggcgtgtacggtgggaggtctatataagcagagct

SEQ ID NO: 1402 - DNA, 219 bp, synthetic construct
  misc_feature 1..219: note = Description of Artificial Sequence: Synthetic oligonucleotide
  source 1..219: mol_type = other DNA
aattcgaacgctgacgtcatcaacccgctccaaggaatcgcgggcccagtgtcactaggcgggaacacccagcgcgcgtgcgccctggcaggaagatggctgtgagggacagggagtggcgccctgcaatatttgcatgtcgctatgtgttctgggaaatcaccataaacgtgaaatgtctttggatttgggaatcttataagttctgtatgagaccac

SEQ ID NO: 1403 - DNA, 17 bp, synthetic construct
  misc_feature 1..17: note = Description of Artificial Sequence: Synthetic oligonucleotide
  source 1..17: mol_type = other DNA
taatacgactcactata

SEQ ID NO: 1404 - DNA, 134 bp, synthetic construct
  misc_feature 1..134: note = Description of Artificial Sequence: Synthetic oligonucleotide
  source 1..134: mol_type = other DNA
tcagatcgcctggagacgccatccacgctgttttgacctccatagaagacaccgggaccgatccagcctccgcggattcgaatcccggccgggaacggtgcattggaacgcggattccccgtgccaagagtgac

SEQ ID NO: 1405 - DNA, 53 bp, synthetic construct
  misc_feature 1..53: note = Description of Artificial Sequence: Synthetic oligonucleotide
  source 1..53: mol_type = other DNA
ctcctgggcaacgtgctggtctgtgtgctggcccatcactttggcaaagaatt

SEQ ID NO: 1406 - DNA, 172 bp, synthetic construct
  misc_feature 1..172: note = Description of Artificial Sequence: Synthetic oligonucleotide
  source 1..172: mol_type = other DNA
gaactgaaaaaccagaaagttaactggtaagtttagtctttttgtcttttatttcaggtcccggatccggtggtggtgcaaatcaaagaactgctcctcagtggatgttgcctttacttctaggcctgtacggaagtgttacttctgctctaaaagctgcggaattgtaccc

SEQ ID NO: 1407 - DNA, 32 bp, synthetic construct
  misc_feature 1..32: note = Description of Artificial Sequence: Synthetic oligonucleotide
  source 1..32: mol_type = other DNA
gtaagtaccgcctatagagtctataggcccac

SEQ ID NO: 1408 - DNA, 347 bp, synthetic construct
  misc_feature 1..347: note = Description of Artificial Sequence: Synthetic oligonucleotide
  source 1..347: mol_type = other DNA
aaaaaatgctttcttcttttaatatacttttttgtttatcttatttctaatactttccctaatctctttctttcagggcaataatgatacaatgtatcatgcctctttgcaccattctaaagaataacagtgataatttctgggttaaggcaatagcaatatttctgcatataaatatttctgcatataaattgtaactgatgtaagaggtttcatattgctaatagcagctacaatccagctaccattctgcttttattttatggttgggataaggctggattattctgagtccaagctaggcccttttgctaatcatgttcatacctcttatcttcctcccacag

SEQ ID NO: 1409 - DNA, 201 bp, synthetic construct
  misc_feature 1..201: note = Description of Artificial Sequence: Synthetic oligonucleotide
  source 1..201: mol_type = other DNA
gaactgaaaaaccagaaagttaactggtaagtttagtctttttgtcttttatttcaggtcccggatccggtggtggtgcaaatcaaagaactgctcctcagtggatgttgcctttacttctaggcctgtacggaagtgttacttctgctctaaaagctgcggaattgtacccgcggccgatccaccggtaaacttaagctt

SEQ ID NO: 1410 - DNA, 127 bp, synthetic construct
  misc_feature 1..127: note = Description of Artificial Sequence: Synthetic oligonucleotide
  source 1..127: mol_type = other DNA
gatctttttccctctgccaaaaattatggggacatcatgaagccccttgagcatctgacttctggctaataaaggaaatttattttcattgcaatagtgtgttggaattttttgtgtctctcactcg

SEQ ID NO: 1411 - DNA, 225 bp, synthetic construct
  misc_feature 1..225: note = Description of Artificial Sequence: Synthetic oligonucleotide
  source 1..225: mol_type = other DNA
ctgtgccttctagttgccagccatctgttgtttgcccctcccccgtgccttccttgaccctggaaggtgccactcccactgtcctttcctaataaaatgaggaaattgcatcgcattgtctgagtaggtgtcattctattctggggggtggggtggggcaggacagcaagggggaggattgggaagacaatagcaggcatgctggggatgcggtgggctctatgg

SEQ ID NO: 1412 - DNA, 477 bp, synthetic construct
  misc_feature 1..477: note = Description of Artificial Sequence: Synthetic oligonucleotide
  source 1..477: mol_type = other DNA
gggtggcatccctgtgacccctccccagtgcctctcctggccctggaagttgccactccagtgcccaccagccttgtcctaataaaattaagttgcatcattttgtctgactaggtgtccttctataatattatggggtggaggggggtggtatggagcaaggggcaagttgggaagacaacctgtagggcctgcggggtctattgggaaccaagctggagtgcagtggcacaatcttggctcactgcaatctccgcctcctgggttcaagcgattctcctgcctcagcctcccgagttgttgggattccaggcatgcatgaccaggctcagctaatttttgtttttttggtagagacggggtttcaccatattggccaggctggtctccaactcctaatctcaggtgatctacccaccttggcctcccaaattgctgggattacaggcgtgaaccactgctcccttccctgtcctt

SEQ ID NO: 1413 - DNA, 476 bp, synthetic construct
  misc_feature 1..476: note = Description of Artificial Sequence: Synthetic oligonucleotide
  source 1..476: mol_type = other DNA
gggtggcatccctgtgacccctccccagtgcctctcctggccctggaagttgccactccagtgcccaccagccttgtcctaataaaattaagttgcatcattttgtctgactaggtgtccttctataatattatggggtggaggggggtggtatggagcaaggggcaagttgggaagacaacctgtagggcctgcggggtctattgggaaccaagctggagtgcagtggcacaatcttggctcactgcaatctccgcctcctgggttcaagcgattctcctgcctcagcctcccgagttgttgggattccaggcatgcatgaccaggctcagctaatttttgtttttttggtagagacggggtttcaccatattggccaggctggtctccaactcctaatctcaggtgatctacccaccttggcctcccaaattgctgggattacaggcgtgaaccactgctcccttccctgtcct

SEQ ID NO: 1414 - DNA, 1975 bp, synthetic construct
  misc_feature 1..1975: note = Description of Artificial Sequence: Synthetic polynucleotide
  source 1..1975: mol_type = other DNA
ctgcgcgctcgctcgctcactgaggccgcccgggcaaagcccgggcgtcgggcgacctttggtcgcccggcctcagtgagcgagcgagcgcgcagagagggagtgtagccatgctctaggaagatcaattcaattcacgcgtcgacattgattattgactagttattaatagtaatcaattacggggtcattagttcatagcccatatatggagttccgcgttacataacttacggtaaatggcccgcctggctgaccgcccaacgacccccgcccattgacgtcaataatgacgtatgttcccatagtaacgccaatagggactttccattgacgtcaatgggtggagtatttacggtaaactgcccacttggcagtacatcaagtgtatcatatgccaagtacgccccctattgacgtcaatgacggtaaatggcccgcctggcattatgcccagtacatgaccttatgggactttcctacttggcagtacatctacgtattagtcatcgctattaccatgtcgaggccacgttctgcttcactctccccatctcccccccctccccacccccaattttgtatttatttattttttaattattttgtgcagcgatgggggcggggggggggggcgcgcgccaggcggggcggggcggggcgaggggcggggcggggcgaggcggagaggtgcggcggcagccaatcagagcggcgcgctccgaaagtttccttttatggcgaggcggcggcggcggcggccctataaaaagcgaagcgcgcggcgggcgggagcaagcttgcctggagacgccatccacgctgttttgacctccatagaagacaccgggaccgatccagcctccgcggattcgaatcccggccgggaacggtgcattggaacgcggattccccgtgccaagagtgacgtaagtaccgcctatagagtctataggcccacaaaaaatgctttcttcttttaatatacttttttgtttatcttatttctaatactttccctaatctctttctttcagggcaataatgatacaatgtatcatgcctctttgcaccattctaaagaataacagtgataatttctgggttaaggcaatagcaatatttctgcatataaatatttctgcatataaattgtaactgatgtaagaggtttcatattgctaatagcagctacaatccagctaccattctgcttttattttatggttgggataaggctggattattctgagtccaagctaggcccttttgctaatcatgttcatacctcttatcttcctcccacagctcctgggcaacgtgctggtctgtgtgctggcccatcactttggcaaagaattgggattcgaacatcgaccggtgaagcaaagaaggggcagagggagcccgtgagctgagtgggccagggactgggagaaggagtgaggaggcagggccggcatgcctctgctgctggccagaccccttaactcatttgttcccgtctgcacctgtcactagtaacagatgagttaaggggtttggccgtgtagtgctacccagcgctggctgcctcctcagcattgcaattcctctcccatctgggcaccagtcagctaccctggtgggaatctgggtagccctcgaggacggggtgaactacgcctgaggatccgatctttttccctctgccaaaaattatggggacatcatgaagccccttgagcatctgacttctggctaataaaggaaatttattttcattgcaatagtgtgttggaattttttgtgtctctcactcggcctaggtagataagtagcatggcgggttaatcattaactacaaggaacccctagtgatggagttggccactccctctctgcgcgctcgctcgctcactgaggccgggcgaccaaaggtcgcccgacgcccgggctttgcccgggcggcctcagtgagcgagcgagcgcgcag

SEQ ID NO: 1415 - DNA, 1900 bp, synthetic construct
  misc_feature 1..1900: note = Description of Artificial Sequence: Synthetic polynucleotide
  source 1..1900: mol_type = other DNA
ctgcgcgctcgctcgctcactgaggccgcccgggcaaagcccgggcgtcgggcgacctttggtcgcccggcctcagtgagcgagcgagcgcgcagagagggagtgtagccatgctctaggaagatcaattcaattcacgcgtatatctagactagttattaatagtaatcaattacggggtcattagttcatagcccatatatggagttccgcgttacataacttacggtaaatggcccgcctggctgaccgcccaacgacccccgcccattgacgtcaataatgacgtatgttcccatagtaacgtcaatagggactttccattgacgtcaatgggtggagtatttacggtaaactgcccacttggcagtacatcaagtgtatcatatgccaagtacgccccctattgacgtcaatgacggtaaatggcccgcctggcattatgcccagtacatgaccttatgggactttcctacttggcagtacatctacgtattagtcatcgctattaccatggtgatgcggttttggcagtacatcaatgggcgtggatagcggtttgactcacggggatttccaagtctccaccccattgacgtcaatgggagtttgttttgcaccaaaatcaacgggactttccaaaatgtcgtaacaactccgccccattgacgcaaatgggcggtaggcgtgtacggtgggaggtctatataagcagagctcgtttagtgaaccgtcagatcgcctggagacgccatccacgctgttttgacctccatagaagacaccgggaccgatccagcctccgcggattcgaatcccggccgggaacggtgcattggaacgcggattccccgtgccaagagtgacgtaagtaccgcctatagagtctataggcccacaaaaaatgctttcttcttttaatatacttttttgtttatcttatttctaatactttccctaatctctttctttcagggcaataatgatacaatgtatcatgcctctttgcaccattctaaagaataacagtgataatttctgggttaaggcaatagcaatatttctgcatataaatatttctgcatataaattgtaactgatgtaagaggtttcatattgctaatagcagctacaatccagctaccattctgcttttattttatggttgggataaggctggattattctgagtccaagctaggcccttttgctaatcatgttcatacctcttatcttcctcccacagctcctgggcaacgtgctggtctgtgtgctggcccatcactttggcaaagaattggaccggtgaagcaaagaaggggcagagggagcccgtgagctgagtgggccagggactgggagaaggagtgaggaggcagggccggcatgcctctgctgctggccagaccccttaactcatttgttcccgtctgcacctgtcactagtaacagatgagttaaggggtttggccgtgtagtgctacccagcgctggctgcctcctcagcattgcaattcctctcccatctgggcaccagtcagctaccctggtgggaatctgggtagccctcgaggacggggtgaactacgcctgaggatccgatctttttccctctgccaaaaattatggggacatcatgaagccccttgagcatctgacttctggctaataaaggaaatttattttcattgcaatagtgtgttggaattttttgtgtctctcactcggcctaggtagataagtagcatggcgggttaatcattaactacaaggaacccctagtgatggagttggccactccctctctgcgcgctcgctcgctcactgaggccgggcgaccaaaggtcgcccgacgcccgggctttgcccgggcggcctcagtgagcgagcgagcgcgcag

SEQ ID NO: 1416 - DNA, 1881 bp, synthetic construct
  misc_feature 1..1881: note = Description of Artificial Sequence: Synthetic polynucleotide
  source 1..1881: mol_type = other DNA
ctgcgcgctcgctcgctcactgaggccgcccgggcaaagcccgggcgtcgggcgacctttggtcgcccggcctcagtgagcgagcgagcgcgcagagagggagtgtagccatgctctaggaagatcaattcaattcacgcgtcgacattgattattgactagttattaatagtaatcaattacggggtcattagttcatagcccatatatggagttccgcgttacataacttacggtaaatggcccgcctggctgaccgcccaacgacccccgcccattgacgtcaataatgacgtatgttcccatagtaacgccaatagggactttccattgacgtcaatgggtggagtatttacggtaaactgcccacttggcagtacatcaagtgtatcatatgccaagtacgccccctattgacgtcaatgacggtaaatggcccgcctggcattatgcccagtacatgaccttatgggactttcctacttggcagtacatctacgtattagtcatcgctattaccatgtcgaggccacgttctgcttcactctccccatctcccccccctccccacccccaattttgtatttatttattttttaattattttgtgcagcgatgggggcggggggggggggcgcgcgccaggcggggcggggcggggcgaggggcggggcggggcgaggcggagaggtgcggcggcagccaatcagagcggcgcgctccgaaagtttccttttatggcgaggcggcggcggcggcggccctataaaaagcgaagcgcgcggcgggcgggagcaagcttgcctggagacgccatccacgctgttttgacctccatagaagacaccgggaccgatccagcctccgcggattcgaatcccggccgggaacggtgcattggaacgcggattccccgtgccaagagtgacgtaagtaccgcctatagagtctataggcccacaaaaaatgctttcttcttttaatatacttttttgtttatcttatttctaatactttccctaatctctttctttcagggcaataatgatacaatgtatcatgcctctttgcaccattctaaagaataacagtgataatttctgggttaaggcaatagcaatatttctgcatataaatatttctgcatataaattgtaactgatgtaagaggtttcatattgctaatagcagctacaatccagctaccattctgcttttattttatggttgggataaggctggattattctgagtccaagctaggcccttttgctaatcatgttcatacctcttatcttcctcccacagctcctgggcaacgtgctggtctgtgtgctggcccatcactttggcaaagaattgggattcgaacatcgaccggtaccgagctgtgctgggcggggggcggcgggccctcccgcagaacaccatgcgctcttcggaacccttaactgatctgttaacctgtgacctggttaacagatgagttaagggttctgtggagcgccttgacagcagccatgggagggccgccccctacctcagtgactcgaggacggggtgaactacgcctgaggatccgatctttttccctctgccaaaaattatggggacatcatgaagccccttgagcatctgacttctggctaataaaggaaatttattttcattgcaatagtgtgttggaattttttgtgtctctcactcggcctaggtagataagtagcatggcgggttaatcattaactacaaggaacccctagtgatggagttggccactccctctctgcgcgctcgctcgctcactgaggccgggcgaccaaaggtcgcccgacgcccgggctttgcccgggcggcctcagtgagcgagcgagcgcgcag

SEQ ID NO: 1417 - DNA, 1805 bp, synthetic construct
  misc_feature 1..1805: note = Description of Artificial Sequence: Synthetic polynucleotide
  source 1..1805: mol_type = other DNA
ctgcgcgctcgctcgctcactgaggccgcccgggcaaagcccgggcgtcgggcgacctttggtcgcccggcctcagtgagcgagcgagcgcgcagagagggagtgtagccatgctctaggaagatcaattcaattcacgcgtaccgagctctagttattaatagtaatcaattacggggtcattagttcatagcccatatatggagttccgcgttacataacttacggtaaatggcccgcctggctgaccgcccaacgacccccgcccattgacgtcaataatgacgtatgttcccatagtaacgtcaatagggactttccattgacgtcaatgggtggagtatttacggtaaactgcccacttggcagtacatcaagtgtatcatatgccaagtacgccccctattgacgtcaatgacggtaaatggcccgcctggcattatgcccagtacatgaccttatgggactttcctacttggcagtacatctacgtattagtcatcgctattaccatggtgatgcggttttggcagtacatcaatgggcgtggatagcggtttgactcacggggatttccaagtctccaccccattgacgtcaatgggagtttgttttgcaccaaaatcaacgggactttccaaaatgtcgtaacaactccgccccattgacgcaaatgggcggtaggcgtgtacggtgggaggtctatataagcagagctcgtttagtgaaccgtcagatcgcctggagacgccatccacgctgttttgacctccatagaagacaccgggaccgatccagcctccgcggattcgaatcccggccgggaacggtgcattggaacgcggattccccgtgccaagagtgacgtaagtaccgcctatagagtctataggcccacaaaaaatgctttcttcttttaatatacttttttgtttatcttatttctaatactttccctaatctctttctttcagggcaataatgatacaatgtatcatgcctctttgcaccattctaaagaataacagtgataatttctgggttaaggcaatagcaatatttctgcatataaatatttctgcatataaattgtaactgatgtaagaggtttcatattgctaatagcagctacaatccagctaccattctgcttttattttatggttgggataaggctggattattctgagtccaagctaggcccttttgctaatcatgttcatacctcttatcttcctcccacagctcctgggcaacgtgctggtctgtgtgctggcccatcactttggcaaagaattggaccggtaccgagctgtgctgggcggggggcggcgggccctcccgcagaacaccatgcgctcttcggaacccttaactgatctgttaacctgtgacctggttaacagatgagttaagggttctgtggagcgccttgacagcagccatgggagggccgccccctacctcagtgactcgaggacggggtgaactacgcctgaggatccgatctttttccctctgccaaaaattatggggacatcatgaagccccttgagcatctgacttctggctaataaaggaaatttattttcattgcaatagtgtgttggaattttttgtgtctctcactcggcctaggtagataagtagcatggcgggttaatcattaactacaaggaacccctagtgatggagttggccactccctctctgcgcgctcgctcgctcactgaggccgggcgaccaaaggtcgcccgacgcccgggctttgcccgggcggcctcagtgagcgagcgagcgcgcag

SEQ ID NO: 1418 - protein, 743 aa, synthetic construct
  REGION 1..743: note = Description of Artificial Sequence: Synthetic polypeptide
MAADGYLPDWLEDNLSEGIREWWALKPGAPQPKANQQHQDNARGLVLPGYKYLGPGNGLDKGEPVNAADAAALEHDKAYDQQLKAGDNPYLKYNHADAEFQERLKEDTSFGGNLGRAVFQAKKRLLEPLGLVEEAAKTAPGKKRPVEQSPQEPDSSAGIGKSGAQPAKKRLNFGQTGDTESVPDPQPIGEPPAAPSGVGSLTMASGGGAPVADNNEGADGVGSSSGNWHCDSQWLGDRVITTSTRTWALPTYNNHLYKQISNSTSGGSSNDNAYFGYSTPWGYFDFNRFHCHFSPRDWQRLINNNWGFRPKRLNFKLFNIQVKEVTDNNGVKTIANNLTSTVQVFTDSDYQLPYVLGSAHEGCLPPFPADVFMIPQYGYLTLNDGSQAVGRSSFYCLEYFPSQMLRTGNNFQFSYEFENVPFHSSYAHSQSLDRLMNPLIDQYLYYLSRTINGSGQNQQTLKFSVAGPSNMAVQGRNYIPGPSYRQQRVSTTVTQNNNSEFAWPGASSWALNGRNSLMNPGPAMASHKEGEDRFFPLSGSLIFGKQGTGRDNVDADKVMITNEEEIKTTNPVATESYGQVATNHQSDGTLAVPFKAQAQTGWVQNQGILPGMVWQDRDVYLQGPIWAKIPHTDGNFHPSPLMGGFGMKHPPPQILIKNTPVPADPPTAFNKDKLNSFITQYSTGQVSVEIEWELQKENSKRWNPEIQYTSNYYKSNNVEFAVNTEGVYSEPRPIGTRYLTRNL

SEQ ID NO: 1419 - protein, 743 aa, synthetic construct
  REGION 1..743: note = Description of Artificial Sequence: Synthetic polypeptide
MAADGYLPDWLEDNLSEGIREWWALKPGAPQPKANQQHQDNARGLVLPGYKYLGPGNGLDKGEPVNAADAAALEHDKAYDQQLKAGDNPYLKYNHADAEFQERLKEDTSFGGNLGRAVFQAKKRLLEPLGLVEEAAKTAPGKKRPVEQSPQEPDSSAGIGKSGAQPAKKRLNFGQTGDTESVPDPQPIGEPPAAPSGVGSLTMASGGGAPVADNNEGADGVGSSSGNWHCDSQWLGDRVITTSTRTWALPTYNNHLYKQISNSTSGGSSNDNAYFGYSTPWGYFDFNRFHCHFSPRDWQRLINNNWGFRPKRLNFKLFNIQVKEVTDNNGVKTIANNLTSTVQVFTDSDYQLPYVLGSAHEGCLPPFPADVFMIPQYGYLTLNDGSQAVGRSSFYCLEYFPSQMLRTGNNFQFSYEFENVPFHSSYAHSQSLDRLMNPLIDQYLYYLSRTINGSGQNQQTLKFSVAGPSNMAVQGRNYIPGPSYRQQRVSTTVTQNNNSEFAWPGASSWALNGRNSLMNPGPAMASHKEGEDRFFPLSGSLIFGKQGTGRDNVDADKVMITNEEEIKTTNPVATESYGQVATNHQSAQQAVRTSLAQAQTGWVQNQGILPGMVWQDRDVYLQGPIWAKIPHTDGNFHPSPLMGGFGMKHPPPQILIKNTPVPADPPTAFNKDKLNSFITQYSTGQVSVEIEWELQKENSKRWNPEIQYTSNYYKSNNVEFAVNTEGVYSEPRPIGTRYLTRNL

SEQ ID NO: 1420 - protein, 736 aa, synthetic construct
  REGION 1..736: note = Description of Artificial Sequence: Synthetic polypeptide
MAADGYLPDWLEDNLSEGIREWWALKPGAPQPKANQQHQDNARGLVLPGYKYLGPGNGLDKGEPVNAADAAALEHDKAYDQQLKAGDNPYLKYNHADAEFQERLKEDTSFGGNLGRAVFQAKKRLLEPLGLVEEAAKTAPGKKRPVEQSPQEPDSSAGIGKSGAQPAKKRLNFGQTGDTESVPDPQPIGEPPAAPSGVGSLTMASGGGAPVADNNEGADGVGSSSGNWHCDSQWLGDRVITTSTRTWALPTYNNHLYKQISNSTSGGSSNDNAYFGYSTPWGYFDFNRFHCHFSPRDWQRLINNNWGFRPKRLNFKLFNIQVKEVTDNNGVKTIANNLTSTVQVFTDSDYQLPYVLGSAHEGCLPPFPADVFMIPQYGYLTLNDGSQAVGRSSFYCLEYFPSQMLRTGNNFQFSYEFENVPFHSSYAHSQSLDRLMNPLIDQYLYYLSRTINGSGQNQQTLKFSVAGPSNMAVQGRNYIPGPSYRQQRVSTTVTQNNNSEFAWPGASSWALNGRNSLMNPGPAMASHKEGEDRFFPLSGSLIFGKQGTGRDNVDADKVMITNEEEIKTTNPVATESYGQVATNHQSAQAQAQTGWVQNQGILPGMVWQDRDVYLQGPIWAKIPHTDGNFHPSPLMGGFGMKHPPPQILIKNTPVPADPPTAFNKDKLNSFITQYSTGQVSVEIEWELQKENSKRWNPEIQYTSNYYKSNNVEFAVNTEGVYSEPRPIGTRYLTRNL

SEQ ID NO: 1421 - protein, 534 aa, synthetic construct
  REGION 1..534: note = Description of Artificial Sequence: Synthetic polypeptide
MAEGGGGAMGDSSGGADGVGNASGNWHCDSQWMGNTVITKTTRTWVLPSYNNHIYKAITSGTSQDANVQYAGYSTPWGYFDFNRFHCHFSPRDWQRLINNHWGIRPKSLKFKIFNVQVKEVTTQDQTKTIANNLTSTIQVFTDDEHQLPYVLGSATEGTMPPFPSDVYALPQYGYCTMHTNQNGARFNDRSAFYCLEYFPSQMLRTGNNFEFTFDFEEVPFHSMFAHSQDLDRLMNPLVDQYLWNFNEVDSSRNAQFKKAVKGAYGTMGRNWLPGPKFLDQRVRAYTGGTDNYANWNIWSNGNKVNLKDRQYLLQPGPVSATYTEGEASSLPAQNILGIAKDPYRSGSTTAGISDIMVTEEQEVAPTNGVGWKPYGRTVTNEQNTTTAPTSSDLDVLGALPGMVWQNRDIYLQGPIGAKIPKTDGKFHPSPNLGGFGLHNPPPQVFIKNTPVPADPPVEYVHQKWNSYITQYSTGQCTVEMVWELRKENSKRWNPEIQFTSNFSNRTSIMFAPNETGGYVEDRLIGTRYLTQNL

SEQ ID NO: 1422 - protein, 554 aa, synthetic construct
  REGION 1..554: note = Description of Artificial Sequence: Synthetic polypeptide
MTSVNSAEASTGAGGGGSNPVKSMWSEGATFSANSVTCTFSRQFLIPYDPEHHYKVFSPAASSCHNASGKEAKVCTISPIMGYSTPWRYLDFNALNLFFSPLEFQHLIENYGSIAPDALTVTISEIAVKDVTDKTGGGVQVTDSTTGRLCMLVDHEYKYPYVLGQGQDTLAPELPIWVYFPPQYAYLTVGDVNTQGISGDSKKLASEESAFYVLEHSSFQLLGTGGTATMSYKFPPVPPENLEGCSQHFYEMYNPLYGSRLGVPDTLGGDPKFRSLTHEDHAIQPQNFMPGPLVNSVSTKEGDSFNTGAGKALTGLSTGTSQNTRISLRPGPVSQPYHHWDTDKYVTGINAISHGQTTYGNAEDKEYQQGVGRFPNEKEQLKQLQGLNMHTYFPNKGTQQYTDQIERPLMVGSVWNRRALHYESQLWSKIPNLDDSFKTQFAALGGWGLHQPPPQIFLKILPQSGPIGGIKSMGITTLVQYAVGIMTVTMTFKLGPRKATGRWNPQPGVYPPHAAGHLPYVLYDPTATDAKQHHRHGYEKPEELWTAKSRVHPL

SEQ ID NO: 1423 - protein, 587 aa, synthetic construct
  REGION 1..587: note = Description of Artificial Sequence: Synthetic polypeptide
MSDGTSQPDGGNAVHSAARVERAADGPGGSGGGGSGGGGVGVSTGSYDNQTHYRFLGDGWVEITALATRLVHLNMPKSENYCRIRVHNTTDTSVKGNMAKDDAHEQIWTPWSLVDANAWGVWLQPSDWQYICNTMSQLNLVSLDQEIFNVVLKTVTEQDSGGQAIKIYNNDLTACMMVAVDSNNILPYTPAANSMETLGFYPWKPTIASPYRYYFCVDRDLSVTYENQEGTIEHNVMGTPKGMNSQFFTIENTQQITLLRTGDEFATGTYYFDTNPVKLTHTWQTNRQLGQPPLLSTFPEADTDAGTLTAQGSRHGATQMEVNWVSEAIRTRPAQVGFCQPHNDFEASRAGPFAAPKVPADVTQGMDREANGSVRYSYGKQHGENWAAHGPAPERYTWDETNFGSGRDTRDGFIQSAPLVVPPPLNGILTNANPIGTKNDIHFSNVFNSYGPLTTFSHPSPVYPQGQIWDKELDLEHKPRLHITAPFVCKNNAPGQMLVRLGPNLTDQYDPNGATLSRIVTYGTFFWKGKLTMRAKLRANTTWNPVYQVSVEDNGNSYMSVTKWLPTATGNMQSVPLITRPVARNTY

SEQ ID NO: 1424 - protein, 584 aa, synthetic construct
  REGION 1..584: note = Description of Artificial Sequence: Synthetic polypeptide
MSDGAVQPDGGQPAVRNERATGSGNGSGGGGGGGSGGVGISTGTFNNQTEFKFLENGWVEITANSSRLVHLNMPESENYKRVVVNNMDKTAVKGNMALDDIHVEIVTPWSLVDANAWGVWFNPGDWQLIVNTMSELHLVSFEQEIFNVVLKTVSESATQPPTKVYNNDLTASLMVALDSNNTMPFTPAAMRSETLGFYPWKPTIPTPWRYYFQWDRTLIPSHTGTSGTPTNVYHGTDPDDVQFYTIENSVPVHLLRTGDEFATGTFFFDCKPCRLTHTWQTNRALGLPPFLNSLPQSEGATNFGDIGVQQDKRRGVTQMGNTDYITEATIMRPAEVGYSAPYYSFEASTQGPFKTPIAAGRGGAQTDENQAADGDPRYAFGRQHGQKTTTTGETPERFTYIAHQDTGRYPEGDWIQNINFNLPVTNDNVLLPTDPIGGKTGINYTNIFNTYGPLTALNNVPPVYPNGQIWDKEFDTDLKPRLHINAPFVCQNNCPGQLFVKVAPNLTNQYDPDASANMSRIVTYSDFWWKGKLVFKAKLRASHTWNPIQQMSINVDNQFNYVPNNIGAMKIVYEKSQLAPRKLY

SEQ ID NO: 1425 - protein, 548 aa, synthetic construct
  REGION 1..548: note = Description of Artificial Sequence: Synthetic polypeptide
GVGISTGTFNNQTEFKFLENGWVEITANSSRLVHLNMPESENYRRVVVNNMDKTAVNGNMALDDIHAQIVTPWSLVDANAWGVWFNPGDWQLIVNTMSELHLVSFEQEIFNVVLKTVSESATQPPTKVYNNDLTASLMVALDSNNTMPFTPAAMRSETLGFYPWKPTIPTPWRYYFQWDRTLIPSHTGTSGTPTNIYHGTDPDDVQFYTIENSVPVHLLRTGDEFATGTFFFDCKPCRLTHTWQTNRALGLPPFLNSLPQSEGATNFGDIGVQQDKRRGVTQMGNTNYITEATIMRPAEVGYSAPYYSFEASTQGPFKTPIAAGRGGAQTDENQAADGNPRYAFGRQHGQKTTTTGETPERFTYIAHQDTGRYPEGDWIQNINFNLPVTNDNVLLPTDPIGGKTGINYTNIFNTYGPLTALNNVPPVYPNGQIWDKEFDTDLKPRLHVNAPFVCQNNCPGQLFVKVAPNLTNEYDPDASANMSRIVTYSDFWWKGKLVFKAKLRASHTWNPIQQMSINVDNQFNYVPSNIGGMKIVYEKSQLAPRKLY

SEQ ID NO: 1426 - protein, 736 aa, synthetic construct; identical to SEQ ID NO: 101
  REGION 1..736: note = Description of Artificial Sequence: Synthetic polypeptide

SEQ ID NO: 1427 - protein, 736 aa, synthetic construct; identical to SEQ ID NO: 96
  REGION 1..736: note = Description of Artificial Sequence: Synthetic polypeptide

SEQ ID NO: 1428 - protein, 736 aa, synthetic construct
  REGION 1..736: note = Description of Artificial Sequence: Synthetic polypeptide
MAADGYLPDWLEDTLSEGIRQWWKLKPGPPPPKPAERHKDDSRGLVLPGYKYLGPFNGLDKGEPVNEADAAALEHDKAYDRQLDSGDNPYLKYNHADAEFQERLKEDTSFGGNLGRAVFQAKKRVLEPLGLVEEPVKTAPGKKRPVEHSPVEEPDSSSGTGKAGQQPARKRLNFGQTGDADSVPDPQPLGQPPAAPSGLGTNTMATGSGAPMADNNEGADGVGNSSGNWHCDSTWMGDRVITTSTRTWALPTYNNHLYKQISSQSGASNDNHYFGYSTPWGYFDFNRFHCHFSPRDWQRLINNNWGFRPKRLNFKLFNIQVKEVTQNDGTTTIANNLTSTVQVFTDSEYQLPYVLGSAHQGCLPPFPADVFMVPQYGYLTLNNGSQAVGRSSFYCLEYFPSQMLRTGNNFTFSYTFEDVPFHSSYAHSQSLDRLMNPLIDQYLYYLSRTNTPSGTTTQSRLQFSQAGASDIRDQSRNWLPGPCYRQQRVSKTSADNNNSEYSWTGATKYHLNGRDSLVNPGPAMASHKDDEEKFFPQSGVLIFGKQGSEKTNVDIEKVMITDEEEIRTTNPVATEQYGSVSTNLQRGNRQAATADVNTQGVLPGMVWQDRDVYLQGPIWAKIPHTDGHFHPSPLMGGFGLKHPPPQILIKNTPVPANPSTTFSAAKFASFITQYSTGQVSVEIEWELQKENSKRWNPEIQYTSNYNKSVNVDFTVDTNGVYSEPRPIGTRYLTRNL

SEQ ID NO: 1429 - protein, 736 aa, synthetic construct
  REGION 1..736: note = Description of Artificial Sequence: Synthetic polypeptide
MAADGYLPDWLEDNLSEGIREWWDLKPGAPKPKANQQKQDDGRGLVLPGYKYLGPFNGLDKGEPVNAADAAALEHDKAYDQQLKAGDNPYLRYNHADAEFQERLQEDTSFGGNLGRAVFQAKKRVLEPFGLVEEGAKTAPGKKRPVEQSPQEPDSSSGIGKTGQQPAKKRLNFGQTGDSESVPDPQPLGEPPATPAAVGPTTMASGGGAPMADNNEGADGVGNASGNWHCDSTWLGDRVITTSTRTWALPTYNNHLYKQISSASTGASNDNHYFGYSTPWGYFDFNRFHCHFSPRDWQRLINNNWGFRPKRLNFKLFNVQVKEVTTNDGVTTIANNLTSTVQVFSDSEYQLPYVLGSAHQGCLPPFPADVFMIPQYGYLTLNNGSQAVGRSSFYCLEYFPSQMLRTGNNFTFSYTFEDVPFHSSYAHSQSLDRLMNPLIDQYLYYLNRTQDQSGSAQNKDLLFSRGSPAGMSVQPKNWLPGPCYRQQRVSKTKTDNNNSNFTWTGASKYNLNGRESIINPGTAMASHKDDKNKFFPMSGVMIFGKESAGASNTALDNVMITDEEEIKATNPVATERFGTVAVNLQSSSTDPATGDVHVMGALPGMVWQDRDVYLQGPIWAKIPHTDGHFHPSPLMGGFGLKNPPPQILIKNTPVPANPPAEFSATKFASFITQYSTGQVSVEIEWELQKENSKRWNPEVQYTSNYAKSANVDFTVDNNGLYTEPRPIGTRYLTRPL

SEQ ID NO: 1430 - protein, 737 aa, synthetic construct
  REGION 1..737: note = Description of Artificial Sequence: Synthetic polypeptide
MAADGYLPDWLEDTLSEGIRQWWKLKPGPPPPKPAERHKDDSRGLVLPGYKYLGPGNGLDKGEPVNAADAAALEHDKAYDQQLKAGDNPYLKYNHADAEFQERLKEDTSFGGNLGRAVFQAKKRVLEPLGLVEEGAKTAPGKKRPVEPSPQRSPDSSTGIGKKGQQPARKRLNFGQTGDSESVPDPQPLGEPPATPAAVGPTTMASGGGAPMADNNEGADGVGNASGNWHCDSTWLGDRVITTSTRTWALPTYNNHLYKQISSASTGASNDNHYFGYSTPWGYFDFNRFHCHFSPRDWQRLINNNWGFRPKRLNFKLFNIQVKEVTTNDGVTTIANNLTSTVQVFSDSEYQLPYVLGSAHQGCLPPFPADVFMIPQYGYLTLNNGSQAVGRSSFYCLEYFPSQMLRTGNNFTFSYTFEDVPFHSSYAHSQSLDRLMNPLIDQYLYYLNRTQNQSGSAQNKDLLFSRGSPAGMSVQPKNWLPGPCYRQQRVSKTKTDNNNSNFTWTGASKYNLNGRESIINPGTAMASHKDDKDKFFPMSGVMIFGKESAGASNTALDNVMITDEEEIKATNPVATERFGTVAVNLQSSSTDPATEDVHVMGALPGMVWQDRDVYLQGPIWAKIPHTDGHFHPSPLMGGFGLKNPPPQILIKNTPVPANPPAEFSATKFASFITQYSTGQVSVEIEWELQKENSKRWNPEVQYTSNYAKSANVDFTVDNNGLYTEPRPIGTRYLTRNL

SEQ ID NO: 1431 - protein, 736 aa, synthetic construct
  REGION 1..736: note = Description of Artificial Sequence: Synthetic polypeptide
MAADGYLPDWLEDNLSEGIREWWDLKPGAPKPKANQQKQDDGRGLVLPGYKYLGPFNGLDKGEPVNAADAAALEHDKAYDQQLKAGDNPYLRYNHADAEFQERLQEDTSFGGNLGRAVFQAKKRVLEPFGLVEEGAKTAPGKKRPVEQSPQEPDSSSGIGKTGQQPAKKRLNFGQTGDSESVPDPQPLGEPPATPAAVGPTTMASGGGAPMADNNEGADGVGNASGNWHCDSTWLGDRVITTSTRTWALPTYNNHLYKQISSASTGASNDNHYFGYSTPWGYFDFNRFHCHFSPRDWQRLINNNWGFRPKRLNFKLFNVQVKEVTTNDGVTTIANNLTSTVQVFSDSEYQLPYVLGSAHQGCLPPFPADVFMIPQYGYLTLNNGSQAVGRSSFYCLEYFPSQMLRTGNNFTFSYTFEDVPFHSSYAHSQSLDRLMNPLIDQYLYYLNRTQDQSGSAQNKDLLFSRGSPAGMSVQPKNWLPGPCYRQQRVSKTKTDNNNSNFTWTGASKYNLNGRESIINPGTAMASHKDDKNKFFPMSGVMIFGKESAGASNTALDNVMITDEEEIKATNPVATERFGTVAVNLQSSSTDPATGDVHVMGALPGMVWQDRDVYLQGPIWAKIPHTDGHFHPSPLMGGFGLKHPPPQILIKNTPVPANPPAEFSATKFASFITQYSTGQVSVEIEWELQKENSKRWNPEVQYTSNYAKSANVDFTVDNNGLYTEPRPIGTRYLTRPL

SEQ ID NO: 1432 - protein, 736 aa, synthetic construct
  REGION 1..736: note = Description of Artificial Sequence: Synthetic polypeptide
MAADGYLPDWLEDNLSEGIREWWDLKPGAPKPKANQQKQDDGRGLVLPGYKYLGPFNGLDKGEPVNAADAAALEHDKAYDQQLKAGDNPYLRYNHADAEFQERLQEDTSFGGNLGRAVFQAKKRVLEPFGLVEEGAKTAPGKKRPVEQSPQEPDSSSGIGKTGQQPAKKRLNFGQTGDSESVPDPQPLGEPPATPAAVGPTTMASGGGAPMADNNEGADGVGNASGNWHCDSTWLGDRVITTSTRTWALPTYNNHLYKQISSASTGASNDNHYFGYSTPWGYFDFNRFHCHFSPRDWQRLINNNWGFRPKRLNFKLFNVQVKEVTTNDGVTTIANNLTSTVQVFSDSEYQLPYVLGSAHQGCLPPFPADVFMIPQYGYLTLNNGSQAVGRSSFYCLEYFPSQMLRTGNNFTFSYTFEDVPFHSSYAHSQSLDRLMNPLIDQYLYYLNRTQDQSGSAQNKDLLFSRGSPAGMSVQPKNWLPGPCYRQQRVSKTKTDNNNSNFTWTGASKYNLNGRESIINPGTAMASHKDDKDKFFPMSGVMIFGKESAGASNTALDNVMITDEEEIKATNPVATERFGTVAVNLQSSSTDPATGDVHVMGALPGMVWQDRDVYLQGPIWAKIPHTDGHFHPSPLMGGFGLKHPPPQILIKNTPVPANPPAEFSATKFASFITQYSTGQVSVEIEWELQKENSKRWNPEVQYTSNYAKSANVDFTVDNNGLYTEPRPIGTRYLTRPL

SEQ ID NO: 1433 - protein, 736 aa, synthetic construct
  REGION 1..736: note = Description of Artificial Sequence: Synthetic polypeptide
MAADGYLPDWLEDNLSEGIREWWDLKPGAPKPKANQQKQDDGRGLVLPGYKYLGPFNGLDKGEPVNAADAAALEHDKAYDQQLKAGDNPYLRYNHADAEFQERLQEDTSFGGNLGRAVFQAKKRVLEPFGLVEEGAKTAPGKKRPVEQSPQEPDSSSGIGKTGQQPAKKRLNFGQTGDSESVPDPQPLGEPPATPAAVGPTTMASGGGAPMADNNEGADGVGNASGNWHCDSTWLGDRVITTSTRTWALPTYNNHLYKQISSASTGASNDNHYFGYSTPWGYFDFNRFHCHFSPRDWQRLINNNWGFRPKRLNFKLFNIQVKEVTTNDGVTTIANNLTSTVQVFSDSEYQLPYVLGSAHQGCLPPFPADVFMIPQYGYLTLNNGSQAVGRSSFYCLEYFPSQMLRTGNNFTFSYTFEDVPFHSSYAHSQSLDRLMNPLIDQYLYYLNRTQDQSGSAQNKDLLFSRGSPAGMSVQPKNWLPGPCYRQQRVSKTKTDNNNSNFTWTGASKYNLNGRESIINPGTAMASHKDDKNKFFPMSGVMIFGKESAGASNTALDNVMITDEEEIKATNPVATERFGTVAVNLQSSSTDPATGDVHVMGALPGMVWQDRDVYLQGPIWAKIPHTDGHFHPSPLMGGFGLKHPPPQILIKNTPVPANPPAEFSATKFASFITQYSTGQVSVEIEWELQKENSKRWNPEVQYTSNYAKSANVDFTVDNNGLYTEPRPIGTRYLTRPL

SEQ ID NO: 1434 - protein, 736 aa, synthetic construct
  REGION 1..736: note = Description of Artificial Sequence: Synthetic polypeptide
MAADGYLPDWLEDNLSEGIREWWDLKPGAPKPKANQQKQDDGRGLVLPGYKYLGPFNGLDKGEPVNAADAAALEHDKAYDQQLKAGDNPYLRYNHADAEFQERLQEDTSFGGNLGRAVFQAKKRVLEPFGLVEEGAKTAPGKKRPVEQSPQEPDSSSGIGKTGQQPAKKRLNFGQTGDSESVPDPQPLGEPPATPAAVGPTTMASGGGAPMADNNEGADGVGNASGNWHCDSTWLGDRVITTSTRTWALPTYNNHLYKQISSASTGASNDNHYFGYSTPWGYFDFNRFHCHFSPRDWQRLINNNWGFRPKRLNFKLFNVQVKEVTTNDGVTTIANNLTSTVQVFSDSEYQLPYVLGSAHQGCLPPFPADVFMIPQYGYLTLNNGSQAVGRSSFYCLEYFPSQMLRTGNNFTFSYTFEDVPFHSSYAHSQSLDRLMNPLIDQYLYYLNRTQNQSGSAQNKDLLFSRGSPAGMSVQPKNWLPGPCYRQQRVSKTKTDNNNSNFTWTGASKYNLNGRESIINPGTAMASHKDDKDKFFPMSGVMIFGKESAGASNTALDNVMITDEEEIKATNPVATERFGTVAVNLQSSSTDPATGDVHVMGALPGMVWQDRDVYLQGPIWAKIPHTDGHFHPSPLMGGFGLKHPPPQILIKNTPVPANPPAEFSATKFASFITQYSTGQVSVEIEWELQKENSKRWNPEVQYTSNYAKSANVDFTVDNNGLYTEPRPIGTRYLTRPL

SEQ ID NO: 1435 - protein, 736 aa, synthetic construct
  REGION 1..736: note = Description of Artificial Sequence: Synthetic polypeptide
MAADGYLPDWLEDNLSEGIREWWDLKPGAPKPKANQQKQDDGRGLVLPGYKYLGPFNGLDKGEPVNAADAAALEHDKAYDQQLKAGDNPYLRYNHADAEFQERLQEDTSFGGNLGRAVFQAKKRVLEPFGLVEEGAKTAPGKKRPVEQSPQEPDSSSGIGKTGQQPAKKRLNFGQTGDSESVPDPQPLGEPPATPAAVGPTTMASGGGAPMADNNEGADGVGNASGNWHCDSTWLGDRVITTSTRTWALPTYNNHLYKQISSASTGASNDNHYFGYSTPWGYFDFNRFHCHFSPRDWQRLINNNWGFRPKRLNFKLFNVQVKEVTTNDGVTTIANNLTSTVQVFSDSEYQLPYVLGSAHQGCLPPFPADVFMIPQYGYLTLNNGSQAVGRSSFYCLEYFPSQMLRTGNNFTFSYTFEDVPFHSSYAHSQSLDRLMNPLIDQYLYYLNRTQNQSGSAQNKDLLFSRGSPAGMSVQPKNWLPGPCYRQQRVSKTKTDNNNSNFTWTGASKYNLNGRESIINPGTAMASHKDDKNKFFPMSGVMIFGKESAGASNTALDNVMITDEEEIKATNPVATERFGTVAVNLQSSSTDPATGDVHVMGALPGMVWQDRDVYLQGPIWAKIPHTDGHFHPSPLMGGFGLKHPPPQILIKNTPVPANPPAEFSATKFASFITQYSTGQVSVEIEWELQKENSKRWNPEVQYTSNYAKSANVDFTVDNNGLYTEPRPIGTRYLTRPL

SEQ ID NO: 1436 - DNA, 2217 bp, synthetic construct
  misc_feature 1..2217: note = Description of Artificial Sequence: Synthetic polynucleotide
  source 1..2217: mol_type = other DNA
atggctgccgatggttatcttccagattggctcgaggacaacctctctgagggcattcgcgagtggtgggacctgaaacctggagccccgaaacccaaagccaaccagcaaaagcaggacaacggccggggtctggtgcttcctggctacaagtacctcggacccttcaacggactcgacaagggggagcccgtcaacgcggcggacgcagcggccctcgagcacgacaaggcctacgaccagcagctccaagcgggtgacaatccgtacctgcggtataatcacgccgacgccgagtttcaggagcgtctgcaagaagatacgtcttttgggggcaacctcgggcgcgcagtcttccaggccaaaaagcgggttctcgaacctctgggcctggttgaatcgccggttaagacggctcctggaaagaagagaccggtagagccatcaccccagcgctctccagactcctctacgggcatcggcaagaaaggccagcagcccgcaaaaaagagactcaattttgggcagactggcgactcagagtcagtccccgaccctcaaccaatcggagaaccaccagcaggcccctctggtctgggatctggtacaatggctgcaggcggtggcgctccaatggcagacaataacgaaggcgccgacggagtgggtagttcctcaggaaattggcattgcgattccacatggctgggcgacagagtcatcaccaccagcacccgcacctgggccctgcccacctacaacaaccacctctacaagcaaatctccaacgggacctcgggaggaagcaccaacgacaacacctacttcggctacagcaccccctgggggtattttgacttcaacagattccactgccacttttcaccacgtgactggcagcgactcatcaacaacaactggggattccggcccaagaggctcaacttcaagctcttcaacatccaagtcaaggaggtcacgcagaatgaaggcaccaagaccatcgccaataaccttaccagcacgattcaggtctttacggactcggaataccagctcccgtacgtgctcggctcggcgcaccagggctgcctgcctccgttcccggcggacgtcttcatgattcctcagtacgggtacctgactctgaacaatggcagtcaggctgtgggccggtcgtccttctactgcctggagtactttccttctcaaatgctgagaacgggcaacaactttgaattcagctacaacttcgaggacgtgcccttccacagcagctacgcgcacagccagagcctggaccggctgatgaaccctctcatcgaccagtacttgtactacctgtcccggactcaaagcacgggcggtactgcaggaactcagcagttgctattttctcaggccgggcctaacaacatgtcggctcaggccaagaactggctacccggtccctgctaccggcagcaacgcgtctccacgacactgtcgcagaacaacaacagcaactttgcctggacgggtgccaccaagtatcatctgaatggcagagactctctggtgaatcctggcgttgccatggctacccacaaggacgacgaagagcgattttttccatccagcggagtcttaatgtttgggaaacagggagctggaaaagacaacgtggactatagcagcgtgatgctaaccagcgaggaagaaataaagaccaccaacccagtggccacagaacagtacggcgtggtggccgataacctgcaacagcaaaacgccgctcctattgtaggggccgtcaatagtcaaggagccttacctggcatggtgtggcagaaccgggacgtgtacctgcagggtcccatctgggccaagattcctcatacggacggcaactttcatccctcgccgctgatgggaggctttggactgaagcatccgcctcctcagatcctgattaaaaacacacctgttcccgcggatcctccgaccaccttcaatcaggccaagctggcttctttcatcacgcagtacagtaccggccaggtcagcgtggagatcgagtgggagctgcagaaggagaacagcaaacgctggaacccagagattcagtacacttccaactactacaaatctacaaatgtggactttgctgtcaatactgagggtacttattccgagcctcgccccattggcacccgttacctcacccgtaatctgtaa

SEQ ID NO: 1437 - protein, 738 aa, synthetic construct
  REGION 1..738: note = Description of Artificial Sequence: Synthetic polypeptide
MAADGYLPDWLEDNLSEGIREWWDLKPGAPKPKANQQKQDNGRGLVLPGYKYLGPFNGLDKGEPVNAADAAALEHDKAYDQQLQAGDNPYLRYNHADAEFQERLQEDTSFGGNLGRAVFQAKKRVLEPLGLVESPVKTAPGKKRPVEPSPQRSPDSSTGIGKKGQQPAKKRLNFGQTGDSESVPDPQPIGEPPAGPSGLGSGTMAAGGGAPMADNNEGADGVGSSSGNWHCDSTWLGDRVITTSTRTWALPTYNNHLYKQISNGTSGGSTNDNTYFGYSTPWGYFDFNRFHCHFSPRDWQRLINNNWGFRPKRLNFKLFNIQVKEVTQNEGTKTIANNLTSTIQVFTDSEYQLPYVLGSAHQGCLPPFPADVFMIPQYGYLTLNNGSQAVGRSSFYCLEYFPSQMLRTGNNFEFSYNFEDVPFHSSYAHSQSLDRLMNPLIDQYLYYLSRTQSTGGTAGTQQLLFSQAGPNNMSAQAKNWLPGPCYRQQRVSTTLSQNNNSNFAWTGATKYHLNGRDSLVNPGVAMATHKDDEERFFPSSGVLMFGKQGAGKDNVDYSSVMLTSEEEIKTTNPVATEQYGVVADNLQQQNAAPIVGAVNSQGALPGMVWQNRDVYLQGPIWAKIPHTDGNFHPSPLMGGFGLKHPPPQILIKNTPVPADPPTTFNQAKLASFITQYSTGQVSVEIEWELQKENSKRWNPEIQYTSNYYKSTNVDFAVNTEGTYSEPRPIGTRYLTRNL

SEQ ID NO: 1438 - protein, 738 aa, synthetic construct; identical to SEQ ID NO: 1437
  REGION 1..738: note = Description of Artificial Sequence: Synthetic polypeptide

SEQ ID NO: 1439 - DNA, 4472 bp, synthetic construct
  misc_feature 1..4472: note = Description of Artificial Sequence: Synthetic polynucleotide
  source 1..4472: mol_type = other DNA
ctccatcactaggggtaaccgcgaagcgcctcccacgctgccgcgtcagcgctgacgtaaattacgtcataggggagtggtcctgtattagctgtcacgtgagtgcttttgcgacattttgcgacaccacgtggccattcatggtatatatggccgagtgagcgagcaggatctccattttgaccgcgaaatttgaacgagcagcagccatgccgggcttctacgagatcgtgcttaaggtgccgagcgacctggacgagcacctgccgggcatttctgactcgtttgtgaactgggtggcagagaaggaatgggagctgcccccggattctgacatggatcggaatctgattgagcaggcacccctgaccgtggccgagaagctacagcgcgacttcctggtccaatggcgccgcgtgagtaaggccccggaggccctcttctttgttcagttcgagaagggcgagtcctacttccacctccatattctggtagagaccacgggggtcaaatccatggtgctgggccgcttcctgagtcagattcgggacaagctggtgcagaccatctaccgcgggatcgagccgaccctgcccaactggttcgcggtgacaaagacgcgtaatggcgccggaggggggaacaaggtggtggacgagtgctacatccccaactacctgctgcccaagactcagcccgagctgcagtgggcgtggactaacatggaggagtatataagcgcgtgcttgaacctggccgagcgcaaacggctcgtggcgcagcacctgacccacgtcagccagacccaggagcagaacaaggagaatctgaacccgaattctgacgcgcctgtcatccggtcaaaaacctccgcgcgctacatggagctggtcgggtggctggtggaccggggcatcacctccgagaagcagtggatccaggaggaccaggcctcgtacatctccttcaacgccgcctccaactcgcggtctcagatcaaggccgcgctggacaatgccggcaagatcatggcgctgaccaaatccgcgcccgactacctggtaggccccgctctgcccgcggacattaaatccaaccgcatctaccgcatcctggagctgaatggctacgaccctgcctacgccggttccgtctttctcggctgggcccagaaaaagtttggcaaaaggaacaccatctggctgtttgggccggccaccacgggcaagaccaacatcgcggaagccatcgcccacgccgtgcccttctacggctgcgtcaactggaccaatgagaactttcccttcaacgattgcgtcgacaagatggtgatctggtgggaggagggcaagatgacggccaaggtcgtggagtccgccaaggccattctcggcggcagcaaggtgcgcgtggaccaaaagtgcaagtcgtccgcccagatcgatcccacccccgtgatcgtcacctccaacaccaacatgtgcgccgtgattgacgggaacagcaccaccttcgagcaccagcagccgttgcaggaccggatgttcaaatttgaacttacccgccgtctggagcacgactttggcaaggtgacaaagcaggaagtcaaagagttcttccgctgggcgcaggatcacgtgaccgaggtggcgcatgagttctacgtcagaaagggtggagctaacaaaagacccgcccccgatgacgcggatataagcgagcccaagcgggcctgcccctcagtcgcggatccatcgacgtcagacgcggaaggagctccggtggactttgccgacaggtaccaaaacaaatgttctcgtcacgcgggcatgcttcagatgctgtttccctgcaaaacatgcgagagaatgaatcagaatttcaacatttgcttcacgcacgggaccagagactgttcagaatgtttccctggcgtgtcagaatctcaaccggtcgtcagaaaaaagacgtatcggaaactctgtgcgattcatcatctgctggggcgggcacccgagattgcttgctcggcctgcgacctggtcaacgtggacctggatgactgtgtttctgagcaataaatgacttaaaccaggtatggctgccgatggttatcttccagattggctcgaggacaacctctctgagggcattcgcgagtggtgggacctgaaacctggagccccgaaacccaaagccaaccagcaaaagcaggacaacggccggggtctggtgcttcctggctacaagtacctcggacccttcaacggactcgacaagggggagcccgtcaacgcggcggacgcagcggccctcgagcacgacaaggcctacgaccagcagctccaagcgggtgacaatccgtacctgcggtataatcacgccgacgccgagtttcaggagcgtctgcaagaagatacgtcttttgggggcaacctcgggcgcgcagtcttccaggccaaaaagcgggttctcgaacctctgggcctggttgaatcgccggttaagacggctcctggaaagaagagaccggtagagccatcaccccagcgctctccagactcctctacgggcatcggcaagaaaggccagcagcccgcaaaaaagagactcaattttgggcagactggcgactcagagtcagtccccgaccctcaaccaatcggagaaccaccagcaggcccctctggtctgggatctggtacaatggctgcaggcggtggcgctccaatggcagacaataacgaaggcgccgacggagtgggtagttcctcaggaaattggcattgcgattccacatggctgggcgacagagtcatcaccaccagcacccgcacctgggccctgcccacctacaacaaccacctctacaagcaaatctccaacgggacctcgggaggaagcaccaacgacaacacctacttcggctacagcaccccctgggggtattttgacttcaacagattccactgccacttttcaccacgtgactggcagcgactcatcaacaacaactggggattccggcccaagaggctcaacttcaagctcttcaacatccaagtcaaggaggtcacgcagaatgaaggcaccaagaccatcgccaataaccttaccagcacgattcaggtctttacggactcggaataccagctcccgtacgtgctcggctcggcgcaccagggctgcctgcctccgttcccggcggacgtcttcatgattcctcagtacgggtacctgactctgaacaatggcagtcaggctgtgggccggtcgtccttctactgcctggagtactttccttctcaaatgctgagaacgggcaacaactttgaattcagctacaacttcgaggacgtgcccttccacagcagctacgcgcacagccagagcctggaccggctgatgaaccctctcatcgaccagtacttgtactacctgtcccggactcaaagcacgggcggtactgcaggaactcagcagttgctattttctcaggccgggcctaacaacatgtcggctcaggccaagaactggctacccggtccctgctaccggcagcaacgcgtctccacgacactgtcgcagaacaacaacagcaactttgcctggacgggtgccaccaagtatcatctgaatggcagagactctctggtgaatcctggcgttgccatggctacccacaaggacgacgaagagcgattttttccatccagcggagtcttaatgtttgggaaacagggagctggaaaagacaacgtggactatagcagcgtgatgctaaccagcgaggaagaaataaagaccaccaacccagtggccacagaacagtacggcgtggtggccgataacctgcaacagcaaaacgccgctcctattgtaggggccgtcaatagtcaaggagccttacctggcatggtgtggcagaaccgggacgtgtacctgcagggtcccatctgggccaagattcctcatacggacggcaactttcatccctcgccgctgatgggaggctttggactgaagcatccgcctcctcagatcctgattaaaaacacacctgttcccgcggatcctccgaccaccttcaatcaggccaagctggcttctttcatcacgcagtacagtaccggccaggtcagcgtggagatcgagtgggagctgcagaaggagaacagcaaacgctggaacccagagattcagtacacttccaactactacaaatctacaaatgtggactttgctgtcaatactgagggtacttattccgagcctcgccccattggcacccgttacctcacccgtaatctgtaattacatgttaatcaataaaccggttaattcgtttcagttgaactttggtctcctgtccttcttatcttatcggttaccatagaaactggttacttattaactgcttggtgcgcttcgcgataaaagacttacgtcatcgggttacccctagtgatgga

SEQ ID NO: 1440 - protein, 738 aa, synthetic construct
  REGION 1..738: note = Description of Artificial Sequence: Synthetic polypeptide
MAADGYLPDWLEDNLSEGIREWWDLKPGAPKPKANQQKQDNGRGLVLPGYKYLGPFNGLDKGEPVNAADAAALEHDKAYDQQLQAGDNPYLRYNHADAEFQERLQEDTSFGGNLGRAVFQAKKRVLEPLGLVESPVKTAPGKKRPVEPSPQRSPDSSTGIGKKGQQPAKKRLNFGQTGDSESVPDPQPIGEPPAAPSGVGPNTMAAGGGAPMADNNEGADGVGSSSGNWHCDSTWLGDRVITTSTRTWALPTYNNHLYKQISNGTSGGSTNDNTYFGYSTPWGYFDFNRFHCHFSPRDWQRLINNNWGFRPKRLNFKLFNIQVKEVTQNEGTKTIANNLTSTIQVFTDSEYQLPYVLGSAHQGCLPPFPADVFMIPQYGYLTLNNGSQAVGRSSFYCLEYFPSQMLRTGNNFEFSYNFEDVPFHSSYAHSQSLDRLMNPLIDQYLYYLSRTQSTGGTAGTQQLLFSQAGPNNMSAQAKNWLPGPCYRQQRVSTTLSQNNNSNFAWTGATKYHLNGRDSLVNPGVAMATHKDDEERFFPSSGVLMFGKQGAGKDNVDYSSVMLTSEEEIKTTNPVATEQYGVVADNLQQQNAAPIVGAVNSQGALPGMVWQNRDVYLQGPIWAKIPHTDGNFHPSPLMGGFGLKHPPPQILIKNTPVPADPPTTFNQAKLASFITQYSTGQVSVEIEWELQKENSKRWNPEIQYTSNYYKSTNVDFAVNTEGTYSEPRPIGTRYLTRNL

SEQ ID NO: 1441 - protein, 738 aa, synthetic construct
  REGION 1..738: note = Description of Artificial Sequence: Synthetic polypeptide
MAADGYLPDWLEDNLSEGIREWWDLKPGAPKPKANQQRQDNGRGLVLPGYRYLGPFNGLDKGEPVNAADAAALEHDRAYDQQLQAGDNPYLRYNHADAEFQERLQEDTSFGGNLGRAVFQAKKRVLEPLGLVESPVRTAPGKKRPVEPSPQRSPDSSTGIGKKGQQPARKRLNFGQTGDSESVPDPQPIGEPPAAPSGVGPNTMAAGGGAPMADNNEGADGVGSSSGNWHCDSTWLGDRVITTSTRTWALPTYNNHLYRQISNGTSGGSTNDNTYFGYSTPWGYFDFNRFHCHFSPRDWQRLINNNWGFRPKRLNFKLFNIQVKEVTQNEGTRTIANNLTSTIQVFTDSEYQLPYVLGSAHQGCLPPFPADVFMIPQYGYLTLNNGSQAVGRSSFYCLEYFPSQMLRTGNNFEFSYNFEDVPFHSSYAHSQSLDRLMNPLIDQYLYYLSRTQSTGGTAGTQQLLFSQAGPNNMSAQAKNWLPGPCYRQQRVSTTLSQNNNSNFAWTGATKYHLNGRDSLVNPGVAMATHRDDEERFFPSSGVLMFGRQGAGRDNVDYSSVMLTSEEEIRTTNPVATEQYGVVADNLQQQNAAPIVGAVNSQGALPGMVWQNRDVYLQGPIWAKIPHTDGNFHPSPLMGGFGLKHPPPQILIKNTPVPADPPTTFNQAKLASFITQYSTGQVSVEIEWELQKENSKRWNPEIQYTSNYYKSTNVDFAVNTEGTYSEPRPIGTRYLTRNL

SEQ ID NO: 1442 - protein, 738 aa, synthetic construct
  REGION 1..738: note = Description of Artificial Sequence: Synthetic polypeptide
MAADGYLPDWLEDNLSEGIREWWDLKPGAPKPKANQQRQDNGRGLVLPGYRYLGPFNGLDKGEPVNAADAAALEHDRAYDQQLQAGDNPYLRYNHADAEFQERLQEDTSFGGNLGRAVFQAKKRVLEPLGLVESPVRTAPGKKRPVEPSPQRSPDSSTGIGKRGQQPARKRLNFGQTGDSESVPDPQPIGEPPAAPSGVGPNTMAAGGGAPMADNNEGADGVGSSSGNWHCDSTWLGDRVITTSTRTWALPTYNNHLYRQISNGTSGGSTNDNTYFGYSTPWGYFDFNRFHCHFSPRDWQRLINNNWGFRPKRLNFKLFNIQVKEVTQNEGTRTIANNLTSTIQVFTDSEYQLPYVLGSAHQGCLPPFPADVFMIPQYGYLTLNNGSQAVGRSSFYCLEYFPSQMLRTGNNFEFSYNFEDVPFHSSYAHSQSLDRLMNPLIDQYLYYLSRTQSTGGTAGTQQLLFSQAGPNNMSAQAKNWLPGPCYRQQRVSTTLSQNNNSNFAWTGATKYHLNGRDSLVNPGVAMATHRDDEERFFPSSGVLMFGKQGAGRDNVDYSSVMLTSEEEIRTTNPVATEQYGVVADNLQQQNAAPIVGAVNSQGALPGMVWQNRDVYLQGPIWAKIPHTDGNFHPSPLMGGFGLKHPPPQILIKNTPVPADPPTTFNQAKLASFITQYSTGQVSVEIEWELQKENSKRWNPEIQYTSNYYKSTNVDFAVNTEGTYSEPRPIGTRYLTRNL

SEQ ID NO: 1443 - protein, 738 aa, synthetic construct
  REGION 1..738: note = Description of Artificial Sequence: Synthetic polypeptide
MAADGYLPDWLEDNLSEGIREWWDLKPGAPKPKANQQRQDNGRGLVLPGYRYLGPFNGLDKGEPVNAADAAALEHDRAYDQQLQAGDNPYLRYNHADAEFQERLQEDTSFGGNLGRAVFQAKKRVLEPLGLVESPVRTAPGKKRPVEPSPQRSPDSSTGIGKRGQQPAKKRLNFGQTGDSESVPDPQPIGEPPAAPSGVGPNTMAAGGGAPMADNNEGADGVGSSSGNWHCDSTWLGDRVITTSTRTWALPTYNNHLYRQISNGTSGGSTNDNTYFGYSTPWGYFDFNRFHCHFSPRDWQRLINNNWGFRPKRLNFKLFNIQVKEVTQNEGTRTIANNLTSTIQVFTDSEYQLPYVLGSAHQGCLPPFPADVFMIPQYGYLTLNNGSQAVGRSSFYCLEYFPSQMLRTGNNFEFSYNFEDVPFHSSYAHSQSLDRLMNPLIDQYLYYLSRTQSTGGTAGTQQLLFSQAGPNNMSAQAKNWLPGPCYRQQRVSTTLSQNNNSNFAWTGATKYHLNGRDSLVNPGVAMATHRDDEERFFPSSGVLMFGRQGAGRDNVDYSSVMLTSEEEIRTTNPVATEQYGVVADNLQQQNAAPIVGAVNSQGALPGMVWQNRDVYLQGPIWAKIPHTDGNFHPSPLMGGFGLKHPPPQILIKNTPVPADPPTTFNQAKLASFITQYSTGQVSVEIEWELQKENSKRWNPEIQYTSNYYKSTNVDFAVNTEGTYSEPRPIGTRYLTRNL

SEQ ID NO: 1444 - protein, 738 aa, synthetic construct
  REGION 1..738: note = Description of Artificial Sequence: Synthetic polypeptide
MAADGYLPDWLEDNLSEGIREWWDLKPGAPKPKANQQRQDNGRGLVLPGYRYLGPFNGLDKGEPVNAADAAALEHDRAYDQQLQAGDNPYLRYNHADAEFQERLQEDTSFGGNLGRAVFQAKKRVLEPLGLVESPVRTAPGKKRPVEPSPQRSPDSSTGIGKRGQQPAKKRLNFGQTGDSESVPDPQPIGEPPAAPSGVGPNTMAAGGGAPMADNNEGADGVGSSSGNWHCDSTWLGDRVITTSTRTWALPTYNNHLYRQISNGTSGGSTNDNTYFGYSTPWGYFDFNRFHCHFSPRDWQRLINNNWGFRPKRLNFKLFNIQVKEVTQNEGTRTIANNLTSTIQVFTDSEYQLPYVLGSAHQGCLPPFPADVFMIPQYGYLTLNNGSQAVGRSSFYCLEYFPSQMLRTGNNFEFSYNFEDVPFHSSYAHSQSLDRLMNPLIDQYLYYLSRTQSTGGTAGTQQLLFSQAGPNNMSAQAKNWLPGPCYRQQRVSTTLSQNNNSNFAWTGATKYHLNGRDSLVNPGVAMATHRDDEERFFPSSGVLMFGKQGAGRDNVDYSSVMLTSEEEIRTTNPVATEQYGVVADNLQQQNAAPIVGAVNSQGALPGMVWQNRDVYLQGPIWAKIPHTDGNFHPSPLMGGFGLKHPPPQILIKNTPVPADPPTTFNQARLASFITQYSTGQVSVEIEWELQKENSKRWNPEIQYTSNYYKSTNVDFAVNTEGTYSEPRPIGTRYLTRNL

SEQ ID NO: 1445 - protein, 738 aa, synthetic construct
  REGION 1..738: note = Description of Artificial Sequence: Synthetic polypeptide
MAADGYLPDWLEDNLSEGIREWWDLKPGAPKPKANQQRQDNGRGLVLPGYRYLGPFNGLDKGEPVNAADAAALEHDRAYDQQLQAGDNPYLRYNHADAEFQERLQEDTSFGGNLGRAVFQAKKRVLEPLGLVESPVRTAPGKKRPVEPSPQRSPDSSTGIGKKGQQPAKKRLNFGQTGDSESVPDPQPIGEPPAAPSGVGPNTMAAGGGAPMADNNEGADGVGSSSGNWHCDSTWLGDRVITTSTRTWALPTYNNHLYRQISNGTSGGSTNDNTYFGYSTPWGYFDFNRFHCHFSPRDWQRLINNNWGFRPKRLNFKLFNIQVKEVTQNEGTRTIANNLTSTIQVFTDSEYQLPYVLGSAHQGCLPPFPADVFMIPQYGYLTLNNGSQAVGRSSFYCLEYFPSQMLRTGNNFEFSYNFEDVPFHSSYAHSQSLDRLMNPLIDQYLYYLSRTQSTGGTAGTQQLLFSQAGPNNMSAQAKNWLPGPCYRQQRVSTTLSQNNNSNFAWTGATKYHLNGRDSLVNPGVAMATHRDDEERFFPSSGVLMFGRQGAGRDNVDYSSVMLTSEEEIRTTNPVATEQYGVVADNLQQQNAAPIVGAVNSQGALPGMVWQNRDVYLQGPIWAKIPHTDGNFHPSPLMGGFGLKHPPPQILIKNTPVPADPPTTFNQARLASFITQYSTGQVSVEIEWELQKENSKRWNPEIQYTSNYYKSTNVDFAVNTEGTYSEPRPIGTRYLTRNL

SEQ ID NO: 1446 - DNA, 2214 bp, synthetic construct
  misc_feature 1..2214: note = Description of Artificial Sequence: Synthetic polynucleotide
  source 1..2214: mol_type = other DNA
atggctgccgatggttatcttccagattggctcgaggacaacctctctgagggcattcgcgagtggtgggacctgaaacctggagccccgaaacccaaagccaaccagcaaaagcaggacaacggccggggtctggtgcttcctggctacaagtacctcggacccttcaacggactcgacaagggggagcccgtcaacgcggcggacgcagcggccctcgagcacgacaaggcctacgaccagcagctccaagcgggtgacaatccgtacctgcggtataatcacgccgacgccgagtttcaggagcgtctgcaagaagatacgtcttttgggggcaacctcgggcgcgcagtcttccaggccaaaaagcgggttctcgaacctctgggcctggttgaatcgccggttaagacggctcctggaaagaagagaccggtagagccatcaccccagcgctctccagactcctctacgggcatcggcaagaaaggccagcagcccgcaaaaaagagactcaattttgggcagactggcgactcagagtcagtccccgaccctcaaccaatcggagaaccaccagcagccccctctggtgtgggacctaatacaatggctgcaggcggtggcgctccaatggcagacaataacgaaggcgccgacggagtgggtagttcctcaggaaattggcattgcgattccacatggctgggcgacagagtcatcaccaccagcacccgcacctgggccctgcccacctacaacaaccacctctacaagcaaatctccaacgggacctcgggaggaagcaccaacgacaacacctacttcggctacagcaccccctgggggtattttgacttcaacagattccactgccacttttcaccacgtgactggcagcgactcatcaacaacaactggggattccggcccaagaggctcaacttcaagctcttcaacatccaagtcaaggaggtcacgcagaatgaaggcaccaagaccatcgccaataaccttaccagcacgattcaggtctttacggactcggaataccagctcccgtacgtgctcggctcggcgcaccagggctgcctgcctccgttcccggcggacgtcttcatgattcctcagtacgggtacctgactctgaacaatggcagtcaggctgtgggccggtcgtccttctactgcctggagtactttccttctcaaatgctgagaacgggcaacaactttgaattcagctacaacttcgaggacgtgcccttccacagcagctacgcgcacagccagagcctggaccggctgatgaaccctctcatcgaccagtacttgtactacctgtcccggactcaaagcacgggcggtactgcaggaactcagcagttgctattttctcaggccgggcctaacaacatgtcggctcaggccaagaactggctacccggtccctgctaccggcagcaacgcgtctccacgacactgtcgcagaacaacaacagcaactttgcctggacgggtgccaccaagtatcatctgaatggcagagactctctggtgaatcctggcgttgccatggctacccacaaggacgacgaagagcgattttttccatccagcggagtcttaatgtttgggaaacagggagctggaaaagacaacgtggactatagcagcgtgatgctaaccagcgaggaagaaataaagaccaccaacccagtggccacagaacagtacggcgtggtggccgataacctgcaacagcaaaacgccgctcctattgtaggggccgtcaatagtcaaggagccttacctggcatggtgtggcagaaccgggacgtgtacctgcagggtcccatctgggccaagattcctcatacggacggcaactttcatccctcgccgctgatgggaggctttggactgaagcatccgcctcctcagatcctgattaaaaacacacctgttcccgcggatcctccgaccaccttcaatcaggccaagctggcttctttcatcacgcagtacagtaccggccaggtcagcgtggagatcgagtgggagctgcagaaggagaacagcaaacgctggaacccagagattcagtacacttccaactactacaaatctacaaatgtggactttgctgtcaatactgagggtacttattccgagcctcgccccattggcacccgttacctcacccgtaatctg

SEQ ID NO: 1447 - DNA, 2217 bp, synthetic construct
  misc_feature 1..2217: note = Description of Artificial Sequence: Synthetic polynucleotide
  source 1..2217: mol_type = other DNA
atggctgccgatggttatcttccagattggctcgaggacaacctctctgagggcattcgcgagtggtgggacctgaaacctggagccccgaaacccaaagccaaccagcaaaggcaggacaacggccggggtctggtgcttcctggctacaggtacctcggacccttcaacggactcgacaagggggagcccgtcaacgcggcggacgcagcggccctcgagcacgacagggcctacgaccagcagctccaagcgggtgacaatccgtacctgcggtataatcacgccgacgccgagtttcaggagcgtctgcaagaagatacgtcttttgggggcaacctcgggcgcgcagtcttccaggccaaaaagcgggttctcgaacctctgggcctggttgaatcgccggttaggacggctcctggaaagaagagaccggtagagccatcaccccagcgctctccagactcctctacgggcatcggcaagaaaggccagcagcccgcaagaaagagactcaattttgggcagactggcgactcagagtcagtccccgaccctcaaccaatcggagaaccaccagcagccccctctggtgtgggacctaatacaatggctgcaggcggtggcgctccaatggcagacaataacgaaggcgccgacggagtgggtagttcctcaggaaattggcattgcgattccacatggctgggcgacagagtcatcaccaccagcacccgcacctgggccctgcccacctacaacaaccacctctacaggcaaatctccaacgggacctcgggaggaagcaccaacgacaacacctacttcggctacagcaccccctgggggtattttgacttcaacagattccactgccacttttcaccacgtgactggcagcgactcatcaacaacaactggggattccggcccaagaggctcaacttcaagctcttcaacatccaagtcaaggaggtcacgcagaatgaaggcaccaggaccatcgccaataaccttaccagcacgattcaggtctttacggactcggaataccagctcccgtacgtgctcggctcggcgcaccagggctgcctgcctccgttcccggcggacgtcttcatgattcctcagtacgggtacctgactctgaacaatggcagtcaggctgtgggccggtcgtccttctactgcctggagtactttccttctcaaatgctgagaacgggcaacaactttgaattcagctacaacttcgaggacgtgcccttccacagcagctacgcgcacagccagagcctggaccggctgatgaaccctctcatcgaccagtacttgtactacctgtcccggactcaaagcacgggcggtactgcaggaactcagcagttgctattttctcaggccgggcctaacaacatgtcggctcaggccaagaactggctacccggtccctgctaccggcagcaacgcgtctccacgacactgtcgcagaacaacaacagcaactttgcctggacgggtgccaccaagtatcatctgaatggcagagactctctggtgaatcctggcgttgccatggctacccacagggacgacgaagagcgattttttccatccagcggagtcttaatgtttgggagacagggagctggaagagacaacgtggactatagcagcgtgatgctaaccagcgaggaagaaataaggaccaccaacccagtggccacagaacagtacggcgtggtggccgataacctgcaacagcaaaacgccgctcctattgtaggggccgtcaatagtcaaggagccttacctggcatggtgtggcagaaccgggacgtgtacctgcagggtcccatctgggccaagattcctcatacggacggcaactttcatccctcgccgctgatgggaggctttggactgaagcatccgcctcctcagatcctgattaaaaacacacctgttcccgcggatcctccgaccaccttcaatcaggccaagctggcttctttcatcacgcagtacagtaccggccaggtcagcgtggagatcgagtgggagctgcagaaggagaacagcaaacgctggaacccagagattcagtacacttccaactactacaaatctacaaatgtggactttgctgtcaatactgagggtacttattccgagcctcgccccattggcacccgttacctcacccgtaatctgtaa

SEQ ID NO: 1448 - DNA, 2217 bp, synthetic construct
  misc_feature 1..2217: note = Description of Artificial Sequence: Synthetic polynucleotide
  source 1..2217: mol_type = other DNA
atggctgccgatggttatcttccagattggctcgaggacaacctctctgagggcattcgcgagtggtgggacctgaaacctggagccccgaaacccaaagccaaccagcaaaggcaggacaacggccggggtctggtgcttcctggctacaggtacctcggacccttcaacggactcgacaagggggagcccgtcaacgcggcggacgcagcggccctcgagcacgacagggcctacgaccagcagctccaagcgggtgacaatccgtacctgcggtataatcacgccgacgccgagtttcaggagcgtctgcaagaagatacgtcttttgggggcaacctcgggcgcgcagtcttccaggccaaaaagcgggttctcgaacctctgggcctggttgaatcgccggttaggacggctcctggaaagaagagaccggtagagccatcaccccagcgctctccagactcctctacgggcatcggcaagagaggccagcagcccgcaagaaagagactcaattttgggcagactggcgactcagagtcagtccccgaccctcaaccaatcggagaaccaccagcagccccctctggtgtgggacctaatacaatggctgcaggcggtggcgctccaatggcagacaataacgaaggcgccgacggagtgggtagttcctcaggaaattggcattgcgattccacatggctgggcgacagagtcatcaccaccagcacccgcacctgggccctgcccacctacaacaaccacctctacaggcaaatctccaacgggacctcgggaggaagcaccaacgacaacacctacttcggctacagcaccccctgggggtattttgacttcaacagattccactgccacttttcaccacgtgactggcagcgactcatcaacaacaactggggattccggcccaagaggctcaacttcaagctcttcaacatccaagtcaaggaggtcacgcagaatgaaggcaccaggaccatcgccaataaccttaccagcacgattcaggtctttacggactcggaataccagctcccgtacgtgctcggctcggcgcaccagggctgcctgcctccgttcccggcggacgtcttcatgattcctcagtacgggtacctgactctgaacaatggcagtcaggctgtgggccggtcgtccttctactgcctggagtactttccttctcaaatgctgagaacgggcaacaactttgaattcagctacaacttcgaggacgtgcccttccacagcagctacgcgcacagccagagcctggaccggctgatgaaccctctcatcgaccagtacttgtactacctgtcccggactcaaagcacgggcggtactgcaggaactcagcagttgctattttctcaggccgggcctaacaacatgtcggctcaggccaagaactggctacccggtccctgctaccggcagcaacgcgtctccacgacactgtcgcagaacaacaacagcaactttgcctggacgggtgccaccaagtatcatctgaatggcagagactctctggtgaatcctggcgttgccatggctacccacagggacgacgaagagcgattttttccatccagcggagtcttaatgtttgggaaacagggagctggaagagacaacgtggactatagcagcgtgatgctaaccagcgaggaagaaataaggaccaccaacccagtggccacagaacagtacggcgtggtggccgataacctgcaacagcaaaacgccgctcctattgtaggggccgtcaatagtcaaggagccttacctggcatggtgtggcagaaccgggacgtgtacctgcagggtcccatctgggccaagattcctcatacggacggcaactttcatccctcgccgctgatgggaggctttggactgaagcatccgcctcctcagatcctgattaaaaacacacctgttcccgcggatcctccgaccaccttcaatcaggccaagctggcttctttcatcacgcagtacagtaccggccaggtcagcgtggagatcgagtgggagctgcagaaggagaacagcaaacgctggaacccagagattcagtacacttccaactactacaaatctacaaatgtggactttgctgtcaatactgagggtacttattccgagcctcgccccattggcacccgttacctcacccgtaatctgtaa

SEQ ID NO: 1449 - DNA, 2217 bp, synthetic construct
  misc_feature 1..2217: note = Description of Artificial Sequence: Synthetic polynucleotide
  source 1..2217: mol_type = other DNA
atggctgccgatggttatcttccagattggctcgaggacaacctctctgagggcattcgcgagtggtgggacctgaaacctggagccccgaaacccaaagccaaccagcaaaggcaggacaacggccggggtctggtgcttcctggctacaggtacctcggacccttcaacggactcgacaagggggagcccgtcaacgcggcggacgcagcggccctcgagcacgacagggcctacgaccagcagctccaagcgggtgacaatccgtacctgcggtataatcacgccgacgccgagtttcaggagcgtctgcaagaagatacgtcttttgggggcaacctcgggcgcgcagtcttccaggccaaaaagcgggttctcgaacctctgggcctggttgaatcgccggttaggacggctcctggaaagaagagaccggtagagccatcaccccagcgctctccagactcctctacgggcatcggcaagagaggccagcagcccgcaaaaaagagactcaattttgggcagactggcgactcagagtcagtccccgaccctcaaccaatcggagaaccaccagcagccccctctggtgtgggacctaatacaatggctgcaggcggtggcgctccaatggcagacaataacgaaggcgccgacggagtgggtagttcctcaggaaattggcattgcgattccacatggctgggcgacagagtcatcaccaccagcacccgcacctgggccctgcccacctacaacaaccacctctacaggcaaatctccaacgggacctcgggaggaagcaccaacgacaacacctacttcggctacagcaccccctgggggtattttgacttcaacagattccactgccacttttcaccacgtgactggcagcgactcatcaacaacaactggggattccggcccaagaggctcaacttcaagctcttcaacatccaagtcaaggaggtcacgcagaatgaaggcaccaggaccatcgccaataaccttaccagcacgattcaggtctttacggactcggaataccagctcccgtacgtgctcggctcggcgcaccagggctgcctgcctccgttcccggcggacgtcttcatgattcctcagtacgggtacctgactctgaacaatggcagtcaggctgtgggccggtcgtccttctactgcctggagtactttccttctcaaatgctgagaacgggcaacaactttgaattcagctacaacttcgaggacgtgcccttccacagcagctacgcgcacagccagagcctggaccggctgatgaaccctctcatcgaccagtacttgtactacctgtcccggactcaaagcacgggcggtactgcaggaactcagcagttgctattttctcaggccgggcctaacaacatgtcggctcaggccaagaactggctacccggtccctgctaccggcagcaacgcgtctccacgacactgtcgcagaacaacaacagcaactttgcctggacgggtgccaccaagtatcatctgaatggcagagactctctggtgaatcctggcgttgccatggctacccacagggacgacgaagagcgattttttccatccagcggagtcttaatgtttgggagacagggagctggaagagacaacgtggactatagcagcgtgatgctaaccagcgaggaagaaataaggaccaccaacccagtggccacagaacagtacggcgtggtggccgataacctgcaacagcaaaacgccgctcctattgtaggggccgtcaatagtcaaggagccttacctggcatggtgtggcagaaccgggacgtgtacctgcagggtcccatctgggccaagattcctcatacggacggcaactttcatccctcgccgctgatgggaggctttggactgaagcatccgcctcctcagatcctgattaaaaacacacctgttcccgcggatcctccgaccaccttcaatcaggccaagctggcttctttcatcacgcagtacagtaccggccaggtcagcgtggagatcgagtgggagctgcagaaggagaacagcaaacgctggaacccagagattcagtacacttccaactactacaaatctacaaatgtggactttgctgtcaatactgagggtacttattccgagcctcgccccattggcacccgttacctcacccgtaatctgtaa

SEQ ID NO: 1450 - DNA, 2217 bp, synthetic construct
  misc_feature 1..2217: note = Description of Artificial Sequence: Synthetic polynucleotide
  source 1..2217: mol_type = other DNA
atggctgccgatggttatcttccagattggctcgaggacaacctctctgagggcattcgcgagtggtgggacctgaaacctggagccccgaaacccaaagccaaccagcaaaggcaggacaacggccggggtctggtgcttcctggctacaggtacctcggacccttcaacggactcgacaagggggagcccgtcaacgcggcggacgcagcggccctcgagcacgacagggcctacgaccagcagctccaagcgggtgacaatccgtacctgcggtataatcacgccgacgccgagtttcaggagcgtctgcaagaagatacgtcttttgggggcaacctcgggcgcgcagtcttccaggccaaaaagcgggttctcgaacctctgggcctggttgaatcgccggttaggacggctcctggaaagaagagaccggtagagccatcaccccagcgctctccagactcctctacgggcatcggcaagagaggccagcagcccgcaaaaaagagactcaattttgggcagactggcgactcagagtcagtccccgaccctcaaccaatcggagaaccaccagcagccccctctggtgtgggacctaatacaatggctgcaggcggtggcgctccaatggcagacaataacgaaggcgccgacggagtgggtagttcctcaggaaattggcattgcgattccacatggctgggcgacagagtcatcaccaccagcacccgcacctgggccctgcccacctacaacaaccacctctacaggcaaatctccaacgggacctcgggaggaagcaccaacgacaacacctacttcggctacagcaccccctgggggtattttgacttcaacagattccactgccacttttcaccacgtgactggcagcgactcatcaacaacaactggggattccggcccaagaggctcaacttcaagctcttcaacatccaagtcaaggaggtcacgcagaatgaaggcaccaggaccatcgccaataaccttaccagcacgattcaggtctttacggactcggaataccagctcccgtacgtgctcggctcggcgcaccagggctgcctgcctccgttcccggcggacgtcttcatgattcctcagtacgggtacctgactctgaacaatggcagtcaggctgtgggccggtcgtccttctactgcctggagtactttccttctcaaatgctgagaacgggcaacaactttgaattcagctacaacttcgaggacgtgcccttccacagcagctacgcgcacagccagagcctggaccggctgatgaaccctctcatcgaccagtacttgtactacctgtcccggactcaaagcacgggcggtactgcaggaactcagcagttgctattttctcaggccgggcctaacaacatgtcggctcaggccaagaactggctacccggtccctgctaccggcagcaacgcgtctccacgacactgtcgcagaacaacaacagcaactttgcctggacgggtgccaccaagtatcatctgaatggcagagactctctggtgaatcctggcgttgccatggctacccacagggacgacgaagagcgattttttccatccagcggagtcttaatgtttgggaaacagggagctggaagagacaacgtggactatagcagcgtgatgctaaccagcgaggaagaaataaggaccaccaacccagtggccacagaacagtacggcgtggtggccgataacctgcaacagcaaaacgccgctcctattgtaggggccgtcaatagtcaaggagccttacctggcatggtgtggcagaaccgggacgtgtacctgcagggtcccatctgggccaagattcctcatacggacggcaactttcatccctcgccgctgatgggaggctttggactgaagcatccgcctcctcagatcctgattaaaaacacacctgttcccgcggatcctccgaccaccttcaatcaggccaggctggcttctttcatcacgcagtacagtaccggccaggtcagcgtggagatcgagtgggagctgcagaaggagaacagcaaacgctggaacccagagattcagtacacttccaactactacaaatctacaaatgtggactttgctgtcaatactgagggtacttattccgagcctcgccccattggcacccgttacctcacccgtaatctgtaa

SEQ ID NO: 1451 - DNA, 2217 bp, synthetic construct
  misc_feature 1..2217: note = Description of Artificial Sequence: Synthetic polynucleotide
  source 1..2217: mol_type = other DNA
atggctgccgatggttatcttccagattggctcgaggacaacctctctgagggcattcgcgagtggtgggacctgaaacctggagccccgaaacccaaagccaaccagcaaaggcaggacaacggccggggtctggtgcttcctggctacaggtacctcggacccttcaacggactcgacaagggggagcccgtcaacgcggcggacgcagcggccctcgagcacgacagggcctacgaccagcagctccaagcgggtgacaatccgtacctgcggtataatcacgccgacgccgagtttcaggagcgtctgcaagaagatacgtcttttgggggcaacctcgggcgcgcagtcttccaggccaaaaagcgggttctcgaacctctgggcctggttgaatcgccggttaggacggctcctggaaagaagagaccggtagagccatcaccccagcgctctccagactcctctacgggcatcggcaagaaaggccagcagcccgcaaaaaagagactcaattttgggcagactggcgactcagagtcagtccccgaccctcaaccaatcggagaaccaccagcagccccctctggtgtgggacctaatacaatggctgcaggcggtggcgctccaatggcagacaataacgaaggcgccgacggagtgggtagttcctcaggaaattggcattgcgattccacatggctgggcgacagagtcatcaccaccagcacccgcacctgggccctgcccacctacaacaaccacctctacaggcaaatctccaacgggacctcgggaggaagcaccaacgacaacacctacttcggctacagcaccccctgggggtattttgacttcaacagattccactgccacttttcaccacgtgactggcagcgactcatcaacaacaactggggattccggcccaagaggctcaacttcaagctcttcaacatccaagtcaaggaggtcacgcagaatgaaggcaccaggaccatcgccaataaccttaccagcacgattcaggtctttacggactcggaataccagctcccgtacgtgctcggctcggcgcaccagggctgcctgcctccgttcccggcggacgtcttcatgattcctcagtacgggtacctgactctgaacaatggcagtcaggctgtgggccggtcgtccttctactgcctggagtactttccttctcaaatgctgagaacgggcaacaactttgaattcagctacaacttcgaggacgtgcccttccacagcagctacgcgcacagccagagcctggaccggctgatgaaccctctcatcgaccagtacttgtactacctgtcccggactcaaagcacgggcggtactgcaggaactcagcagttgctattttctcaggccgggcctaacaacatgtcggctcaggccaagaactggctacccggtccctgctaccggcagcaacgcgtctccacgacactgtcgcagaacaacaacagcaactttgcctggacgggtgccaccaagtatcatctgaatggcagagactctctggtgaatcctggcgttgccatggctacccacagggacgacgaagagcgattttttccatccagcggagtcttaatgtttgggagacagggagctggaagagacaacgtggactatagcagcgtgatgctaaccagcgaggaagaaataaggaccaccaacccagtggccacagaacagtacggcgtggtggccgataacctgcaacagcaaaacgccgctcctattgtaggggccgtcaatagtcaaggagccttacctggcatggtgtggcagaaccgggacgtgtacctgcagggtcccatctgggccaagattcctcatacggacggcaactttcatccctcgccgctgatgggaggctttggactgaagcatccgcctcctcagatcctgattaaaaacacacctgttcccgcggatcctccgaccaccttcaatcaggccaggctggcttctttcatcacgcagtacagtaccggccaggtcagcgtggagatcgagtgggagctgcagaaggagaacagcaaacgctggaacccagagattcagtacacttccaactactacaaatctacaaatgtggactttgctgtcaatactgagggtacttattccgagcctcgccccattggcacccgttacctcacccgtaatctgtaa

SEQ ID NO: 1452 - protein, 744 aa, synthetic construct
  REGION 1..744: note = Description of Artificial Sequence: Synthetic polypeptide
MAADGYLPDWLEDTLSEGIRQWWKLKPGPPPPKPAERHKDDSRGLVLPGYKYLGPFNGLDKGEPVNEADAAALEHDKAYDRQLDSGDNPYLKYNHADAEFQERLKEDTSFGGNLGRAVFQAKKRVLEPLGLVEEPVKTAPGKKRPVEHSPVEPDSSSGTGKAGQQPARKRLNFGQTGDADSVPDPQPLGQPPAAPSGLGTNTMATGSGAPMADNNEGADGVGNSSGNWHCDSTWMGDRVITTSTRTWALPTYNNHLYKQISSQSGASNDNHYFGYSTPWGYFDFNRFHCHFSPRDWQRLINNNWGFRPKRLNFKLFNIQVKEVTQNDGTTTIANNLTSTVQVFTDSEYQLPYVLGSAHQGCLPPFPADVFMVPQYGYLTLNNGSQAVGRSSFYCLEYFPSQMLRTGNNFTFSYTFEDVPFHSSYAHSQSLDRLMNPLIDQYLYYLSRTNTPSGTTTQSRLQFSQAGASDIRDQSRNWLPGPCYRQQRVSKTSADNNNSEYSWTGATKYHLNGRDSLVNPGPAMASHKDDEEKFFPQSGVLIFGKQGSEKTNVDIEKVMITDEEEIRTTNPVATEQYGSVSTNLQRGQRGESGHGYFAQAATADVNTQGVLPGMVWQDRDVYLQGPIWAKIPHTDGHFHPSPLMGGFGLKHPPPQILIKNTPVPANPSTTFSAAKFASFITQYSTGQVSVEIEWELQKENSKRWNPEIQYTSNYNKSVNVDFTVDTNGVYSEPRPIGTRYLTRNL

SEQ ID NO: 1453 - DNA, 8359 bp, synthetic construct
  misc_feature 1..8359: note = Description of Artificial Sequence: Synthetic polynucleotide
  source 1..8359: mol_type = other DNA
catcatcaataatataccttattttggattgaagccaatatgataatgagggggtggagtttgtgacgtggcgcggggcgtgggaacggggcgggtgacgtagtagctctagaggtcctgtattagaggtcacgtgagtgttttgcgacattttgcgacaccatgtggtcacgctgggtatttaagcccgagtgagcacgcagggtctccattttgaagcgggaggtttgaacgcgcagccgccatgccggggttttacgagattgtgattaaggtccccagcgaccttgacgagcatctgcccggcatttctgacagctttgtgaactgggtggccgagaaggaatgggagttgccgccagattctgacatggatctgaatctgattgagcaggcacccctgaccgtggccgagaagctgcagcgcgactttctgacggaatggcgccgtgtgagtaaggcaccggaggcccttttctttgtgcaatttgagaagggagagagctacttccacatgcacgtgctcgtggaaaccaccggggtgaaatccatggttttgggacgtttcctgagtcagattcgcgaaaaactgattcagagaatttaccgcgggatcgagccgactttgccaaactggttcgcggtcacaaagaccagaaatggcgccggaggcgggaacaaggtggtggatgagtgctacatccccaattacttgctccccaaaacccagcctgagctccagtgggcgtggactaatatggaacagtatttaagcgcctgtttgaatctcacggagcgtaaacggttggtggcgcagcatctgacgcacgtgtcgcagacgcaggagcagaacaaagagaatcagaatcccaattctgatgcgccggtgatcagatcaaaaacttcagccaggtacatggagctggtcgggtggctcgtggacaaggggattacctcggagaagcagtggatccaggaggaccaggcctcatacatctccttcaatgcggcctccaactcgcggtcccaaatcaaggctgccttggacaatgcgggaaagattatgagcctgactaaaaccgcccccgactacctggtgggccagcagcccgtggaggacatttccagcaatcggatttataaaattttggaactaaacgggtacgatccccaatatgcggcttccgtctttctgggatgggccacgaaaaagttcggcaagaggaacaccatctggctgtttgggcctgcaactaccgggaagaccaacatcgcggaggccatagcccacactgtgcccttctacgggtgcgtaaactggaccaatgagaactttcccttcaacgactgtgtcgacaagatggtgatctggtgggaggaggggaagatgaccgccaaggtcgtggagtcggccaaagccattctcggaggaagcaaggtgcgcgtggaccagaaatgcaagtcctcggcccagatagacccgactcccgtgatcgtcacctccaacaccaacatgtgcgccgtgattgacgggaactcaacgaccttcgaacaccagcagccgttgcaagaccggatgttcaaatttgaactcacccgccgtctggatcatgactttgggaaggtcaccaagcaggaagtcaaagactttttccggtgggcaaaggatcacgtggttgaggtggagcatgaattctacgtcaaaaagggtggagccaagaaaagacccgcccccagtgacgcagatataagtgagcccaaacgggtgcgcgagtcagttgcgcagccatcgacgtcagacgcggaagcttcgatcaactacgcagacaggtaccaaaacaaatgttctcgtcacgtgggcatgaatctgatgctgtttccctgcagacaatgcgagagaatgaatcagaattcaaatatctgcttcactcacggacagaaagactgtttagagtgctttcccgtgtcagaatctcaacccgtttctgtcgtcaaaaaggcgtatcagaaactgtgctacattcatcatatcatgggaaaggtgccagacgcttgcactgcctgcgatctggtcaatgtggatttggatgactgcatctttgaacaataaatgatttaaatcaggtatggctgccgatggttatcttccagattggctcgaggacactctctctgaaggaataagacagtggtggaagctcaaacctggcccaccaccaccaaagcccgcagagcggcataaggacgacagcaggggtcttgtgcttcctgggtacaagtacctcggacccttcaacggactcgacaagggagagccggtcaacgaggcagacgccgcggccctcgagcacgacaaagcctacgaccggcagctcgacagcggagacaacccgtacctcaagtacaaccacgccgacgcggagtttcaggagcgccttaaagaagatacgtcttttgggggcaacctcggacgagcagtcttccaggcgaaaaagagggttcttgaacctctgggcctggttgaggaacctgttaagacggctccgggaaaaaagaggccggtagagcactctcctgtggagccagactcctcctcgggaaccggaaaggcgggccagcagcctgcaagaaaaagattgaattttggtcagactggagacgcagactcagtacctgacccccagcctctcggacagccaccagcagccccctctggtctgggaactaatacgatggctacaggcagtggcgcaccaatggcagacaataacgagggcgccgacggagtgggtaattcctcgggaaattggcattgcgattccacatggatgggcgacagagtcatcaccaccagcacccgaacctgggccctgcccacctacaacaaccacctctacaaacaaatttccagccaatcaggagcctcgaacgacaatcactactttggctacagcaccccttgggggtattttgacttcaacagattccactgccacttttcaccacgtgactggcaaagactcatcaacaacaactggggattccgacccaagagactcaacttcaagctctttaacattcaagtcaaagaggtcacgcagaatgacggtacgacgacgattgccaataaccttaccagcacggttcaggtgtttactgactcggagtaccagctcccgtacgtcctcggctcggcgcatcaaggatgcctcccgccgttcccagcagacgtcttcatggtgccacagtatggatacctcaccctgaacaacgggagtcaggcagtaggacgctcttcattttactgcctggagtactttccttctcagatgctgcgtaccggaaacaactttaccttcagctacacttttgaggacgttcctttccacagcagctacgctcacagccagagtctggaccgtctcatgaatcctctcatcgaccagtacctgtattacttgagcagaacaaacactccaagtggaaccaccacgcagtcaaggcttcagttttctcaggccggagcgagtgacattcgggaccagtctaggaactggcttcctggaccctgttaccgccagcagcgagtatcaaagacatctgcggataacaacaacagtgaatactcgtggactggagctaccaagtaccacctcaatggcagagactctctggtgaatccgggcccggccatggcaagccacaaggacgatgaagaaaagttttttcctcagagcggggttctcatctttgggaagcaaggctcagagaaaacaaatgtggacattgaaaaggtcatgattacagacgaagaggaaatcaggacaaccaatcccgtggctacggagcagtatggttctgtatctaccaacctccagagaggccagagaggcgagtctggtcatggttattttgcccaggcggccaccgcagatgtcaacacacaaggcgttcttccaggcatggtctggcaggacagagatgtgtaccttcaggggcccatctgggcaaagattccacacacggacggacattttcacccctctcccctcatgggtggattcggacttaaacaccctcctccacagattctcatcaagaacaccccggtacctgcgaatccttcgaccaccttcagtgcggcaaagtttgcttccttcatcacacagtactccacgggacaggtcagcgtggagatcgagtgggagctgcagaaggaaaacagcaaacgctggaatcccgaaattcagtacacttccaactacaacaagtctgttaatgtggactttactgtggacactaatggcgtgtattcagagcctcgccccattggcaccagatacctgactcgtaatctgtaattgcttgttaatcaataaaccgtttaattcgtttcagttgaactttggtctctgcgtatttctttcttatctagtttccatgctctagaggtcctgtattagaggtcacgtgagtgttttgcgacattttgcgacaccatgtggtcacgctgggtatttaagcccgagtgagcacgcagggtctccattttgaagcgggaggtttgaacgcgcagccaccacggcggggttttacgagattgtgattaaggtccccagcgaccttgacgagcatctgcccggcatttctgacagctttgtgaactgggtggccgagaaggaatgggagttgccgccagattctgacatggatctgaatctgattgagcaggcacccctgaccgtggccgagaagctgcatcgctggcgtaatagcgaagaggcccgcaccgatcgcccttcccaacagttgcgcagcctgaatggcgaatggcgattccgttgcaatggctggcggtaatattgttctggatattaccagcaaggccgatagtttgagttcttctactcaggcaagtgatgttattactaatcaaagaagtattgcgacaacggttaatttgcgtgatggacagactcttttactcggtggcctcactgattataaaaacacttctcaggattctggcgtaccgttcctgtctaaaatccctttaatcggcctcctgtttagctcccgctctgattctaacgaggaaagcacgttatacgtgctcgtcaaagcaaccatagtacgcgccctgtagcggcgcattaagcgcggcgggtgtggtggttacgcgcagcgtgaccgctacacttgccagcgccctagcgcccgctcctttcgctttcttcccttcctttctcgccacgttcgccggctttccccgtcaagctctaaatcgggggctccctttagggttccgatttagtgctttacggcacctcgaccccaaaaaacttgattagggtgatggttcacgtagtgggccatcgccctgatagacggtttttcgccctttgacgttggagtccacgttctttaatagtggactcttgttccaaactggaacaacactcaaccctatctcggtctattcttttgatttataagggattttgccgatttcggcctattggttaaaaaatgagctgatttaacaaaaatttaacgcgaattttaacaaaatattaacgtttacaatttaaatatttgcttatacaatcttcctgtttttggggcttttctgattatcaaccggggtacatatgattgacatgctagttttacgattaccgttcatcgattctcttgtttgctccagactctcaggcaatgacctgatagcctttgtagagacctctcaaaaatagctaccctctccggcatgaatttatcagctagaacggttgaatatcatattgatggtgatttgactgtctccggcctttctcacccgtttgaatctttacctacacattactcaggcattgcatttaaaatatatgagggttctaaaaatttttatccttgcgttgaaataaaggcttctcccgcaaaagtattacagggtcataatgtttttggtacaaccgatttagctttatgctctgaggctttattgcttaattttgctaattctttgccttgcctgtatgatttattggatgttggaattcctgatgcggtattttctccttacgcatctgtgcggtatttcacaccgcatatggtgcactctcagtacaatctgctctgatgccgcatagttaagccagccccgacacccgccaacacccgctgacgcgccctgacgggcttgtctgctcccggcatccgcttacagacaagctgtgaccgtctccgggagctgcatgtgtcagaggttttcaccgtcatcaccgaaacgcgcgagacgaaagggcctcgtgatacgcctatttttataggttaatgtcatgataataatggtttcttagacgtcaggtggcacttttcggggaaatgtgcgcggaacccctatttgtttatttttctaaatacattcaaatatgtatccgctcatgagacaataaccctgataaatgcttcaataatattgaaaaaggaagagtatgagtattcaacatttccgtgtcgcccttattcccttttttgcggcattttgccttcctgtttttgctcacccagaaacgctggtgaaagtaaaagatgctgaagatcagttgggtgcacgagtgggttacatcgaactggatctcaacagcggtaagatccttgagagttttcgccccgaagaacgttttccaatgatgagcacttttaaagttctgctatgtggcgcggtattatcccgtattgacgccgggcaagagcaactcggtcgccgcatacactattctcagaatgacttggttgagtactcaccagtcacagaaaagcatcttacggatggcatgacagtaagagaattatgcagtgctgccataaccatgagtgataacactgcggccaacttacttctgacaacgatcggaggaccgaaggagctaaccgcttttttgcacaacatgggggatcatgtaactcgccttgatcgttgggaaccggagctgaatgaagccataccaaacgacgagcgtgacaccacgatgcctgtagcaatggcaacaacgttgcgcaaactattaactggcgaactacttactctagcttcccggcaacaattaatagactggatggaggcggataaagttgcaggaccacttctgcgctcggcccttccggctggctggtttattgctgataaatctggagccggtgagcgtgggtctcgcggtatcattgcagcactggggccagatggtaagccctcccgtatcgtagttatctacacgacggggagtcaggcaactatggatgaacgaaatagacagatcgctgagataggtgcctcactgattaagcattggtaactgtcagaccaagtttactcatatatactttagattgatttaaaacttcatttttaatttaaaaggatctaggtgaagatcctttttgataatctcatgaccaaaatcccttaacgtgagttttcgttccactgagcgtcagaccccgtagaaaagatcaaaggatcttcttgagatcctttttttctgcgcgtaatctgctgcttgcaaacaaaaaaaccaccgctaccagcggtggtttgtttgccggatcaagagctaccaactctttttccgaaggtaactggcttcagcagagcgcagataccaaatactgtccttctagtgtagccgtagttaggccaccacttcaagaactctgtagcaccgcctacatacctcgctctgctaatcctgttaccagtggctgctgccagtggcgataagtcgtgtcttaccgggttggactcaagacgatagttaccggataaggcgcagcggtcgggctgaacggggggttcgtgcacacagcccagcttggagcgaacgacctacaccgaactgagatacctacagcgtgagctatgagaaagcgccacgcttcccgaagggagaaaggcggacaggtatccggtaagcggcagggtcggaacaggagagcgcacgagggagcttccagggggaaacgcctggtatctttatagtcctgtcgggtttcgccacctctgacttgagcgtcgatttttgtgatgctcgtcaggggggcggagcctatggaaaaacgccagcaacgcggcctttttacggttcctggccttttgctggccttttgctcacatgttctttcctgcgttatcccctgattctgtggataaccgtattaccgcctttgagtgagctgataccgctcgccgcagccgaacgaccgagcgcagcgagtcagtgagcgaggaagcggaagagcgcccaatacgcaaaccgcctctccccgcgcgttggccgattcattaatgcagaattcc

SEQ ID NO: 1454 - protein, 736 aa, synthetic construct
  REGION 1..736: note = Description of Artificial Sequence: Synthetic polypeptide
MAADGYLPDWLEDNLSEGIREWWDLKPGAPKPKANQQKQDDGRGLVLPGYKYLGPFNGLDKGEPVNAADAAALEHDKAYDQQLKAGDNPYLRYNHADAEFQERLQEDTSFGGNLGRAVFQAKKRVLEPLGLVEEGAKTAPGKKRPVEQSPQEPDSSSGIGKKGQQPAKKRLNFGQTGDSESVPDPQPLGEPPAAPSGVGSNTMAAGGGAPMADNNEGADGVGNASGNWHCDSTWLGDRVITTSTRTWALPTYNNHLYKQISSQSGASTNDNTYFGYSTPWGYFDFNRFHCHFSPRDWQRLINNNWGFRPKRLNFKLFNIQVKEVTTNDGTTTIANNLTSTVQVFTDSEYQLPYVLGSAHQGCLPPFPADVFMIPQYGYLTLNNGSQAVGRSSFYCLEYFPSQMLRTGNNFEFSYTFEDVPFHSSYAHSQSLDRLMNPLIDQYLYYLSRTQTTSGTAGNRTLQFSQAGPSSMANQAKNWLPGPCYRQQRVSKTANQNNNSNFAWTGATKYHLNGRDSLVNPGPAMATHKDDEDKFFPMSGVLIFGKQGAGNSNVDLDNVMITSEEEIKTTNPVATEQYGTVATNLQSSNTAPATGTVNSQGALPGMVWQNRDVYLQGPIWAKIPHTDGHFHPSPLMGGFGLKHPPPQILIKNTPVPANPPTTFSPAKFASFITQYSTGQVSVEIEWELQKENSKRWNPEIQYTSNYNKSTNVDFAVDTNGVYSEPRPIGTRYLTRNL

SEQ ID NO: 1455 - DNA, 2208 bp, synthetic construct
  misc_feature 1..2208: note = Description of Artificial Sequence: Synthetic polynucleotide
  source 1..2208: mol_type = other DNA
atggctgccgatggttatcttccagattggctcgaggacaacctctctgagggcattcgcgagtggtgggacttgaaacctggagccccgaaacccaaagccaaccagcaaaagcaggacgacggccggggtctggtgcttcctggctacaagtacctcggacccttcaacggactcgacaagggggagcccgtcaacgcggcggacgcagcggccctcgagcacgacaaggcctacgaccagcagctcaaagcgggtgacaatccgtacctgcggtataaccacgccgacgccgagtttcaggagcgtctgcaagaagatacgtcttttgggggcaacctcgggcgagcagtcttccaggccaagaagcgggttctcgaacctctcggtctggttgaggaaggcgctaagacggctcctggaaagaagagaccggtagagcaatcaccccaggaaccagactcctcttcgggcatcggcaagaaaggccagcagcccgcgaagaagagactcaactttgggcagacaggcgactcagagtcagtgcccgaccctcaaccactcggagaaccccccgcagccccctctggtgtgggatctaatacaatggcagcaggcggtggcgctccaatggcagacaataacgaaggcgccgacggagtgggtaacgcctcaggaaattggcattgcgattccacatggctgggcgacagagtcatcaccaccagcacccgaacctgggccctccccacctacaacaaccacctctacaagcaaatctccagccaatcgggagcaagcaccaacgacaacacctacttcggctacagcaccccctgggggtattttgactttaacagattccactgccacttctcaccacgtgactggcagcgactcatcaacaacaactggggattccggcccaagagactcaacttcaagctcttcaacatccaggtcaaggaggtcacgacgaatgatggcaccacgaccatcgccaataaccttaccagcacggttcaggtctttacggactcggaataccagctcccgtacgtcctcggctctgcgcaccagggctgcctgcctccgttcccggcggacgtcttcatgattcctcagtacgggtacctgactctgaacaatggcagtcaggccgtgggccgttcctccttctactgcctggagtactttccttctcaaatgctgagaacgggcaacaactttgagttcagctacacgtttgaggacgtgccttttcacagcagctacgcgcacagccaaagcctggaccggctgatgaaccccctcatcgaccagtacctgtactacctgtctcggactcagaccacgagtggtaccgcaggaaatcggacgttgcaattttctcaggccgggcctagtagcatggcgaatcaggccaaaaactggctacccgggccctgctaccggcagcaacgcgtctccaagacagcgaatcaaaataacaacagcaactttgcctggaccggtgccaccaagtatcatctgaatggcagagactctctggtaaatcccggtcccgctatggcaacccacaaggacgacgaagacaaattttttccgatgagcggagtcttaatatttgggaaacagggagctggaaatagcaacgtggaccttgacaacgttatgataaccagtgaggaagaaattaaaaccaccaacccagtggccacagaacagtacggcacggtggccactaacctgcaatcgtcaaacaccgctcctgctacagggaccgtcaacagtcaaggagccttacctggcatggtctggcagaaccgggacgtgtacctgcagggtcctatctgggccaagattcctcacacggacggacactttcatccctcgccgctgatgggaggctttggactgaaacacccgcctcctcagatcctgattaagaatacacctgttcccgcgaatcctccaactaccttcagtccagctaagtttgcgtcgttcatcacgcagtacagcaccggacaggtcagcgtggaaattgaatgggagctgcagaaagaaaacagcaaacgctggaacccagagattcaatacacttccaactacaacaaatctacaaatgtggactttgctgttgacacaaatggcgtttattctgagcctcgccccatcggcacccgttacctcacccgtaatctg

SEQ ID NO: 1456 - protein, 737 aa, synthetic construct
  REGION 1..737: note = Description of Artificial Sequence: Synthetic polypeptide
MAADGYLPDWLEDNLSEGIREWWDLKPGAPKPKANQQKQDDGRGLVLPGYKYLGPFNGLDKGEPVNAADAAALEHDKAYDQQLKAGDNPYLRYNHADAEFQERLQEDTSFGGNLGRAVFQAKKRVLEPLGLVEEGAKTAPGKKRPVEQSPQEPDSSTGIGKKGQQPAKKRLNFGQTGDSESVPDPQPLGEPPAAPSGVGSNTMAAGGGAPMADNNEGADGVGNASGNWHCDSTWLGDRVITTSTRTWALPTYNNHLYKQISNSQSGGSTNDNTYFGYSTPWGYFDFNRFHCHFSPRDWQRLINNNWGFRPKRLNFKLFNIQVKEVTTNDGTTTIANNLTSTVQVFTDSEYQLPYVLGSAHQGCLPPFPADVFMIPQYGYLTLNNGSQAVGRSSFYCLEYFPSQMLRTGNNFEFSYTFEDVPFHSSYAHSQSLDRLMNPLIDQYLYYLSRTQTTGGTAGNRTLQFSQAGPSSMANQAKNWLPGPCYRQQRVSKTTNQNNNSNFAWTGATKYHLNGRDSLVNPGVAMATHKDDEDRFFPSSGVLIFGKQGAGNDNVDLDNVMITSEEEIKTTNPVATEEYGVVATNLQSANTAPQTGTVNSQGALPGMVWQNRDVYLQGPIWAKIPHTDGNFHPSPLMGGFGLKHPPPQILIKNTPVPANPPTTFSPAKFASFITQYSTGQVSVEIEWELQKENSKRWNPEIQYTSNYNKSTNVDFAVDTEGVYSEPRPIGTRYLTRNL

SEQ ID NO: 1457 - DNA, 2211 bp, synthetic construct
  misc_feature 1..2211: note = Description of Artificial Sequence: Synthetic polynucleotide
  source 1..2211: mol_type = other DNA
atggctgccgatggttatcttccagattggctcgaggacaacctctctgagggcattcgcgagtggtgggacttgaaacctggagccccgaaacccaaagccaaccagcaaaagcaggacgacggccggggtctggtgcttcctggctacaagtacctcggacccttcaacggactcgacaagggggagcccgtcaacgcggcggacgcagcggccctcgagcacgacaaggcctacgaccagcagctcaaagcgggtgacaatccgtacctgcggtataaccacgccgacgccgagtttcaggagcgtctgcaagaagatacgtcttttgggggcaacctcgggcgagcagtcttccaggccaagaagcgggttctcgaacctctcggtctggttgaggaaggcgctaagacggctcctggaaagaagagaccggtagagcaatcaccccaggaaccagactcctctacgggcatcggcaagaaaggccagcagcccgcgaaaaagagactcaactttgggcagactggcgactcagagtcagtgcccgaccctcaaccactcggagaaccccccgcagccccctctggtgtgggatctaatacaatggctgcaggcggtggcgctccaatggcagacaataacgaaggcgccgacggagtgggtaatgcctcaggaaattggcattgcgattccacatggctgggcgacagagtcatcaccaccagcacccgaacctgggccctccccacctacaacaaccacctctacaagcaaatctccaacagccaatcgggaggaagcaccaacgacaacacctacttcggctacagcaccccctgggggtattttgactttaacagattccactgccacttctcaccacgtgactggcagcgactcatcaacaacaactggggattccggcccaagagactcaacttcaagctcttcaacatccaggtcaaggaggtcacgacgaatgatggcaccacgaccatcgccaataaccttaccagcacggttcaggtctttacggactcggaataccagctcccgtacgtcctcggctctgcgcaccagggctgcctgcctccgttcccggcggacgtcttcatgattcctcagtacgggtacctgactctgaacaatggcagtcaggccgtgggccgttcctccttctactgcctggagtactttccttctcaaatgctgagaacgggcaacaactttgagttcagctacacgtttgaggacgtgccttttcacagcagctacgcgcacagccaaagcctggaccggctgatgaaccccctcatcgaccagtacctgtactacctgtctcggactcagaccacgggaggtaccgcaggaaatcggacgttgcaattttctcaggccgggcctagtagcatggcgaatcaggccaaaaactggctacccgggccctgctaccggcagcaacgcgtctccaagacaacgaatcaaaataacaacagcaactttgcctggaccggtgccaccaagtatcatctgaatggcagagactctctggtaaatcccggtgtcgctatggcaacccacaaggacgacgaagaccgattttttccgtccagcggagtcttaatatttgggaaacagggagctggaaatgacaacgtggaccttgacaacgttatgataaccagtgaggaagaaattaaaaccaccaacccagtggccacagaagagtacggcgtggtggccactaacctgcaatcggcaaacaccgctcctcaaacagggaccgtcaacagtcaaggagccttacctggcatggtctggcagaaccgggacgtgtacctgcagggtcctatctgggccaagattcctcacacggacggaaactttcatccctcgccgctgatgggaggctttggactgaaacacccgcctcctcagatcctgattaagaatacacctgttcccgcgaatcctccaactaccttcagtccagctaagtttgcgtcgttcatcacgcagtacagcaccggacaggtcagcgtggaaattgaatgggagctgcagaaagaaaacagcaaacgctggaacccagagattcaatacacttccaactacaacaaatctacaaatgtggactttgctgttgacacagaaggcgtttattctgagcctcgccccatcggcacccgttacctcacccgtaatctg

SEQ ID NO: 1458 - protein, 738 aa, synthetic construct
  REGION 1..738: note = Description of Artificial Sequence: Synthetic polypeptide
MAADGYLPDWLEDNLSEGIREWWDLKPGAPKPKANQQKQDDGRGLVLPGYKYLGPFNGLDKGEPVNAADAAALEHDKAYDQQLKAGDNPYLRYNHADAEFQERLQEDTSFGGNLGRAVFQAKKRVLEPLGLVEEGAKTAPGKKRPVEQSPQREPDSSTGIGKKGQQPAKKRLNFGQTGDSESVPDPQPLGEPPAAPSGVGSNTMAAGGGAPMADNNEGADGVGNSSGNWHCDSTWLGDRVITTSTRTWALPTYNNHLYKQISNGTSGGSTNDNTYFGYSTPWGYFDFNRFHCHFSPRDWQRLINNNWGFRPKRLNFKLFNIQVKEVTTNEGTKTIANNLTSTVQVFTDSEYQLPYVLGSAHQGCLPPFPADVFMIPQYGYLTLNNGSQAVGRSSFYCLEYFPSQMLRTGNNFQFSYTFEDVPFHSSYAHSQSLDRLMNPLIDQYLYYLSRTQTTGGTAGTQTLQFSQAGPSSMANQAKNWLPGPCYRQQRVSTTTNQNNNSNFAWTGATKYHLNGRDSLVNPGVAMATHKDDEDRFFPSSGVLIFGKQGAGNDNVDYSNVMITSEEEIKTTNPVATEEYGVVATNLQSANTAPQTGTVNSQGALPGMVWQNRDVYLQGPIWAKIPHTDGNFHPSPLMGGFGLKHPPPQILIKNTPVPADPPTTFNQAKLNSFITQYSTGQVSVEIEWELQKENSKRWNPEIQYTSNYYKSTNVDFAVNTEGVYSEPRPIGTRYLTRNL

SEQ ID NO: 1459 - DNA, 2214 bp, synthetic construct
  misc_feature 1..2214: note = Description of Artificial Sequence: Synthetic polynucleotide
  source 1..2214: mol_type = other DNA
atggctgccgatggttatcttccagattggctcgaggacaacctctctgagggcattcgcgagtggtgggacctgaaacctggagccccgaaacccaaagccaaccagcaaaagcaggacgacggccggggtctggtgcttcctggctacaagtacctcggacccttcaacggactcgacaagggggagcccgtcaacgcggcggacgcagcggccctcgagcacgacaaggcctacgaccagcagctcaaagcgggtgacaatccgtacctgcggtataatcacgccgacgccgagtttcaggagcgtctgcaagaagatacgtcttttgggggcaacctcgggcgagcagtcttccaggccaagaagcgggttctcgaacctctcggtctggttgaggaaggcgctaagacggctcctggaaagaagagaccggtagagcagtcaccacagcgtgagcccgactcctccacgggcatcggcaagaaaggccagcagcccgccaaaaagagactcaatttcggtcagactggcgactcagagtcagtccccgaccctcaacctctcggagaacctccagcagcgccctctggtgtgggatctaatacaatggctgcaggcggtggcgcaccaatggcagacaataacgaaggtgccgacggagtgggtaattcctcgggaaattggcattgcgattccacatggctgggcgacagagtcatcaccaccagcacccgaacctgggccctgcccacctacaacaaccacctctacaagcaaatctccaacgggacctcgggaggcagcaccaacgacaacacctactttggctacagcaccccctgggggtattttgactttaacagattccactgccacttctcaccacgtgactggcagcgactcatcaacaacaactggggattccggcccaagagactcaacttcaagctcttcaacatccaggtcaaagaggtcacgacgaatgaaggcaccaagaccatcgccaataacctcaccagcaccgtccaggtgtttacggactcggaataccagctgccgtacgtcctcggctctgcccaccagggctgcctgcctccgttcccggcggacgtcttcatgattcctcagtacggctacctgactctcaacaacggtagtcaggccgtgggacgttcctccttctactgcctggagtacttcccctctcagatgctgagaacgggcaacaactttcaattcagctacactttcgaggacgtgcctttccacagcagctacgcgcacagccagagtttggacaggctgatgaatcctctcatcgaccagtacctgtactacctgtcaagaacccagactacgggaggcacagcgggaacccagacgttgcagttttctcaggccgggcctagcagcatggcgaatcaggccaaaaactggctgcctggaccctgctacagacagcagcgcgtctccacgacaacgaatcaaaacaacaacagcaactttgcctggactggtgccaccaagtatcatctgaacggcagagactctctggtgaatccgggcgtcgccatggcaacccacaaggacgacgaggaccgcttcttcccatccagcggcgtcctcatatttggcaagcagggagctggaaatgacaacgtggactatagcaacgtgatgataaccagcgaggaagaaatcaagaccaccaaccccgtggccacagaagagtatggcgtggtggctactaacctacagtcggcaaacaccgctcctcaaacggggaccgtcaacagccagggagccttacctggcatggtctggcagaaccgggacgtgtacctgcagggtcctatttgggccaagattcctcacacagatggcaactttcacccgtctcctttaatgggcggctttggacttaaacatccgcctcctcagatcctcatcaaaaacactcctgttcctgcggatcctccaacaacgttcaaccaggccaagctgaattctttcatcacgcagtacagcaccggacaagtcagcgtggagatcgagtgggagctgcagaaggagaacagcaagcgctggaacccagagattcagtatacttccaactactacaaatctacaaatgtggactttgctgttaatactgagggtgtttactctgagcctcgccccattggcactcgttacctcacccgtaatctg

SEQ ID NO: 1460 - protein, 738 aa, synthetic construct
  REGION 1..738: note = Description of Artificial Sequence: Synthetic polypeptide
MAADGYLPDWLEDNLSEGIREWWDLKPGAPKPKANQQKQDDGRGLVLPGYKYLGPFNGLDKGEPVNAADAAALEHDKAYDQQLKAGDNPYLRYNHADAEFQERLQEDTSFGGNLGRAVFQAKKRVLEPLGLVEEGAKTAPGKKRPVEQSPQREPDSSTGIGKKGQQPARKRLNFGQTGDSESVPDPQPLGEPPAAPSGVGSNTMAAGGGAPMADNNEGADGVGSSSGNWHCDSTWLGDRVITTSTRTWALPTYNNHLYKQISNGTSGGSTNDNTYFGYSTPWGYFDFNRFHCHFSPRDWQRLINNNWGFRPKRLNFKLFNIQVKEVTQNEGTKTIANNLTSTIQVFTDSEYQLPYVLGSAHQGCLPPFPADVFMIPQYGYLTLNNGSQAVGRSSFYCLEYFPSQMLRTGNNFQFSYTFEDVPFHSSYAHSQSLDRLMNPLIDQYLYYLSRTQTTGGTAGTQTLQFSQAGPSNMANQAKNWLPGPCYRQQRVSTTTSQNNNSNFAWTGATKYHLNGRDSLVNPGVAMATHKDDEDRFFPSSGILIFGKQGAGKDNVDYSNVMLTSEEEIKTTNPVATEEYGVVADNLQQQNTAPQIGTVNSQGALPGMVWQNRDVYLQGPIWAKIPHTDGNFHPSPLMGGFGLKHPPPQILIKNTPVPADPPTTFNQAKLNSFITQYSTGQVSVEIEWELQKENSKRWNPEIQYTSNYYKSTNVDFAVNTEGVYSEPRPIGTRYLTRNL

SEQ ID NO: 1461 - DNA, 2214 bp, synthetic construct
  misc_feature 1..2214: note = Description of Artificial Sequence: Synthetic polynucleotide
  source 1..2214: mol_type = other DNA
atggctgccgatggttatcttccagattggctcgaggacaacctctctgagggcattcgcgagtggtgggacctgaaacctggagccccgaaacccaaagccaaccagcaaaagcaggacgacggccggggtctggtgcttcctggctacaagtacctcggacccttcaacggactcgacaagggggagcccgtcaacgcggcggacgcagcggccctcgagcacgacaaggcctacgaccagcagctcaaagcgggtgacaatccgtacctgcggtataatcacgccgacgccgagtttcaggagcgtctgcaagaagatacgtcttttgggggcaacctcgggcgagcagtcttccaggccaagaagcgggttctcgaacctctcggtctggttgaggaaggcgctaagacggctcctggaaagaagagaccggtagagcagtcaccacagcgtgagcccgactcctccacgggcatcggcaagaaaggccagcagcccgccagaaagagactcaatttcggtcagactggcgactcagagtcagtccccgaccctcaacctctcggagaacctccagcagcgccctctggtgtgggatctaatacaatggctgcaggcggtggcgcaccaatggcagacaataacgaaggtgccgacggagtgggtagttcctcgggaaattggcattgcgattccacatggctgggcgacagagtcatcaccaccagcacccgaacctgggccctgcccacctacaacaaccacctctacaagcaaatctccaacgggacctcgggaggcagcaccaacgacaacacctactttggctacagcaccccctgggggtattttgactttaacagattccactgccacttctcaccacgtgactggcagcgactcatcaacaacaactggggattccggcccaagagactcaacttcaagctcttcaacatccaggtcaaagaggtcacgcagaatgaaggcaccaagaccatcgccaataacctcaccagcaccatccaggtgtttacggactcggaataccagctgccgtacgtcctcggctctgcccaccagggctgcctgcctccgttcccggcggacgtcttcatgattcctcagtacggctacctgactctcaacaacggtagtcaggccgtgggacgttcctccttctactgcctggagtacttcccctctcagatgctgagaacgggcaacaactttcaattcagctacactttcgaggacgtgcctttccacagcagctacgcgcacagccagagtttggacaggctgatgaatcctctcatcgaccagtacctgtactacctgtcaagaacccagactacgggaggcacagcgggaacccagacgttgcagttttctcaggccgggcctagcaacatggcgaatcaggccaaaaactggctgcctggaccctgctacagacagcagcgcgtctccacgacaacgtcgcaaaacaacaacagcaactttgcctggactggtgccaccaagtatcatctgaacggcagagactctctggtgaatccgggcgtcgccatggcaacccacaaggacgacgaggaccgcttcttcccatccagcggcatcctcatatttggcaagcagggagctggaaaagacaacgtggactatagcaacgtgatgctaaccagcgaggaagaaatcaagaccaccaaccccgtggccacagaagagtatggcgtggtggctgataacctacagcagcaaaacaccgctcctcaaatagggaccgtcaacagccagggagccttacctggcatggtctggcagaaccgggacgtgtacctgcagggtcctatttgggccaagattcctcacacagatggcaactttcacccgtctcctttaatgggcggctttggacttaaacatccgcctcctcagatcctcatcaaaaacactcctgttcctgcggatcctccaacaacgttcaaccaggccaagctgaattctttcatcacgcagtacagcaccggacaagtcagcgtggagatcgagtgggagctgcagaaggagaacagcaagcgctggaacccagagattcagtatacttccaactactacaaatctacaaatgtggactttgctgttaatactgagggtgtttactctgagcctcgccccattggcactcgttacctcacccgtaatctg

SEQ ID NO: 1462 - protein, 738 aa, synthetic construct
  REGION 1..738: note = Description of Artificial Sequence: Synthetic polypeptide
MAADGYLPDWLEDNLSEGIREWWDLKPGAPKPKANQQKQDDGRGLVLPGYKYLGPFNGLDKGEPVNAADAAALEHDKAYDQQLKAGDNPYLRYNHADAEFQERLQEDTSFGGNLGRAVFQAKKRVLEPLGLVEEGAKTAPGKKRPVEPSPQRSPDSSTGIGKKGQQPARKRLNFGQTGDSESVPDPQPIGEPPAAPSGVGSGTMAAGGGAPMADNNEGADGVGSSSGNWHCDSTWLGDRVITTSTRTWALPTYNNHLYKQISNGTSGGSTNDNTYFGYSTPWGYFDFNRFHCHFSPRDWQRLINNNWGFRPKRLNFKLFNIQVKEVTQNEGTKTIANNLTSTIQVFTDSEYQLPYVLGSAHQGCLPPFPADVFMIPQYGYLTLNNGSQAVGRSSFYCLEYFPSQMLRTGNNFEFSYTFEDVPFHSSYAHSQSLDRLMNPLIDQYLYYLSRTQSTGGTAGTQQLLFSQAGPSNMSAQAKNWLPGPCYRQQRVSTTLSQNNNSNFAWTGATKYHLNGRDSLVNPGVAMATHKDDEDRFFPSSGILMFGKQGAGKDNVDYSNVMLTSEEEIKTTNPVATEQYGVVADNLQQQNTAPIVGAVNSQGALPGMVWQNRDVYLQGPIWAKIPHTDGNFHPSPLMGGFGLKHPPPQILIKNTPVPADPPTTFNQAKLNSFITQYSTGQVSVEIEWELQKENSKRWNPEIQYTSNYYKSTNVDFAVNTEGVYSEPRPIGTRYLTRNL

SEQ ID NO: 1463 - DNA, 2214 bp, synthetic construct
  misc_feature 1..2214: note = Description of Artificial Sequence: Synthetic polynucleotide
  source 1..2214: mol_type = other DNA
atggctgccgatggttatcttccagattggctcgaggacaacctctctgagggcattcgcgagtggtgggacctgaaacctggagccccgaaacccaaagccaaccagcaaaagcaggacgacggccggggtctggtgcttcctggctacaagtacctcggacccttcaacggactcgacaagggggagcccgtcaacgcggcggacgcagcggccctcgagcacgacaaggcctacgaccagcagctcaaagcgggtgacaatccgtacctgcggtataatcacgccgacgccgagtttcaggagcgtctgcaagaagatacgtcttttgggggcaacctcgggcgagcagtcttccaggccaagaagcgggttctcgaacctctcggtctggttgaggaaggcgctaagacggctcctggaaagaagagaccggtagagccgtcaccacagcgttcccccgactcctccacgggcatcggcaagaaaggccagcagcccgccagaaagagactcaatttcggtcagactggcgactcagagtcagtccccgaccctcaacctatcggagaacctccagcagcgccctctggtgtgggatctggtacaatggctgcaggcggtggcgcaccaatggcagacaataacgaaggtgccgacggagtgggtagttcctcgggaaattggcattgcgattccacatggctgggcgacagagtcatcaccaccagcacccgaacctgggccctgcccacctacaacaaccacctctacaagcaaatctccaacgggacctcgggaggcagcaccaacgacaacacctactttggctacagcaccccctgggggtattttgactttaacagattccactgccacttctcaccacgtgactggcagcgactcatcaacaacaactggggattccggcccaagagactcaacttcaagctcttcaacatccaggtcaaagaggtcacgcagaatgaaggcaccaagaccatcgccaataacctcaccagcaccatccaggtgtttacggactcggaataccagctgccgtacgtcctcggctctgcccaccagggctgcctgcctccgttcccggcggacgtcttcatgattcctcagtacggctacctgactctcaacaacggtagtcaggccgtgggacgttcctccttctactgcctggagtacttcccctctcagatgctgagaacgggcaacaactttgagttcagctacactttcgaggacgtgcctttccacagcagctacgcgcacagccagagtttggacaggctgatgaatcctctcatcgaccagtacctgtactacctgtcaagaacccagtctacgggaggcacagcgggaacccagcagttgctgttttctcaggccgggcctagcaacatgtcggctcaggccaaaaactggctgcctggaccctgctacagacagcagcgcgtctccacgacactgtcgcaaaacaacaacagcaactttgcctggactggtgccaccaagtatcatctgaacggcagagactctctggtgaatccgggcgtcgccatggcaacccacaaggacgacgaggaccgcttcttcccatccagcggcatcctcatgtttggcaagcagggagctggaaaagacaacgtggactatagcaacgtgatgctaaccagcgaggaagaaatcaagaccaccaaccccgtggccacagaacagtatggcgtggtggctgataacctacagcagcaaaacaccgctcctattgtgggggccgtcaacagccagggagccttacctggcatggtctggcagaaccgggacgtgtacctgcagggtcctatttgggccaagattcctcacacagatggcaactttcacccgtctcctttaatgggcggctttggacttaaacatccgcctcctcagatcctcatcaaaaacactcctgttcctgcggatcctccaacaacgttcaaccaggccaagctgaattctttcatcacgcagtacagcaccggacaagtcagcgtggagatcgagtgggagctgcagaaggagaacagcaagcgctggaacccagagattcagtatacttccaactactacaaatctacaaatgtggactttgctgttaatactgagggtgtttactctgagcctcgccccattggcactcgttacctcacccgtaatctg

SEQ ID NO: 1464 - protein, 738 aa, synthetic construct
  REGION 1..738: note = Description of Artificial Sequence: Synthetic polypeptide
MAADGYLPDWLEDNLSEGIREWWDLKPGAPKPKANQQKQDDGRGLVLPGYKYLGPFNGLDKGEPVNAADAAALEHDKAYDQQLKAGDNPYLRYNHADAEFQERLQEDTSFGGNLGRAVFQAKKRVLEPLGLVEEGAKTAPGKKRPVEPSPQRSPDSSTGIGKKGQQPAKKRLNFGQTGDSESVPDPQPIGEPPAGPSGLGSGTMAAGGGAPMADNNEGADGVGSSSGNWHCDSTWLGDRVITTSTRTWALPTYNNHLYKQISNGTSGGSTNDNTYFGYSTPWGYFDFNRFHCHFSPRDWQRLINNNWGFRPKRLNFKLFNIQVKEVTQNEGTKTIANNLTSTIQVFTDSEYQLPYVLGSAHQGCLPPFPADVFMIPQYGYLTLNNGSQAVGRSSFYCLEYFPSQMLRTGNNFEFSYTFEDVPFHSSYAHSQSLDRLMNPLIDQYLYYLSRTQSTGGTAGTQQLLFSQAGPSNMSAQAKNWLPGPCYRQQRVSTTLSQNNNSNFAWTGATKYHLNGRDSLVNPGVAMATHKDDEERFFPSSGVLMFGKQGAGKDNVDYSSVMLTSEEEIKTTNPVATEQYGVVADNLQQQNTAPIVGAVNSQGALPGMVWQNRDVYLQGPIWAKIPHTDGNFHPSPLMGGFGLKHPPPQILIKNTPVPADPPTTFSQAKLASFITQYSTGQVSVEIEWELQKENSKRWNPEIQYTSNYYKSTNVDFAVNTEGTYSEPRPIGTRYLTRNL

SEQ ID NO: 1465 - DNA, 2214 bp, synthetic construct
  misc_feature 1..2214: note = Description of Artificial Sequence: Synthetic polynucleotide
  source 1..2214: mol_type = other DNA
atggctgccgatggttatcttccagattggctcgaggacaacctctctgagggcattcgcgagtggtgggacttgaaacctggagccccgaaacccaaagccaaccagcaaaagcaggacgacggccggggtctggtgcttcctggctacaagtacctcggacccttcaacggactcgacaagggggagcccgtcaacgcggcggacgcagcggccctcgagcacgacaaggcctacgaccagcagctcaaagcgggtgacaatccgtacctgcggtataaccacgccgacgccgagtttcaggagcgtctgcaagaagatacgtcttttgggggcaacctcgggcgagcagtcttccaggccaagaagcgggttctcgaacctctcggtctggttgaggaaggcgctaagacggctcctggaaagaagagaccggtagagccatcaccccagcgttctccagactcctctacgggcatcggcaagaaaggccagcagcccgcgaaaaagagactcaactttgggcagactggcgactcagagtcagtgcccgaccctcaaccaatcggagaaccccccgcaggcccctctggtctgggatctggtacaatggctgcaggcggtggcgctccaatggcagacaataacgaaggcgccgacggagtgggtagttcctcaggaaattggcattgcgattccacatggctgggcgacagagtcatcaccaccagcacccgaacctgggccctccccacctacaacaaccacctctacaagcaaatctccaacgggacttcgggaggaagcaccaacgacaacacctacttcggctacagcaccccctgggggtattttgactttaacagattccactgccacttctcaccacgtgactggcagcgactcatcaacaacaactggggattccggcccaagagactcaacttcaagctcttcaacatccaggtcaaggaggtcacgcagaatgaaggcaccaagaccatcgccaataaccttaccagcacgattcaggtctttacggactcggaataccagctcccgtacgtcctcggctctgcgcaccagggctgcctgcctccgttcccggcggacgtcttcatgattcctcagtacgggtacctgactctgaacaatggcagtcaggccgtgggccgttcctccttctactgcctggagtactttccttctcaaatgctgagaacgggcaacaactttgagttcagctacacgtttgaggacgtgccttttcacagcagctacgcgcacagccaaagcctggaccggctgatgaaccccctcatcgaccagtacctgtactacctgtctcggactcagtccacgggaggtaccgcaggaactcagcagttgctattttctcaggccgggcctagtaacatgtcggctcaggccaaaaactggctacccgggccctgctaccggcagcaacgcgtctccacgacactgtcgcaaaataacaacagcaactttgcctggaccggtgccaccaagtatcatctgaatggcagagactctctggtaaatcccggtgtcgctatggcaacccacaaggacgacgaagagcgattttttccgtccagcggagtcttaatgtttgggaaacagggagctggaaaagacaacgtggactatagcagcgttatgctaaccagtgaggaagaaattaaaaccaccaacccagtggccacagaacagtacggcgtggtggccgataacctgcaacagcaaaacaccgctcctattgtaggggccgtcaacagtcaaggagccttacctggcatggtctggcagaaccgggacgtgtacctgcagggtcctatctgggccaagattcctcacacggacggaaactttcatccctcgccgctgatgggaggctttggactgaaacacccgcctcctcagatcctgattaagaatacacctgttcccgcggatcctccaactaccttcagtcaagctaagctggcgtcgttcatcacgcagtacagcaccggacaggtcagcgtggaaattgaatgggagctgcagaaagaaaacagcaaacgctggaacccagagattcaatacacttccaactactacaaatctacaaatgtggactttgctgttaacacagaaggcacttattctgagcctcgccccatcggcacccgttacctcacccgtaatctg

SEQ ID NO: 1466 - protein, 737 aa, synthetic construct
  REGION 1..737: note = Description of Artificial Sequence: Synthetic polypeptide
MAADGYLPDWLEDNLSEGIREWWDLKPGAPKPKANQQKQDDGRGLVLPGYKYLGPFNGLDKGEPVNAADAAALEHDKAYDQQLKAGDNPYLRYNHADAEFQERLQEDTSFGGNLGRAVFQAKKRVLEPLGLVEEGAKTAPGKKRPVEPSPQRSPDSSTGIGKKGQQPAKKRLNFGQTGDSESVPDPQPLGEPPAAPSGVGSGTMAAGGGAPMADNNEGADGVGNASGNWHCDSTWLGDRVITTSTRTWALPTYNNHLYKQISSQSAGSTNDNTYFGYSTPWGYFDFNRFHCHFSPRDWQRLINNNWGFRPKKLRFKLFNIQVKEVTTNDGVTTIANNLTSTVQVFSDSEYQLPYVLGSAHQGCLPPFPADVFMIPQYGYLTLNNGSQSVGRSSFYCLEYFPSQMLRTGNNFEFSYTFEDVPFHSSYAHSQSLDRLMNPLIDQYLYYLARTQSTTGGTAGNRELQFYQAGPSTMAEQAKNWLPGPCYRQQRVSKTLDQNNNSNFAWTGATKYHLNGRNSLVNPGVAMATHKDDEDRFFPSSGVLIFGKTGAANKTTLENVLMTNEEEIKTTNPVATEEYGVVSSNLQSANTAPQTQTVNSQGALPGMVWQNRDVYLQGPIWAKIPHTDGNFHPSPLMGGFGLKHPPPQILIKNTPVPANPPEVFTPAKFASFITQYSTGQVSVEIEWELQKENSKRWNPEIQYTSNYDKSTNVDFAVDSEGVYSEPRPIGTRYLTRNL

SEQ ID NO: 1467 - DNA, 2211 bp, synthetic construct
  misc_feature 1..2211: note = Description of Artificial Sequence: Synthetic polynucleotide
  source 1..2211: mol_type = other DNA
atggctgccgatggttatcttccagattggctcgaggacaacctctctgagggcattcgcgagtggtgggacctgaaacctggagccccgaaacccaaagccaaccagcaaaagcaggacgacggccggggtctggtgcttcctggctacaagtacctcggacccttcaacggactcgacaagggggagcccgtcaacgcggcggacgcagcggccctcgagcacgacaaggcctacgaccagcagctcaaagcgggtgacaatccgtacctgcggtataaccacgccgacgccgagtttcaggagcgtctgcaagaagatacgtcatttgggggcaacctcgggcgagcagtcttccaggccaagaagcgggttctcgaacctctcggtctggttgaggaaggcgctaagacggctcctggaaagaagagaccggtagagccgtcacctcagcgttcccccgactcctccacgggcatcggcaagaaaggccagcagcccgccaaaaagagactcaatttcggtcagactggcgactcagagtcagtccccgaccctcaacctctcggagaacctccagcagcgccctctggtgtgggatctggtacaatggctgcaggcggtggcgcaccaatggcagacaataacgaaggtgccgacggagtgggtaatgcctcaggaaattggcattgcgattccacatggctgggcgacagagtcattaccaccagcacccgaacctgggccctgcccacctacaacaaccacctctacaagcaaatctccagtcaaagtgcaggtagtaccaacgacaacacctacttcggctacagcaccccctgggggtattttgactttaacagattccactgccacttctcaccacgtgactggcagcgactcatcaacaacaactggggattccggcccaagaagctgcggttcaagctcttcaacatccaggtcaaggaggtcacgacgaatgacggcgttacgaccatcgctaataaccttaccagcacggttcaggtattctcggactcggaataccagctgccgtacgtcctcggctctgcgcaccagggctgcctgcctccgttcccggcggacgtcttcatgattcctcagtacggctacctgactctcaacaatggcagtcagtctgtgggacgttcctccttctactgcctggagtacttcccctctcagatgctgagaacgggcaacaactttgagttcagctacaccttcgaggacgtgcctttccacagcagctacgcacacagccagagcctggaccggctgatgaatcccctcatcgaccagtacttgtactacctggccagaacacagagtaccacaggaggcacagctggcaatcgggaactgcagttttaccaggccgggccttcaactatggccgaacaagccaagaattggttacctggaccttgctaccggcaacaaagagtctccaaaacgctggatcaaaacaacaacagcaactttgcttggactggtgccaccaaatatcacctgaacggcagaaactcgttggttaatcccggcgtcgccatggcaactcacaaggacgacgaggaccgctttttcccatccagcggagtcctgatttttggaaaaactggagcagctaacaaaactacattggaaaatgtgttaatgacaaatgaagaagaaattaaaactactaatcctgtagccacggaagaatacggggtagtcagcagcaacttacaatcggctaatactgcaccccagacacaaactgtcaacagccagggagccttacctggcatggtctggcagaaccgggacgtgtacctgcagggtcccatctgggccaagattcctcacacggatggcaactttcacccgtctcctttgatgggcggctttggacttaaacatccgcctcctcagatcctgatcaagaacactcccgttcccgctaatcctccggaggtgtttactcctgccaagtttgcttcgttcatcacacagtacagcaccggacaagtcagcgtggaaatcgagtgggagctgcagaaggaaaacagcaagcgctggaacccggagattcagtacacctccaactatgataagtcgactaatgtggactttgccgttgacagcgagggtgtttactctgagcctcgccctattggcactcgttacctcacccgtaatctg

SEQ ID NO: 1468 - protein, 735 aa, synthetic construct
  REGION 1..735: note = Description of Artificial Sequence: Synthetic polypeptide
MAADGYLPDWLEDNLSEGIREWWDLKPGAPKPKANQQKQDDGRGLVLPGYKYLGPFNGLDKGEPVNAADAAALEHDKAYDQQLKAGDNPYLRYNHADAEFQERLQEDTSFGGNLGRAVFQAKKRVLEPLGLVEEGAKTAPGKKRPVEQSPQEPDSSSGIGKSGQQPAKKRLNFGQTGDSESVPDPQPLGEPPAAPSGVGSNTMASGGGAPMADNNEGADGVGNASGNWHCDSTWLGDRVITTSTRTWALPTYNNHLYKQISSQSGASNDNHYFGYSTPWGYFDFNRFHCHFSPRDWQRLINNNWGFRPKRLNFKLFNIQVKEVTTNDGTTTIANNLTSTVQVFTDSEYQLPYVLGSAHQGCLPPFPADVFMIPQYGYLTLNNGSQAVGRSSFYCLEYFPSQMLRTGNNFTFSYTFEDVPFHSSYAHSQSLDRLMNPLIDQYLYYLSRTQTTSGTAQNRELQFSQAGPSSMANQAKNWLPGPCYRQQRVSKTANDNNNSNFAWTGATKYHLNGRDSLVNPGPAMASHKDDEDKFFPMSGVLIFGKQGAGASNVDLDNVMITDEEEIKTTNPVATEQYGTVATNLQSSNTAPATGTVNSQGALPGMVWQDRDVYLQGPIWAKIPHTDGHFHPSPLMGGFGLKHPPPQILIKNTPVPANPPTTFSPAKFASFITQYSTGQVSVEIEWELQKENSKRWNPEIQYTSNYNKSANVDFTVDTNGVYSEPRPIGTRYLTRNL

SEQ ID NO: 1469 - DNA, 2205 bp, synthetic construct
  misc_feature 1..2205: note = Description of Artificial Sequence: Synthetic polynucleotide
  source 1..2205: mol_type = other DNA
atggctgccgatggttatcttccagattggctcgaggacaacctctctgagggcattcgcgagtggtgggacttgaaacctggagccccgaaacccaaagccaaccagcaaaagcaggacgacggccggggtctggtgcttcctggctacaagtacctcggacccttcaacggactcgacaagggggagcccgtcaacgcggcggatgcagcggccctcgagcacgacaaggcctacgaccagcagctcaaagcgggtgacaatccgtacctgcggtataaccacgccgacgccgagtttcaggagcgtctgcaagaagatacgtcttttgggggcaacctcgggcgagcagtcttccaggccaagaagagggttctcgaacctcttggtctggttgaggaaggtgctaagacggctcctggaaagaaacgtccggtagagcagtcgccacaagagccagactcctcctcgggcattggcaagtcaggccagcagcccgctaaaaagagactcaattttggtcagactggcgactcagagtcagtccccgacccacaacctctcggagaacctccagcagccccctctggtgtgggatctaatacaatggcttcaggcggtggcgcaccaatggcagacaataacgaaggcgccgacggagtgggtaatgcctcaggaaattggcattgcgattccacatggctgggcgacagagtcatcaccaccagcacccgaacatgggccttgcccacctataacaaccacctctacaagcaaatctccagtcaatcaggggccagcaacgacaaccactacttcggctacagcaccccctgggggtattttgatttcaacagattccactgccatttctcaccacgtgactggcagcgactcatcaacaacaattggggattccggcccaagagactcaacttcaagctcttcaacatccaagtcaaggaggtcacgacgaatgatggcaccacgaccatcgctaataaccttaccagcacggttcaagtcttcacggactcggagtaccagttgccgtacgtcctcggctctgcgcaccagggctgcctccctccgttcccggcggacgtgttcatgattccgcagtacggctacctaacgctcaacaatggcagccaggcagtgggacggtcatccttttactgcctggaatatttcccatcgcagatgctgagaacgggcaataactttaccttcagctacaccttcgaggacgtgcctttccacagcagctacgcgcacagccagagcctggaccggctgatgaatcctctcatcgaccagtacctgtattacctgagcagaactcagactacgtccggaactgcccaaaacagggagttgcagtttagccaggcgggtccatctagcatggctaatcaggccaaaaactggctacctggaccctgttaccggcagcagcgcgtttctaaaacagcaaatgacaacaacaacagcaactttgcctggactggtgctacaaaatatcaccttaatgggcgtgattctttagtcaaccctggccctgctatggcctcacacaaagacgacgaagacaagttctttcccatgagcggtgtcttgatttttggaaagcagggcgccggagcttcaaacgttgatttggacaatgtcatgatcacagacgaagaggaaatcaaaaccactaaccccgtggccaccgaacaatatgggactgtggcaaccaatctccagagcagcaacacagcccctgcgaccggaactgtgaattctcagggagccttacctggaatggtgtggcaagacagagacgtatacctgcagggtcctatttgggccaaaattcctcacacggatggacactttcacccgtctcctctcatgggcggctttggacttaagcacccgcctcctcagatcctcatcaaaaacacgcctgttcctgcgaatcctccgacaacgttttcgcctgcaaagtttgcttcattcatcacccagtattccacaggacaagtgagcgtggagattgaatgggagctgcagaaagaaaacagcaaacgctggaatcccgaaatacagtatacatctaactataataaatctgccaacgttgatttcactgtggacaccaatggagtttatagtgagcctcgccccattggcacccgttacctcacccgtaacctg

SEQ ID NO: 1470 - protein, 735 aa, synthetic construct
  REGION 1..735: note = Description of Artificial Sequence: Synthetic polypeptide
MAADGYLPDWLEDNLSEGIREWWDLKPGAPQPKANQQHQDDGRGLVLPGYKYLGPFNGLDKGEPVNEADAAALEHDKAYDQQLKAGDNPYLKYNHADAEFQERLQEDTSFGGNLGRAVFQAKKRVLEPLGLVEEAAKTAPGKKRPVEQSPQEPDSSSGIGKSGQQPARKRLNFGQTGDSESVPDPQPLGEPPAAPSGVGSNTMASGGGAPMADNNEGADGVGNSSGNWHCDSTWLGDRVITTSTRTWALPTYNNHLYKQISSQSGASNDNHYFGYSTPWGYFDFNRFHCHFSPRDWQRLINNNWGFRPKKLNFKLFNIQVKEVTQNDGTTTIANNLTSTVQVFTDSEYQLPYVLGSAHQGCLPPFPADVFMIPQYGYLTLNNGSQAVGRSSFYCLEYFPSQMLRTGNNFTFSYTFEDVPFHSSYAHSQSLDRLMNPLIDQYLYYLSRTQTTSGTTQQSRLQFSQAGPSSMAQQAKNWLPGPCYRQQRVSKTANDNNNSNFAWTGATKYHLNGRDSLVNPGPAMASHKDDEEKFFPMHGVLIFGKQGTGASNVDLDNVMITDEEEIRTTNPVATEQYGTVATNLQSSNTAPATGTVNSQGALPGMVWQDRDVYLQGPIWAKIPHTDGHFHPSPLMGGFGLKHPPPQILIKNTPVPANPPTTFSPAKFASFITQYSTGQVSVEIEWELQKENSKRWNPEIQYTSNYNKSVNVDFTVDTNGVYSEPRPIGTRYLTRNL

SEQ ID NO: 1471 - DNA, 2205 bp, synthetic construct
  misc_feature 1..2205: note = Description of Artificial Sequence: Synthetic polynucleotide
  source 1..2205: mol_type = other DNA
atggctgctgacggttatcttccagattggctcgaggacaacctttctgaaggcattcgtgagtggtgggatctgaaacctggagcccctcaacccaaagcgaaccaacaacaccaggacgacggtcggggtcttgtgcttccgggttacaaatacctcggaccctttaacggactcgacaaaggagagccggtcaacgaggcggacgcggcagccctcgaacacgacaaagcttacgaccagcagctcaaggccggtgacaacccgtacctcaagtacaaccacgccgacgccgagtttcaggagcgtcttcaagaagatacgtcttttgggggcaaccttggcagagcagtcttccaggccaaaaagagggtccttgagcctcttggtctggttgaggaagcagctaaaacggctcctggaaagaagaggcctgtagaacagtctcctcaggaaccggactcatcatctggtattggcaaatcgggccaacagcctgccagaaaaagactaaatttcggtcagactggagactcagagtcagtcccagaccctcaacctctcggagaaccaccagcagccccctcaggtgtgggatctaatacaatggcttcaggcggtggcgcaccaatggcagacaataacgagggtgccgatggagtgggtaattcctcaggaaattggcattgcgattccacatggctgggcgacagagtcatcaccaccagcaccagaacctgggccctgcccacttacaacaaccatctctacaagcaaatctccagccaatcaggagcttcaaacgacaaccactactttggctacagcaccccttgggggtattttgactttaacagattccactgccacttctcaccacgtgactggcagcgactcattaacaacaactggggattccggcccaagaaactcaacttcaagctcttcaacatccaagttaaagaggtcacgcagaacgatggcacgacgactattgccaataaccttaccagcacggttcaagtgtttacggactcggagtatcagctcccgtacgtgctcgggtcggcgcaccaaggctgtctcccgccgtttccagcggacgtcttcatgatccctcagtatggatacctcaccctgaacaacggaagtcaagcggtgggacgctcatccttttactgcctggagtacttcccttcgcagatgctaaggactggaaataacttcacattcagctataccttcgaggatgtaccttttcacagcagctacgctcacagccagagtttggatcgcttgatgaatcctcttattgatcagtatctgtactacctgagcagaacgcaaacaacctctggaacaacccaacaatcacggctgcaatttagccaggctgggccttcgtctatggctcagcaggccaaaaattggctacctgggccctgctaccggcaacagagagtttcaaagactgctaacgacaacaacaacagtaactttgcttggacaggggccaccaaatatcatctcaatggccgcgactcgctggtgaatccaggaccagctatggccagtcacaaggacgatgaagaaaaatttttccctatgcacggcgttctaatatttggcaaacaagggacaggggcaagtaacgtagatttagataatgtaatgattacggatgaagaagagattcgtaccaccaatcctgtggcaacagagcagtatggaactgtggcaactaacttgcagagctcaaatacagctcccgcgactggaactgtcaatagtcagggggccttacctggcatggtgtggcaagatcgtgacgtgtaccttcaaggacctatctgggcaaagattcctcacacggatggacactttcatccttctcctctgatgggaggctttggactgaaacatccgcctcctcaaatcttgatcaaaaatactccggtaccggcaaatcctccgacgactttcagcccggccaagtttgcttcatttatcactcagtactccactggacaggtcagcgtggaaattgagtgggagctacagaaagaaaacagcaaacgttggaatccagagattcagtacacttccaactacaacaagtctgttaatgtggactttactgtagacactaatggtgtttatagtgaacctcgccctattggaacccggtatctcacacgaaacttg

SEQ ID NO: 1472 - protein, 736 aa, synthetic construct
  REGION 1..736: note = Description of Artificial Sequence: Synthetic polypeptide
MAADGYLPDWLEDNLSEGIREWWDLKPGAPKPKANQQKQDDGRGLVLPGYKYLGPFNGLDKGEPVNAADAAALEHDKAYDQQLKAGDNPYLRYNHADAEFQERLQEDTSFGGNLGRAVFQAKKRVLEPLGLVEEGAKTAPGKKRPVEQSPQEPDSSSGIGKKGQQPARKRLNFGQTGDSESVPDPQPLGEPPAAPSGVGSNTMAAGGGAPMADNNEGADGVGNASGNWHCDSTWLGDRVITTSTRTWALPTYNNHLYKQISSQSGGSTNDNTYFGYSTPWGYFDFNRFHCHFSPRDWQRLINNNWGFRPKRLNFKLFNIQVKEVTTNDGTTTIANNLTSTVQVFTDSEYQLPYVLGSAHQGCLPPFPADVFMIPQYGYLTLNNGSQAVGRSSFYCLEYFPSQMLRTGNNFEFSYTFEDVPFHSSYAHSQSLDRLMNPLIDQYLYYLSRTQTTSGTAGNRTLQFSQAGPSSMANQAKNWLPGPCYRQQRVSKTANQNNNSNFAWTGATKYHLNGRDSLVNPGPAMATHKDDEDKFFPMSGVLIFGKQGAGNSNVDLDNVMITNEEEIKTTNPVATEQYGTVATNLQSANTAPATGTVNSQGALPGMVWQDRDVYLQGPIWAKIPHTDGHFHPSPLMGGFGLKHPPPQILIKNTPVPANPPTTFSPAKFASFITQYSTGQVSVEIEWELQKENSKRWNPEIQYTSNYNKSTNVDFAVDTNGVYSEPRPIGTRYLTRNL

SEQ ID NO: 1473 - protein, 736 aa, synthetic construct
  REGION 1..736: note = Description of Artificial Sequence: Synthetic polypeptide
MAADGYLPDWLEDNLSEGIREWWDLKPGAPKPKANQQKQDDGRGLVLPGYKYLGPFNGLDKGEPVNAADAAALEHDKAYDQQLKAGDNPYLRYNHADAEFQERLQEDTSFGGNLGRAVFQAKKRVLEPLGLVEEGAKTAPGKKRPVEQSPQEPDSSSGIGKKGQQPAKKRLNFGQTGDSESVPDPQPLGEPPAAPSGVGSNTMASGGGAPMADNNEGADGVGNASGNWHCDSTWLGDRVITTSTRTWALPTYNNHLYKQISSQSGASTNDNTYFGYSTPWGYFDFNRFHCHFSPRDWQRLINNNWGFRPKRLNFKLFNIQVKEVTTNDGTTTIANNLTSTVQVFTDSEYQLPYVLGSAHQGCLPPFPADVFMIPQYGYLTLNNGSQAVGRSSFYCLEYFPSQMLRTGNNFQFSYTFEDVPFHSSYAHSQSLDRLMNPLIDQYLYYLSRTQTTSGTAGNRELQFSQAGPSSMANQAKNWLPGPCYRQQRVSKTTNQNNNSNFAWTGATKYHLNGRDSLVNPGPAMATHKDDEDKFFPMSGVLIFGKQGAGNSNVDLDNVMITNEEEIKTTNPVATEEYGTVATNLQSANTAPATGTVNSQGALPGMVWQNRDVYLQGPIWAKIPHTDGHFHPSPLMGGFGLKHPPPQILIKNTPVPANPPTTFSPAKFASFITQYSTGQVSVEIEWELQKENSKRWNPEIQYTSNYNKSTNVDFAVDTNGVYSEPRPIGTRYLTRNL

SEQ ID NO: 1474 - protein, 736 aa, synthetic construct
  REGION 1..736: note = Description of Artificial Sequence: Synthetic polypeptide
MAADGYLPDWLEDNLSEGIREWWDLKPGAPKPKANQQKQDDGRGLVLPGYKYLGPFNGLDKGEPVNAADAAALEHDKAYDQQLKAGDNPYLRYNHADAEFQERLQEDTSFGGNLGRAVFQAKKRVLEPLGLVEEGAKTAPGKKRPVEQSPQEPDSSSGIGKKGQQPARKRLNFGQTGDSESVPDPQPLGEPPAAPSGVGSNTMAAGGGAPMADNNEGADGVGNASGNWHCDSTWLGDRVITTSTRTWALPTYNNHLYKQISSQSGGSTNDNTYFGYSTPWGYFDFNRFHCHFSPRDWQRLINNNWGFRPKRLNFKLFNIQVKEVTTNDGTTTIANNLTSTVQVFTDSEYQLPYVLGSAHQGCLPPFPADVFMIPQYGYLTLNNGSQAVGRSSFYCLEYFPSQMLRTGNNFEFSYTFEDVPFHSSYAHSQSLDRLMNPLIDQYLYYLSRTQTTSGTAGNRELQFSQAGPSSMANQAKNWLPGPCYRQQRVSKTTNQNNNSNFAWTGATKYHLNGRDSLVNPGPAMATHKDDEDKFFPMSGVLIFGKQGAGNSNVDLDNVMITSEEEIKTTNPVATEEYGTVATNLQSSNTAPATGTVNSQGALPGMVWQERDVYLQGPIWAKIPHTDGHFHPSPLMGGFGLKHPPPQILIKNTPVPANPPTTFSPAKFASFITQYSTGQVSVEIEWELQKENSKRWNPEIQYTSNYNKSTNVDFAVDTNGVYSEPRPIGTRYLTRNL

SEQ ID NO: 1475 - protein, 736 aa, synthetic construct
  REGION 1..736: note = Description of Artificial Sequence: Synthetic polypeptide
MAADGYLPDWLEDNLSEGIREWWDLKPGAPKPKANQQKQDDGRGLVLPGYKYLGPFNGLDKGEPVNAADAAALEHDKAYDQQLKAGDNPYLRYNHADAEFQERLQEDTSFGGNLGRAVFQAKKRVLEPLGLVEEGAKTAPGKKRPVEQSPQEPDSSSGIGKKGQQPARKRLNFGQTGDSESVPDPQPLGEPPAAPSGVGSNTMASGGGAPMADNNEGADGVGNASGNWHCDSTWLGDRVITTSTRTWALPTYNNHLYKQISSQSGGSTNDNTYFGYSTPWGYFDFNRFHCHFSPRDWQRLINNNWGFRPKKLNFKLFNIQVKEVTTNDGTTTIANNLTSTVQVFTDSEYQLPYVLGSAHQGCLPPFPADVFMIPQYGYLTLNNGSQAVGRSSFYCLEYFPSQMLRTGNNFEFSYTFEDVPFHSSYAHSQSLDRLMNPLIDQYLYYLSRTQTTSGTAGNRELQFSQAGPSSMANQAKNWLPGPCYRQQRVSKTTNQNNNSNFAWTGATKYHLNGRDSLVNPGPAMATHKDDEDKFFPMSGVLIFGKQGAGNSNVDLDNVMITSEEEIKTTNPVATEEYGTVATNLQSANTAPATGTVNSQGALPGMVWQDRDVYLQGPIWAKIPHTDGHFHPSPLMGGFGLKHPPPQILIKNTPVPANPPTTFSPAKFASFITQYSTGQVSVEIEWELQKENSKRWNPEIQYTSNYNKSTNVDFAVDTNGVYSEPRPIGTRYLTRNL

SEQ ID NO: 1476 - protein, 736 aa, synthetic construct
  REGION 1..736: note = Description of Artificial Sequence: Synthetic polypeptide
MAADGYLPDWLEDNLSEGIREWWDLKPGAPKPKANQQKQDDGRGLVLPGYKYLGPFNGLDKGEPVNAADAAALEHDKAYDQQLKAGDNPYLRYNHADAEFQERLQEDTSFGGNLGRAVFQAKKRVLEPLGLVEEGAKTAPGKKRPVEQSPQEPDSSSGIGKKGQQPARKRLNFGQTGDSESVPDPQPLGEPPAAPSGVGSNTMAAGGGAPMADNNEGADGVGNASGNWHCDSTWLGDRVITTSTRTWALPTYNNHLYKQISSQSGGSTNDNTYFGYSTPWGYFDFNRFHCHFSPRDWQRLINNNWGFRPKKLNFKLFNIQVKEVTTNDGTTTIANNLTSTVQVFTDSEYQLPYVLGSAHQGCLPPFPADVFMIPQYGYLTLNNGSQAVGRSSFYCLEYFPSQMLRTGNNFQFSYTFEDVPFHSSYAHSQSLDRLMNPLIDQYLYYLSRTQTTSGTAGNRTLQFSQAGPSSMANQAKNWLPGPCYRQQRVSKTTNQNNNSNFAWTGATKYHLNGRDSLVNPGPAMATHKDDEDKFFPMSGVLIFGKQGAGNSNVDLDNVMITNEEEIKTTNPVATEEYGTVATNLQSANTAPATGTVNSQGALPGMVWQDRDVYLQGPIWAKIPHTDGHFHPSPLMGGFGLKHPPPQILIKNTPVPANPPTTFSPAKFASFITQYSTGQVSVEIEWELQKENSKRWNPEIQYTSNYNKSTNVDFAVDTNGVYSEPRPIGTRYLTRNL

SEQ ID NO: 1477 - protein, 736 aa, synthetic construct
  REGION 1..736: note = Description of Artificial Sequence: Synthetic polypeptide
MAADGYLPDWLEDNLSEGIREWWDLKPGAPKPKANQQKQDDGRGLVLPGYKYLGPFNGLDKGEPVNAADAAALEHDKAYDQQLKAGDNPYLRYNHADAEFQERLQEDTSFGGNLGRAVFQAKKRVLEPLGLVEEGAKTAPGKKRPVEQSPQEPDSSSGIGKKGQQPAKKRLNFGQTGDSESVPDPQPLGEPPAAPSGVGSNTMAAGGGAPMADNNEGADGVGNASGNWHCDSTWLGDRVITTSTRTWALPTYNNHLYKQISSQSGGSTNDNTYFGYSTPWGYFDFNRFHCHFSPRDWQRLINNNWGFRPKKLNFKLFNIQVKEVTTNDGTTTIANNLTSTVQVFTDSEYQLPYVLGSAHQGCLPPFPADVFMIPQYGYLTLNNGSQAVGRSSFYCLEYFPSQMLRTGNNFEFSYTFEDVPFHSSYAHSQSLDRLMNPLIDQYLYYLSRTQTTSGTAGNRTLQFSQAGPSSMANQAKNWLPGPCYRQQRVSKTANQNNNSNFAWTGATKYHLNGRDSLVNPGPAMATHKDDEDKFFPMSGVLIFGKQGAGNSNVDLDNVMITSEEEIKTTNPVATEQYGTVATNLQSSNTAPATGTVNSQGALPGMVWQNRDVYLQGPIWAKIPHTDGHFHPSPLMGGFGLKHPPPQILIKNTPVPANPPTTFSPAKFASFITQYSTGQVSVEIEWELQKENSKRWNPEIQYTSNYNKSTNVDFAVDTNGVYSEPRPIGTRYLTRNL

SEQ ID NO: 1478 - protein, 736 aa, synthetic construct
  REGION 1..736: note = Description of Artificial Sequence: Synthetic polypeptide
MAADGYLPDWLEDNLSEGIREWWDLKPGAPKPKANQQKQDDGRGLVLPGYKYLGPFNGLDKGEPVNAADAAALEHDKAYDQQLKAGDNPYLRYNHADAEFQERLQEDTSFGGNLGRAVFQAKKRVLEPLGLVEEGAKTAPGKKRPVEQSPQEPDSSSGIGKKGQQPAKKRLNFGQTGDSESVPDPQPLGEPPAAPSGVGSNTMASGGGAPMADNNEGADGVGNASGNWHCDSTWLGDRVITTSTRTWALPTYNNHLYKQISSQSGGSTNDNTYFGYSTPWGYFDFNRFHCHFSPRDWQRLINNNWGFRPKKLNFKLFNIQVKEVTTNDGTTTIANNLTSTVQVFTDSEYQLPYVLGSAHQGCLPPFPADVFMIPQYGYLTLNNGSQAVGRSSFYCLEYFPSQMLRTGNNFEFSYTFEDVPFHSSYAHSQSLDRLMNPLIDQYLYYLSRTQTTSGTAGNRTLQFSQAGPSSMANQAKNWLPGPCYRQQRVSKTANQNNNSNFAWTGATKYHLNGRDSLVNPGPAMATHKDDEDKFFPMSGVLIFGKQGAGNSNVDLDNVMITSEEEIKTTNPVATEEYGTVATNLQSSNTAPATGTVNSQGALPGMVWQNRDVYLQGPIWAKIPHTDGHFHPSPLMGGFGLKHPPPQILIKNTPVPANPPTTFSPAKFASFITQYSTGQVSVEIEWELQKENSKRWNPEIQYTSNYNKSTNVDFAVDTNGVYSEPRPIGTRYLTRNL

SEQ ID NO: 1479 - protein, 736 aa, synthetic construct
  REGION 1..736: note = Description of Artificial Sequence: Synthetic polypeptide
MAADGYLPDWLEDNLSEGIREWWDLKPGAPKPKANQQKQDDGRGLVLPGYKYLGPFNGLDKGEPVNAADAAALEHDKAYDQQLKAGDNPYLRYNHADAEFQERLQEDTSFGGNLGRAVFQAKKRVLEPLGLVEEGAKTAPGKKRPVEQSPQEPDSSSGIGKKGQQPAKKRLNFGQTGDSESVPDPQPLGEPPAAPSGVGSNTMASGGGAPMADNNEGADGVGNASGNWHCDSTWLGDRVITTSTRTWALPTYNNHLYKQISSQSGGSTNDNTYFGYSTPWGYFDFNRFHCHFSPRDWQRLINNNWGFRPKKLNFKLFNIQVKEVTTNDGTTTIANNLTSTVQVFTDSEYQLPYVLGSAHQGCLPPFPADVFMIPQYGYLTLNNGSQAVGRSSFYCLEYFPSQMLRTGNNFQFSYTFEDVPFHSSYAHSQSLDRLMNPLIDQYLYYLSRTQTTSGTAGNRELQFSQAGPSSMANQAKNWLPGPCYRQQRVSKTTNQNNNSNFAWTGATKYHLNGRDSLVNPGPAMATHKDDEDKFFPMSGVLIFGKQGAGNSNVDLDNVMITNEEEIKTTNPVATEQYGTVATNLQSANTAPATGTVNSQGALPGMVWQDRDVYLQGPIWAKIPHTDGHFHPSPLMGGFGLKHPPPQILIKNTPVPANPPTTFSPAKFASFITQYSTGQVSVEIEWELQKENSKRWNPEIQYTSNYNKSTNVDFAVDTNGVYSEPRPIGTRYLTRNL

SEQ ID NO: 1480 - DNA, 2211 bp, synthetic construct
  misc_feature 1..2211: note = Description of Artificial Sequence: Synthetic polynucleotide
  source 1..2211: mol_type = other DNA
atggctgccgatggttatcttccagattggctcgaggacaacctctctgagggcattcgcgagtggtgggacttgaaacctggagccccgaaacccaaagccaaccagcaaaagcaggacgacggccggggtctggtgcttcctggctacaagtacctcggacccttcaacggactcgacaagggggagcccgtcaacgcggcggacgcagcggccctcgagcacgacaaggcctacgaccagcagctcaaagcgggtgacaatccgtacctgcggtataaccacgccgacgccgagtttcaggagcgtctgcaagaagatacgtcttttgggggcaacctcgggcgagcagtcttccaggccaagaagcgggttctcgaacctctcggtctggttgaggaaggcgctaagacggctcctggaaagaagagaccggtagagcaatcaccccaggaaccagactcctcttcgggcatcggcaagaaaggccagcagcccgcgaaaaagagactcaactttgggcagacaggcgactcagagtcagtgcccgaccctcaaccactcggagaaccccccgcagccccctctggtgtgggatctaatacaatggctgcaggcggtggcgctccaatggcagacaataacgaaggcgccgacggagtgggtaacgcctcaggaaattggcattgcgattccacatggctgggcgacagagtcatcaccaccagcacccgaacctgggccctccccacctacaacaaccacctctacaagcaaatctccagccaatcgggagcaagcaccaacgacaacacctacttcggctacagcaccccctgggggtattttgactttaacagattccactgccacttctcaccacgtgactggcagcgactcatcaacaacaactggggattccggcccaagagactcaacttcaagctcttcaacatccaggtcaaggaggtcacgacgaatgatggcaccacgaccatcgccaataaccttaccagcacggttcaggtctttacggactcggaataccagctcccgtacgtcctcggctctgcgcaccagggctgcctgcctccgttcccggcggacgtcttcatgattcctcagtacgggtacctgactctgaacaatggcagtcaggccgtgggccgttcctccttctactgcctggagtactttccttctcaaatgctgagaacgggcaacaactttgagttcagctacacgtttgaggacgtgccttttcacagcagctacgcgcacagccaaagcctggaccggctgatgaaccccctcatcgaccagtacctgtactacctgtctcggactcagaccacgagtggtaccgcaggaaatcggacgttgcaattttctcaggccgggcctagtagcatggcgaatcaggccaaaaactggctacccgggccctgctaccggcagcaacgcgtctccaagacagcgaatcaaaataacaacagcaactttgcctggaccggtgccaccaagtatcatctgaatggcagagactctctggtaaatcccggtcccgctatggcaacccacaaggacgacgaagacaaattttttccgatgagcggagtcttaatatttgggaaacagggagctggaaatagcaacgtggaccttgacaacgttatgataaccagtgaggaagaaattaaaaccaccaacccagtggccacagaacagtacggcacggtggccactaacctgcaatcgtcaaacaccgctcctgctacagggaccgtcaacagtcaaggagccttacctggcatggtctggcagaaccgggacgtgtacctgcagggtcctatctgggccaagattcctcacacggacggacactttcatccctcgccgctgatgggaggctttggactgaaacacccgcctcctcagatcctgattaagaatacacctgttcccgcgaatcctccaactaccttcagtccagctaagtttgcgtcgttcatcacgcagtacagcaccggacaggtcagcgtggaaattgaatgggagctgcagaaagaaaacagcaaacgctggaacccagagattcaatacacttccaactacaacaaatctacaaatgtggactttgctgttgacacaaatggcgtttattctgagcctcgccccatcggcacccgttacctcacccgtaatctgtaa

SEQ ID NO: 1481 - protein, 738 aa, synthetic construct; identical to SEQ ID NO: 7
  REGION 1..738: note = Description of Artificial Sequence: Synthetic polypeptide

SEQ ID NO: 1482 - DNA, 2211 bp, synthetic construct
  misc_feature 1..2211: note = Description of Artificial Sequence: Synthetic polynucleotide
  source 1..2211: mol_type = other DNA
atggctgccgatggttatcttccagattggctcgaggacaacctctctgagggcattcgcgagtggtgggacttgaaacctggagccccgaaacccaaagccaaccagcaaaagcaggacgacggccggggtctggtgcttcctggctacaagtacctcggacccttcaacggactcgacaagggggagcccgtcaacgcggcggacgcagcggccctcgagcacgacaaggcctacgaccagcagctcaaagcgggtgacaatccgtacctgcggtataaccacgccgacgccgagtttcaggagcgtctgcaagaagatacgtcttttgggggcaacctcgggcgagcagtcttccaggccaagaagcgggttctcgaaccttttggtctggttgaggaaggcgctaagacggctcctggaaagaaacgtccggtagagcagtcgccacaagagccagactcctcctcgggcatcggcaagacaggccagcagcccgctaaaaagagactcaattttggtcagactggcgactcagagtcagtccccgacccacaacctctcggagaacctccagcaacccccgctgctgtgggacctactacaatggcttcaggcggtggcgcaccaatggcagacaataacgaaggcgccgacggagtgggtaatgcctcaggaaattggcattgcgattccacatggctgggcgacagagtcatcaccaccagcacccgcacctgggccttgcccacctacaataaccacctctacaagcaaatctccagtgcttcaacgggggccagcaacgacaaccactacttcggctacagcaccccctgggggtattttgatttcaacagattccactgccacttttcaccgcgtgactggcagcgactcatcaacaacaattggggattccggcccaagagactcaacttcaagctcttcaacatccaagtcaaggaggtcacgacgagtgatggcgtcacaaccatcgctaataaccttaccagcacggttcaagtcttctcggactcggagtaccagcttccgtacgtcctcggctctgcgcaccagggctgcctccctccgttcccggcggacgtgttcatgattccgcaatacggctacctgacgctcaacaatggcagccaagccgtgggacgttcatccttttactgcctggaatatttcccttctcagatgctgagaacgggcaacaactttaccttcagctacacctttgaggaagtgcctttccacagcagctacgcgcacagccagagcctggaccggctgatgaatcctctcatcgaccaatacctgtattacctgaacagaactcaaaatcagtccggaagtgcccaaaacaaggacttgctgtttagccgtgggtctccagctggcatgtctgttcagcccaaaaactggctacctggaccctgttatcggcagcagcgcgtttctaaaacaaaaacaggcaacaacaacagcaattttacctggactggtgcttcaaaatataacctcaatgggcatgaatccatcatcaaccctggcactgctatggcctcacacaaagacgacgaagacaagttctttcccatgagcggtgtcatgatttttggaaaagagagcgccggagcttcaaacactgcattggacaatgtcatgattacagacgaagaggaaattaaagccactaaccctgtggccaccgaaagatttgggaccgtggcagtcaatttccagagcagcagcacacaccctgcgaccggagatgtgcatgttatgggagcattacctggcatggtgtggcaagatagagacgtgtacctgcagggtcccatctgggccaaaattcctcacacagatggacactttcacccgtctcctcttatgggcggctttggactcaagcacccgcctcctcagatcctcatcaaaaacacgcctgttcctgcgaatcctccggcggagttttcagctacaaagtttgcttcattcatcacccaatactccacaggacaagtgagtgtggaaattgaatgggagctgcagaaagaaaacagcaagcgctggaatcccgaagtgcagtacacatccaattatgcaaaatctgccaacgttgattttaccgtggacaacaatggactttatactgagcctcgccccattggcacccgttaccttacccgtcccctgtaa

SEQ ID NO: 1483 - DNA, 2211 bp, synthetic construct; identical to SEQ ID NO: 1482
  misc_feature 1..2211: note = Description of Artificial Sequence: Synthetic polynucleotide
  source 1..2211: mol_type = other DNA

SEQ ID NO: 1484 - DNA, 2202 bp, synthetic construct
  misc_feature 1..2202: note = Description of Artificial Sequence: Synthetic polynucleotide
  source 1..2202: mol_type = other DNA
atgactgacggttaccttccagattggctagaggacaacctctctgaaggcgttcgagagtggtgggcgctgcaacctggagcccctaaacccaaggcaaatcaacaacatcaggacaacgctcggggtcttgtgcttccgggttacaaatacctcggacccggcaacggacttgacaagggggaacccgtcaacgcagcggacgcggcagccctcgaacacgacaaggcctacgaccagcagctcaaggccggtgacaacccctacctcaagtacaaccacgccgacgccgagtttcaggagcgtcttcaagaagatacgtcttttgggggcaacctcggacgagcagtcttccaggccaaaaagaggatccttgagcctctgggtctggttgaggaagcggctaagacggctcctggaaaaaagagacctgtagagcaatctccagcagaaccggactcctcttcgggcatcggcaaatcaggccagcagcccgctagaaaaagactgaattttggtcagactggcgacacagagtcagtcccagaccctcaaccactcggacaacctcccgcagccccctctggtgtgggatctactacaatggcttcaggcggtggcgcaccaatggcagacaataacgagggtgccgatggagtgggtaattcctcaggaaattggcattgcgattcccaatggctgggcgacagagtcatcaccaccagcacccgcacctgggccctgcccacctacaacaatcacctctacaagcaaatctccagccaatcaggagccaccaacgacaaccactactttggctacagcaccccctgggggtattttgacttcaacagattccactgccacttttcaccacgtgactggcaaagactcatcaacaacaactggggattccgacccaagagactcaacttcaagctctttaacattcaagtcaaagaggtcacgcagaatgacggtacgacgacgattgccaataaccttaccagcacggttcaggtgtttactgactccgagtaccagctcccgtacgtcctcggctcggcgcatcagggatgcctcccgccgttcccagcagacgtcttcatggtcccacagtatggatacctcaccctgaacaacgggagtcaggcggtaggacgctcttccttttactgcctggagtactttccttctcagatgctgcgtactggaaacaactttcagtttagctacacttttgaagacgtgcctttccacagcagctacgctcacagccaaagtctggaccgtctcatgaatcctctgatcgaccagtacctgtactatctgaacaggacacaaacagccagtggaactcagcagtctcggctactgtttagccaagctggacccaccagtatgtctcttcaagctaaaaactggctgcctggaccttgctacagacagcagcgtctgtcaaagcaggcaaacgacaacaacaacagcaactttccctggactggtgccaccaaatatcatctgaatggccgggactcattggtgaacccgggccctgctatggccagtcacaaggatgacaaagaaaagtttttccccatgcatggaaccctgatatttggtaaagaaggaacaaatgccaacaacgcggatttggaaaatgtcatgattacagatgaagaagaaatccgcaccaccaatcccgtggctacggagcagtacgggactgtgtcaaataatttgcaaaactcaaacgctggtccaactactggaactgtcaatcaccaaggagcgttacctggtatggtgtggcaggatcgagacgtgtacctgcagggacccatttgggccaagattcctcacaccgatggacactttcatccttctccactgatgggaggttttgggctcaaacacccgcctcctcagatcatgatcaaaaacactcccgttccagccaatcctcccacaaactttagtgcggcaaagtttgcttccttcatcacacagtactccacggggcaggtcagcgtggagatcgagtgggagctgcagaaggagaacagcaaacgctggaatcccgaaattcagtacacttccaactacaacaaatctgttaatgtggactttactgtggacactaatggtgtgtattcagagcctcgccccattggcaccagatacctgactcgtaatctgtaa

SEQ ID NO: 1485 - DNA, 2211 bp, synthetic construct
  misc_feature 1..2211: note = Description of Artificial Sequence: Synthetic polynucleotide
  source 1..2211: mol_type = other DNA
atggctgccgatggttatcttccagattggctcgaggacaacctctctgagggcattcgcgagtggtgggacttgaaacctggagccccgaaacccaaagccaaccagcaaaagcaggacgacggccggggtctggtgcttcctggctacaagtacctcggacccttcaacggactcgacaagggggagcccgtcaacgcggcggacgcagcggccctcgagcacgacaaggcctacgaccagcagctcaaagcgggtgacaatccgtacctgcggtataaccacgccgacgccgagtttcaggagcgtctgcaagaagatacgtcttttgggggcaacctcgggcgagcagtcttccaggccaagaagcgggttctcgaaccttttggtctggttgaggaaggcgctaagacggctcctggaaagaaacgtccggtagagcagtcgccacaagagccagactcctcctcgggcatcggcaagacaggccagcagcccgctaaaaagagactcaattttggtcagactggcgactcagagtcagtccccgacccacaacctctcggagaacctccagcaacccccgctgctgtgggacctactacaatggcttcaggcggtggcgcaccaatggcagacaataacgaaggcgccgacggagtgggtaatgcctcaggaaattggcattgcgattccacatggctgggcgacagagtcatcaccaccagcacccgcacctgggccttgcccacctacaataaccacctctacaagcaaatctccagtgcttcaacgggggccagcaacgacaaccactacttcggctacagcaccccctgggggtattttgatttcaacagattccactgccacttttcaccacgtgactggcagcgactcatcaacaacaattggggattccggcccaagagactcaacttcaagctcttcaacatccaagtcaaggaggtcacgacgaatgatggcgtcacaaccatcgctaataaccttaccagcacggttcaagtcttctcggactcggagtaccagcttccgtacgtcctcggctctgcgcaccagggctgcctccctccgttcccggcggacgtgttcatgattccgcaatacggctacctgacgctcaacaatggcagccaagccgtgggacgttcatccttttactgcctggaatatttcccttctcagatgctgagaacgggcaacaactttaccttcagctacacctttgaggaagtgcctttccacagcagctacgcgcacagccagagcctggaccggctgatgaatcctctcatcgaccaatacctgtattacctgaacagaactcaaaatcagtccggaagtgcccaaaacaaggacttgctgtttagccgtgggtctccagctggcatgtctgttcagcccaaaaactggctacctggaccctgttatcggcagcagcgcgtttctaaaacaaaaacagacaacaacaacagcaattttacctggactggtgcttcaaaatataacctcaatgggcgtgaatccatcatcaaccctggcactgctatggcctcacacaaagacgacgaagacaagttctttcccatgagcggtgtcatgatttttggaaaagagagcgccggagcttcaaacactgcattggacaatgtcatgattacagacgaagaggaaattaaagccactaaccctgtggccaccgaaagatttgggaccgtggcagtcaatttccagagcagcagcacagaccctgcgaccggagatgtgcatgttatgggagcattacctggcatggtgtggcaagatagagacgtgtacctgcagggtcccatctgggccaaaattcctcacacagatggacactttcacccgtctcctcttatgggcggctttggactcaagcacccgcctcctcagatcctcatcaaaaacacgcctgttcctgcgaatcctccggcggagttttcagctacaaagtttgcttcattcatcacccaatactccacaggacaagtgagtgtggaaattgaatgggagctgcagaaagaaaacagcaagcgctggaatcccgaagtgcagtacacatccaattatgcaaaatctgccaacgttgattttaccgtggacaacaatggactttatactgagcctcgccccattggcacccgttaccttacccgtcccctgtaa

SEQ ID NO: 1486 - DNA, 2211 bp, synthetic construct
  misc_feature 1..2211: note = Description of Artificial Sequence: Synthetic polynucleotide
  source 1..2211: mol_type = other DNA
atggctgccgatggttatcttccagattggctcgaggacaacctctctgagggcattcgcaagtggtgggacttgaaacctggagccccgaaacccaaagccaaccagcaaaagcaggacgacggccggggtctggtgcttcctggctacaagtacctcggacccttcaacggactcgacaagggggagcccgtcaacgcggcggacgcagcggccctcgagcacgacaaggcctacgaccagcagctcaaagcgggtgacaatccgtacctgcggtataaccacgccgacgccgagtttcaggagcgtctgcaagaagatacgtcttttgggggcaacctcgggagagcagtcttccaggccaagaagcgggttctcgaaccttttggtctggttgaggaaggcgctaagacggctcctggaaagaaacgtccggtagagcagtcgccacaagagccagactcctcctcgggcatcggcaagacaggccagcagcccgctaaaaagagactcaattttggtcagactggcgactcagagtcagtccccgacccacaacctctcggagaacctccagcaacccccgctgctgtgggacctactacaatggcttcaggcggtggcgcaccaatggcagacaataacgaaggcgccgacggagtgggtaatgcctcaggaaattggcattgcgattccacatggctgggcgacagagtcatcaccaccagcacccgcacctgggccttgcccacctacaataaccacctctacaagcaaatctccagtgcttcaacgggggccagcaacgacaaccactacttcggctacagcaccccctgggggtattttgatttcaacagattccactgccacttttcaccacgtgactggcagcgactcatcaacaacaattggggattccggcccaagagactcaacttcaagctcttcaacatccaagtcaaggaggtcacgacgaatgatggcgtcacaaccatcgctaataaccttaccagcacggttcaagtcttctcggactcggagtaccagcttccgtacgtcctcggctctgcgcaccagggctgcctccctccgttcccggcggacgtgttcatgattccgcaatacggctacctgacgctcaacaatggcagccaagccgtgggacgttcatccttttactgcctggaatatttcccttctcagatgctgagaacgggcaacaactttaccttcagctacacctttgaggaagtgcctttccacagcagctacgcgcacagccagagcctggaccggctgatgaatcctctcatcgaccaatacctgtattacctgaacagaactcaaaatcagtccggaagtgcccaaaacaaggacttgctgtttagccgtgggtctccagctggcatgtctgttcagcccaaaaactggctacctggaccctgttatcggcagcagcgcgtttctaaaacaaaaacagacaacaacaacagcaattttacctggactggtgcttcaaaatataacctcaatgggcgtgaatccatcatcaaccctggcactgctatggcctcacacaaagacgacaaagacaagttctttcccatgagcggtgtcatgatttttggaaaagagagcgccggagcttcaaacactgcattggacaatgtcatgattacagacgaagaggaaattaaagccactaaccctgtggccaccgaaagatttgggaccgtggcagtcaatttccagagcagcagcacagaccctgcgaccggagatgtgcatgttatgggagcattacctggcatggtgtggcaagatagagacgtgtacctgcagggtcccatttgggccaaaattcctcacacagatggacactttcacccgtctcctcttatgggcggctttggactcaagcacccgcctcctcagatcctcatcaaaaacacacctgttcctgcgaatcctccggcggagttttcagctacaaagtttgcttcattcatcacccaatactccacaggacaagtgagtgtggaaattgaatgggagctgcagaaagaaaacagcaagcgctggaatcccgaagtgcagtacacatccaattatgcaaaatctgccaacgttgattttaccgtggacaacaatggactttatactgagcctcgccccattggcacccgttaccttacccgtcccctgtaa

SEQ ID NO: 1487 - DNA, 2211 bp, synthetic construct
  misc_feature 1..2211: note = Description of Artificial Sequence: Synthetic polynucleotide
  source 1..2211: mol_type = other DNA
atggctgccgatggttatcttccagattggctcgaggacaacctctctgagggcattcgcgagtggtgggacttgaaacctggagccccgaaacccaaagccaaccagcaaaagcaggacaacggccggggtctggtgcttcctggctacaagtacctcggacccttcaacggactcgacaagggggagcccgtcaacgcggcggacgcagcggccctcgagcacgacaaggcctacgaccagcagctcaaagcgggtgacaatccgtacctgcggtataaccacgccgacgccgagtttcaggagcgtctgcaagaagatacgtcttttgggggcaacctcgggcgagcagtcttccaggccaagaagcgggttctcgaaccttttggtctggttgaggaaggcgctaagacggctcctggaaagaaacgtccggtagagcagtcgccacaagagccagactcctcctcgggcatcggcaagacaggccagcagcccgctaaaaagagactcaattttggtcagactggcgactcagagtcagtccccgacccacaacctctcggagaacctccagcaacccccgctgctgtgggacctactacaatggcttcaggcggtggcgcaccaatggcagacaataacgaaggcgccgacggagtgggtaatgcctcaggaaattggcattgcgattccacatggctgggcgacagagtcatcaccaccagcacccgcacctgggccttgcccacctacaataaccacctctacaagcaaatctccagtgcttcaacgggggccagcaacgacaaccactacttcggctacagcaccccctgggggtattttgatttcaacagattccactgccacttttcaccacgtgactggcagcgactcatcaacaacaattggggattccggcccaagagactcaacttcaagctcttcaacatccaagtcaaggaggtcacgacgaatgatggcgtcacaaccatcgctaataaccttaccagcacggttcaagtcttctcggactcggagtaccagcttccgtacgtcctcggctctgcgcaccagggctgcctccctccgttcccggcggacgtgttcatgattccgcaatacggctacctgacgctcaacaatggcagccaagccgtgggacgttcatccttttactgcctggaatatttcccttctcagatgctgagaacgggcaacaactttaccttcagctacacctttgaggaagtgcctttccacagcagctacgcgcacagccagagcctggaccggctgatgaatcctctcatcgaccaatacctgtattacctgaacagaactcaaaatcagtccggaagtgcccaaaacaaggacttgctgtttagccgtgggtctccagctggcatgtctgttcagcccaaaaactggctacctggaccctgttatcggcagcagcgcgtttctaaaacaaaaacagacaacaacaacagcaattttacctggactggtgcttcaaaatataacctcaatgggcgtgaatccatcatcaaccctggcactgctatggcctcacacaaagacgacgaagacaagttctttcccatgagcggtgtcatgatttttggaaaagagagcgccggagcttcaaacactgcattggacaatgtcatgattacagacgaagaggaaattaaagccactaaccctgtggccaccgaaagatttgggaccgtggcagtcaatttccagagcagcagcacacaccctgcgaccggagatgtgcatgttatgggagcattacctggcatggtgtggcaagatagagacgtgtacctgcagggtcccatctgggccaaaattcctcacacagatggacactttcacccgtctcctcttatgggcggctttggactcaagcacccgcctcctcagatcctcatcaaaaacacgcctgttcctgcgaatcctccggcggagttttcagctacaaagtttgcttcattcatcacccaatactccacaggacaagtgagtgtggaaattgaatgggagctgcagaaagaaaacagcaagcgctggaatcccgaagtgcagtacacatccaattatgcaaaatctgccaacgttgattttaccgtggacaacaatggactttatactgagcctcgccccattggcacccgttaccttacccgtcccctgtaa

SEQ ID NO: 1488 - DNA, 2211 bp, synthetic construct
  misc_feature 1..2211: note = Description of Artificial Sequence: Synthetic polynucleotide
  source 1..2211: mol_type = other DNA
atggctgccgatggttatcttccagattggctcgaggacaacctctctgagggcattcgcgagtggtgggacttgaaacctggagccccgaaacccaaagccaaccagcaaaagcaggacgacggccggggtctggtgcttcctggctacaagtacctcggacccttcaacggactcgacaagggggagcccgtcaacgcggcggacgcagcggccctcgagcacgacaaggcctacgaccagcagctcaaagcgggtgacaatccgtacctgcggtataaccacgccgacgccgagtttcaggagcgtctgcaagaagatacgtcttttgggggcaacctcgggcgagcagtcttccaggccaaaaagcgggttctcgaaccttttggtctggttgaggaaggcgctaagacggctcctggaaagaaacgtccggtagagcagtcgccacaagagccagactcctcctcgggcatcggcaagacaggccagcagcccgctaaaaagagactcaattttggtcagactggcgactcagagtcagtccccgacccacaacctctcggagaacctccagcaacccccgctgctgtgggacctactacaatggcttcaggcggtggcgcaccaatggcagacaataacgaaggcgccgacggagtgggtaatgcctcaggaaattggcattgcgattccacatggctgggcgacagagtcatcaccaccagcacccgcacctgggccttgcccacctacaataaccacctctacaagcaaatctccagtgcttcaacgggggccagcaacgacaaccactacttcggctacagcaccccctgggggtattttgatttcaacagattccactgccacttttcaccacgtgactggcagcgactcatcaacaacaattggggattccggcccaagagactcaacttcaagctcttcaacatccaagtcaaggaggtcacgacgaatgatggcgtcacaaccatcgctaataaccttaccagcacggttcaagtcttctcggactcggagtaccagcttccgtacgtcctcggctctgcgcaccagggctgcctccctccgttcccggcggacgtgttcatgattccgcaatacggctacctgacgctcaacaatggcagccaagccgtgggacgttcatccttttattgcctggaatatttcccatcgcagatgctgagaacgggcaataactttaccttcagctacacctttgaggacgtgcctttccacagcagctacgcgcacagccagagcctggaccggctgatgaatcctctcatcgaccagtacctgtattacctgaacagaactcagaaccagtccggaagtgcccaaaacaaggacttgctgtttagccgggggtctccagctggcatgtctgttcagctcaaaaactggctacctggaccctgttatcggcagcagcgcgtttctaaaacaaaaacagacaacaacaacagcaattttacctggactggtgcttcaaaatataaccttaatgggcgtgaatccatcatcaaccctggcactgctatggcctcacacaaagacgacgaagacaagttctttcccatgagcggtgtcatgatttttggaaaagagagcgccggagcttcaaacactgcattggacaatgtcatgattacagacgaagaggaaattaaagccactaaccctgtggccaccgaaagatttgggaccgtggcagtcaatttccagagcagcagcacagaccctgcgaccggagatgtgcatgttatgggagcattacctggcatggtgtggcaagatagagacgtgtacctgcagggtcccatttgggccaaaattcctcacacagatggacactttcacccgtctcctcttatgggcggctttggactcaaacacccgcctcctcagatcctcatcaaaaacacacctgttcctgcgaatcctccggcggagttttcagctacaaagtttgcttcattcatcacccaatactccacaggacaagtgagcgtggaaattgaatgggagctgcagaaagaaaacagcaagcgctggaatcccgaagtgcagtacacatccaattatgcaaaatctgccaacgttgattttaccgtggacaacaatggactttatactgagcctcgccccattggcacccgttaccttacccgtcccctgtaa

SEQ ID NO: 1489 - DNA, 2211 bp, synthetic construct
  misc_feature 1..2211: note = Description of Artificial Sequence: Synthetic polynucleotide
  source 1..2211: mol_type = other DNA
atggctgccgatggttatcttccagattggctcgaggacaacctctctgagggcattcgcgagtggtgggacttgaaacctggagccccgaaacccaaagccaaccagcaaaagcaggacgacggccggggtctggtgcttcctggctacaagtacctcggacccttcaacggactcgacaagggggagcccgtcaacgcggcggacgcagcggccctcgagcacgacaaggcctacgaccagcagctcaaagcgggtgacaatccgtacctgcggtataaccacgccgacgccgagtttcaggagcgtctgcaagaagatacgtcttttgggggcaacctcgggcgagcagtcttccaggccaagaagcgggttctcgaaccttttggtctggttgaggaaggtgctaagacggctcctggaaagaagagaccggtagagcagtcgccccaagaaccagactcctcatcgggcatcggcaaatcaggccagcagcccgctaaaaagagactcaattttggtcagactggcgactcagagtcagtccccgacccacaacctctcggagaacctccagcaacccccgctgctgtgggacctactacaatggcttcaggcggtggcgcaccaatggcagacaataacgaaggcgccgacggagtgggtaatgcctcaggaaattggcattgcgattccacatggctgggcgacagagtcattaccaccagcacccgaacctgggccctgcccacctataacaaccacctctacaaacaaatctccagcgcttcaacgggggccagcaacgacaaccactacttcggctacagcaccccctgggggtattttgattttaacagattccactgccacttctcaccacgtgactggcagcgactcatcaacaacaattggggattccggcccaagagactcaacttcaagctcttcaacatccaagtcaaggaggtcacgacgaacgatggcgtcacgaccatcgctaataaccttaccagcacggttcaagtcttctcggactcggagtaccagttgccgtacgtcctcggctctgcgcaccagggctgcctccctccgttcccggcggacgtgttcatgattccgcagtacggctacctaacactcaacaatggcagccaggccgtgggacgttcatccttttactgcctggaatatttcccatcgcagatgctgagaacgggcaataactttaccttcagctacacattcgaggacgtgcctttccacagcagctacgcgcacagccaaagcctggaccggctgatgaatcctctcatcgaccagtacttgtattacctaaacagaactcaaaatcagtccggaagtgcccaaaacaaggacttgctgtttagccgggggtctccagctggcatgtctgttcagcccaaaaactggctacctggaccctgttatcggcagcagcgcgtttctaaaacaaaaacagacaacaacaacagcaactttacctggactggtgcttcaaaatataaccttaatgggcgtgaatctataatcaaccctggcactgctatggcttcacacaaagacgacgaagacaagttctttccaatgagcggtgtcatgatttttggcaaggagagcgccggagcttcaaacactgcattggacaatgtcatgattacagacgaagaggaaattaaagccactaaccctgtggccaccgaaagatttgggaccgtggcagtcaatttccagagcagcagcacagaccctgcgaccggagatgtgcatgttatgggagcattacctggcatggtgtggcaagatagagacgtgtacctgcagggtccaatttgggccaaaattcctcacacagatggacactttcacccgtctcctcttatgggcggctttggacttaagcacccgcctcctcagatcctcatcaaaaacacgcctgttcctgcgaatcctccggcagagttttcggctacaaagtttgcttcattcatcacccagtattccacaggacaagtgagtgtggaaattgaatgggagttgcagaaagaaaacagcaagcgttggaatcccgaagtgcagtacacatctaattatgcaaaatctgccaacgttgatttcactgtggacaacaatggactttatactgagcctcgccccattggcacccgttacctcacccgtcccctgtaa

SEQ ID NO: 1490 - DNA, 2211 bp, synthetic construct
  misc_feature 1..2211: note = Description of Artificial Sequence: Synthetic polynucleotide
  source 1..2211: mol_type = other DNA
atggctgccgatggttatcttccagattggctcgaggacaacctctctgagggcattcgcgagtggtgggacttgaaacctggagccccgaaacccaaagccaaccagcaaaagcaggacgacggccggggtctggtgcttcctggctacaagtacctcggacccttcaacggactcgacaagggggagcccgtcaacgcggcggacgcagcggccctcgagcacgacaaggcctacgaccagcagctcaaagcgggtgacaatccgtacctgcggtataaccacgccgacgccgagtttcaggagcgtctgcaagaagatacgtcttttgggggcaacctcgggcgagcagtcttccaggccaagaagagggttctcgaaccttttggtctggttgaggaaggtgctaagacggctcctggaaagaaacgtccggtagagcagtcaccccaagaaccagactcctcctcgggcattggcaaatcaggccagcagcccgctaaaaagagactcaattttggtcagactggcgactcagagtcagtccccgacccacaacctctcggagaacctccagcaacccccgctgctttgggacctactacaatggcttcaggcggtggcgcaccaatggcagacaataacgaaggcgccgacggagtgggtaatgcctcaggaaattggcattgcgattccacatggctgggcgacagagtcatcaccaccagcacccgcacctgggccttgcccacctacaataaccacctctacaagcaaatctccagtgcttcaacgggggccagcaacgacaaccactacttcggctacagcaccccctgggggtattttgatttcaacagattccactgccatttctcaccacgtgactggcagcgactcatcaacaacaactggggattccggcccaagagactcaacttcaagctcttcaacatccaagtcaaggaggtcacgacgaacgatggcgtcacgaccatcgctaataaccttaccagcacggttcaagtcttctcggactcggagtaccagcttccgtacgtcctcggctctgcgcaccagggctgcctccctccgttcccggcggacgtgttcatgattccgcagtacggctacctgacgctcaacaatggcagcaaagccgtgggacgttcatccttttactgcctggaatatttcccttctcagatgctgagaacgggcaacaactttaccttcagctacacctttgaggaagtgcctttccacagcagctacgcgcacagccagagcctggaccggctgatgaatcctctcatcgaccaatacctgtattacctgaacagaactcaaaatcagtccggaagtgcccaaaacaaggacttgctgtttagccgtgggtctccagctggcatgtctgttcagcccaaaaactggctacctggaccctgttatcggcagcagcgcgtttctaaaacaaaaacagacaacaacaacagcaattttacctggactggtgcttcaaaatataacctcaatgggcgtgaatccatcatcaaccctggcactgctatggcctcacacaaagacgacgaagacaagttctttcccatgagcggtgtcatgatttttggaaaagagagcgccggagcttcaaacactgcattggacaatgtcatgattacagacgaagaggaaattaaagccactaaccctgtggccaccgaaagatttgggaccgtggcagtcaatttccagagcagcagcacagaccctgcgaccggagatgtgcatgttatgggagcattacctggcatggtgtggcaagatagagacgtgtacctgcagggtcccatttgggccaaaattcctcacacggatggacactttcacccgtctcctcttatgggcggctttggactcaagcacccgcctcctcagatcctcatcaaaaacacacctgttcctgcgaatcctccggcagagttttcggctacaaagtttgcttcattcatcacccagtactccacaggacaagtgagcgtggaaattgaatgggagttgcagaaagaaaacagtaagcgctggaatcccgaagtgcagtacacatctaattatgcaaaatctgccaacgttgacttcactgtggacaacaatggactttatactgagcctcgccccattggcacccgttacctcacccgtcccctgtaa

SEQ ID NO: 1491 - DNA, 2970 bp, synthetic construct
  misc_feature 1..2970: note = Description of Artificial Sequence: Synthetic polynucleotide
  source 1..2970: mol_type = other DNA
agatgaccgccaaggtcgtagagtccgccaaggccattctgggcggcagcaaggtgcgcgtggaccaaaaatgcaaggcctctgcgcagatcgaccccacccccgtgatcgtcacctccaacaccaacatgtgcgccgtgattgacgggaacagcaccaccttcgagcaccagcagcccctgcaggaccggatgttcaagtttgaactcacccgccgcctcgactacgactttggcaaggtcaccaagcaggaagtcaaggactttttccggtgggcggctgatcacgtgactgacgtggctcatgagttttacgtcacaaagggtggagctaagaaaaggcccgccccctctgacgaggatataagcgagcccaagcggccgcgcgtgtcatttgcgcagccggagacgtcagacgcggaagctcccggagacttcgccgacaggtaccaaaacaaatgttctcgtcacgcgggtatgctgcagatgctctttccctgcaagacgtgcgagagaatgaatcagaattccaacgtctgcttcacgcacggtcagaaagattgcggggagtgctttcccgggtcagaatctcaaccggtttctgtcgtcagaaaaacgtatcagaaactgtgcatccttcatcagctccggggggcacccgagatcgcctgctctgcttgcgaccaactcaaccccgatttggacgattgccaatttgagcaataaatgactgaaatcaggtatggctgctgacggttatcttccagattggctcgaggacaacctctctgaaggcattcgcgagtggtgggcgctgaaacctggagctccacaacccaaggccaaccaacagcatcaggacaacggcaggggtcttgtgcttcctgggtacaagtacctcggacccttcaacggactcgacaagggagagccggtcaacgaggcagacgccgcggccctcgagcacgacaaggcctacgacaagcagctcgagcagggggacaacccgtatctcaagtacaaccacggcgacgccgagttccagcagcgcttggcgaccgacacctcttttgggggcaacctcgggcgagcagtcttccaggccaaaaagaggattctcgagcctctgggtctggttgaagagggcgttaaaacggctcctggaaagaaacgcccattagaaaagactccaaatcggccgaccaacccggactctgggaaggccccggccaagaaaaagcaaaaagacggcgaaccagccgactctgctagaaggacactcgactttgaagactctggagcaggagacggaccccctgagggatcatcttccggagaaatgtctcatgatgctgagatgcgtgcggcgccaggcggaaatgctgtcgaggcgggacaaggtgccgatggagtgggtaatgcctccggtgattggcattgcgattccacctggtcagagggccgagtcaccaccaccagcacccgaacctgggtcctacccacgtacaacaaccacctgtacctgcgaatcggaacaacggccaacagcaacacctacaacggattctccaccccctggggatactttgactttaaccgcttccactgccacttttccccacgcgactggcagcgactcatcaacaacaactggggactcaggccgaaatcgatgcgtgttaaaatcttcaacatacaggtcaaggaggtcacgacgtcaaacggcgagactacggtcgctaataaccttaccagcacggttcagatctttgcggattcgacgtatgaactcccatacgtgatggacgccggtcaggaggggagctttcctccgtttcccaacgacgtctttatggttccccaatacggatactgcggagttgtcactggaaaaaaccagaaccagacagacagaaatgccttttactgcctggaatactttccatcccaaatgctaagaactggcaacaattttgaagtcagttaccaatttgaaaaagttcctttccattcaatgtacgcgcacagccagagcctggacagaatgatgaatcctttactggatcagtacctgtggcatctgcaatcgaccactaccggaaattcccttaatcaaggaacagctaccaccacgtacgggaaaattaccactggagactttgcctactacaggaaaaactggttgcctggagcctgcattaaacaacaaaaattttcaaagaatgccaatcaaaactacaagattcccgccagcgggggagacgcccttttaaagtatgacacgcataccactctaaatgggcgatggagtaacatggctcctggacctccaatggcaaccgcaggtgccggggactcggattttagcaacagccagctgatctttgccggacccaatccgagcggtaacacgaccacatcttcaaacaatttgttgtttacctcagaagaggagattgccacaacaaacccacgagacacggacatgtttggacagattgcagataataatcaaaatgccaccaccgcccctcacatcgctaacctggacgctatgggaattgttcccggaatggtctggcaaaacagagacatctactaccagggccctatttgggccaaggtccctcacacggacggacactttcacccttcgccgctgatgggaggatttggactgaaacacccgcctccacagattttcatcaaaaacacccccgtacccgccaatcccaatactacctttagcgctgcaaggattaattcttttctgacgcagtacagcaccggacaagttgccgttcagatcgactgggaaattcagaaggagcattccaaacgctggaatcccgaagttcaatttacttcaaactacggcactcaaaattctatgctgtgggctcccgacaatgctggcaactaccacgaactccgggctattgggtcccgtttcctcacccaccacttgtaa

SEQ ID NO: 1492 - protein, 736 aa, synthetic construct
  REGION 1..736: note = Description of Artificial Sequence: Synthetic polypeptide
MAADGYLPDWLEDNLSEGIREWWDLKPGAPKPKANQQKQDDGRGLVLPGYKYLGPFNGLDKGEPVNAADAAALEHDKAYDQQLKAGDNPYLRYNHADAEFQERLQEDTSFGGNLGRAVFQAKKRVLEPFGLVEEGAKTAPGKKRPVEQSPQEPDSSSGIGKTGQQPAKKRLNFGQTGDSESVPDPQPLGEPPATPAAVGPTTMASGGGAPMADNNEGADGVGNASGNWHCDSTWLGDRVITTSTRTWALPTYNNHLYKQISSASTGASNDNHYFGYSTPWGYFDFNRFHCHFSPRDWQRLINNNWGFRPKRLNFKLFNIQVKEVTTSDGVTTIANNLTSTVQVFSDSEYQLPYVLGSAHQGCLPPFPADVFMIPQYGYLTLNNGSQAVGRSSFYCLEYFPSQMLRTGNNFTFSYTFEEVPFHSSYAHSQSLDRLMNPLIDQYLYYLNRTQNQSGSAQNKDLLFSRGSPAGMSVQPKNWLPGPCYRQQRVSKTKTGNNNSNFTWTGASKYNLNGHESIINPGTAMASHKDDEDKFFPMSGVMIFGKESAGASNTALDNVMITDEEEIKATNPVATERFGTVAVNFQSSSTHPATGDVHVMGALPGMVWQDRDVYLQGPIWAKIPHTDGHFHPSPLMGGFGLKHPPPQILIKNTPVPANPPAEFSATKFASFITQYSTGQVSVEIEWELQKENSKRWNPEVQYTSNYAKSANVDFTVDNNGLYTEPRPIGTRYLTRPL

SEQ ID NO: 1493 - protein, 736 aa, synthetic construct; identical to SEQ ID NO: 1492
  REGION 1..736: note = Description of Artificial Sequence: Synthetic polypeptide

SEQ ID NO: 1494 - protein, 733 aa, synthetic construct
  REGION 1..733: note = Description of Artificial Sequence: Synthetic polypeptide
MTDGYLPDWLEDNLSEGVREWWALQPGAPKPKANQQHQDNARGLVLPGYKYLGPGNGLDKGEPVNAADAAALEHDKAYDQQLKAGDNPYLKYNHADAEFQERLQEDTSFGGNLGRAVFQAKKRILEPLGLVEEAAKTAPGKKRPVEQSPAEPDSSSGIGKSGQQPARKRLNFGQTGDTESVPDPQPLGQPPAAPSGVGSTTMASGGGAPMADNNEGADGVGNSSGNWHCDSQWLGDRVITTSTRTWALPTYNNHLYKQISSQSGATNDNHYFGYSTPWGYFDFNRFHCHFSPRDWQRLINNNWGFRPKRLNFKLFNIQVKEVTQNDGTTTIANNLTSTVQVFTDSEYQLPYVLGSAHQGCLPPFPADVFMVPQYGYLTLNNGSQAVGRSSFYCLEYFPSQMLRTGNNFQFSYTFEDVPFHSSYAHSQSLDRLMNPLIDQYLYYLNRTQTASGTQQSRLLFSQAGPTSMSLQAKNWLPGPCYRQQRLSKQANDNNNSNFPWTGATKYHLNGRDSLVNPGPAMASHKDDKEKFFPMHGTLIFGKEGTNANNADLENVMITDEEEIRTTNPVATEQYGTVSNNLQNSNAGPTTGTVNHQGALPGMVWQDRDVYLQGPIWAKIPHTDGHFHPSPLMGGFGLKHPPPQIMIKNTPVPANPPTNFSAAKFASFITQYSTGQVSVEIEWELQKENSKRWNPEIQYTSNYNKSVNVDFTVDTNGVYSEPRPIGTRYLTRNL

SEQ ID NO: 1495 - protein, 736 aa, synthetic construct; identical to SEQ ID NO: 757
  REGION 1..736: note = Description of Artificial Sequence: Synthetic polypeptide

SEQ ID NO: 1496 - protein, 736 aa, synthetic construct
  REGION 1..736: note = Description of Artificial Sequence: Synthetic polypeptide
MAADGYLPDWLEDNLSEGIRKWWDLKPGAPKPKANQQKQDDGRGLVLPGYKYLGPFNGLDKGEPVNAADAAALEHDKAYDQQLKAGDNPYLRYNHADAEFQERLQEDTSFGGNLGRAVFQAKKRVLEPFGLVEEGAKTAPGKKRPVEQSPQEPDSSSGIGKTGQQPAKKRLNFGQTGDSESVPDPQPLGEPPATPAAVGPTTMASGGGAPMADNNEGADGVGNASGNWHCDSTWLGDRVITTSTRTWALPTYNNHLYKQISSASTGASNDNHYFGYSTPWGYFDFNRFHCHFSPRDWQRLINNNWGFRPKRLNFKLFNIQVKEVTTNDGVTTIANNLTSTVQVFSDSEYQLPYVLGSAHQGCLPPFPADVFMIPQYGYLTLNNGSQAVGRSSFYCLEYFPSQMLRTGNNFTFSYTFEEVPFHSSYAHSQSLDRLMNPLIDQYLYYLNRTQNQSGSAQNKDLLFSRGSPAGMSVQPKNWLPGPCYRQQRVSKTKTDNNNSNFTWTGASKYNLNGRESIINPGTAMASHKDDKDKFFPMSGVMIFGKESAGASNTALDNVMITDEEEIKATNPVATERFGTVAVNFQSSSTDPATGDVHVMGALPGMVWQDRDVYLQGPIWAKIPHTDGHFHPSPLMGGFGLKHPPPQILIKNTPVPANPPAEFSATKFASFITQYSTGQVSVEIEWELQKENSKRWNPEVQYTSNYAKSANVDFTVDNNGLYTEPRPIGTRYLTRPL

SEQ ID NO: 1497 - protein, 736 aa, synthetic construct
  REGION 1..736: note = Description of Artificial Sequence: Synthetic polypeptide
MAADGYLPDWLEDNLSEGIREWWDLKPGAPKPKANQQKQDNGRGLVLPGYKYLGPFNGLDKGEPVNAADAAALEHDKAYDQQLKAGDNPYLRYNHADAEFQERLQEDTSFGGNLGRAVFQAKKRVLEPFGLVEEGAKTAPGKKRPVEQSPQEPDSSSGIGKTGQQPAKKRLNFGQTGDSESVPDPQPLGEPPATPAAVGPTTMASGGGAPMADNNEGADGVGNASGNWHCDSTWLGDRVITTSTRTWALPTYNNHLYKQISSASTGASNDNHYFGYSTPWGYFDFNRFHCHFSPRDWQRLINNNWGFRPKRLNFKLFNIQVKEVTTNDGVTTIANNLTSTVQVFSDSEYQLPYVLGSAHQGCLPPFPADVFMIPQYGYLTLNNGSQAVGRSSFYCLEYFPSQMLRTGNNFTFSYTFEEVPFHSSYAHSQSLDRLMNPLIDQYLYYLNRTQNQSGSAQNKDLLFSRGSPAGMSVQPKNWLPGPCYRQQRVSKTKTDNNNSNFTWTGASKYNLNGRESIINPGTAMASHKDDEDKFFPMSGVMIFGKESAGASNTALDNVMITDEEEIKATNPVATERFGTVAVNFQSSSTHPATGDVHVMGALPGMVWQDRDVYLQGPIWAKIPHTDGHFHPSPLMGGFGLKHPPPQILIKNTPVPANPPAEFSATKFASFITQYSTGQVSVEIEWELQKENSKRWNPEVQYTSNYAKSANVDFTVDNNGLYTEPRPIGTRYLTRPL

SEQ ID NO: 1498 - protein, 736 aa, synthetic construct
  REGION 1..736: note = Description of Artificial Sequence: Synthetic polypeptide
MAADGYLPDWLEDNLSEGIREWWDLKPGAPKPKANQQKQDDGRGLVLPGYKYLGPFNGLDKGEPVNAADAAALEHDKAYDQQLKAGDNPYLRYNHADAEFQERLQEDTSFGGNLGRAVFQAKKRVLEPFGLVEEGAKTAPGKKRPVEQSPQEPDSSSGIGKTGQQPAKKRLNFGQTGDSESVPDPQPLGEPPATPAAVGPTTMASGGGAPMADNNEGADGVGNASGNWHCDSTWLGDRVITTSTRTWALPTYNNHLYKQISSASTGASNDNHYFGYSTPWGYFDFNRFHCHFSPRDWQRLINNNWGFRPKRLNFKLFNIQVKEVTTNDGVTTIANNLTSTVQVFSDSEYQLPYVLGSAHQGCLPPFPADVFMIPQYGYLTLNNGSQAVGRSSFYCLEYFPSQMLRTGNNFTFSYTFEDVPFHSSYAHSQSLDRLMNPLIDQYLYYLNRTQNQSGSAQNKDLLFSRGSPAGMSVQLKNWLPGPCYRQQRVSKTKTDNNNSNFTWTGASKYNLNGRESIINPGTAMASHKDDEDKFFPMSGVMIFGKESAGASNTALDNVMITDEEEIKATNPVATERFGTVAVNFQSSSTDPATGDVHVMGALPGMVWQDRDVYLQGPIWAKIPHTDGHFHPSPLMGGFGLKHPPPQILIKNTPVPANPPAEFSATKFASFITQYSTGQVSVEIEWELQKENSKRWNPEVQYTSNYAKSANVDFTVDNNGLYTEPRPIGTRYLTRPL

SEQ ID NO: 1499 - protein, 736 aa, synthetic construct
  REGION 1..736: note = Description of Artificial Sequence: Synthetic polypeptide
MAADGYLPDWLEDNLSEGIREWWDLKPGAPKPKANQQKQDDGRGLVLPGYKYLGPFNGLDKGEPVNAADAAALEHDKAYDQQLKAGDNPYLRYNHADAEFQERLQEDTSFGGNLGRAVFQAKKRVLEPFGLVEEGAKTAPGKKRPVEQSPQEPDSSSGIGKSGQQPAKKRLNFGQTGDSESVPDPQPLGEPPATPAAVGPTTMASGGGAPMADNNEGADGVGNASGNWHCDSTWLGDRVITTSTRTWALPTYNNHLYKQISSASTGASNDNHYFGYSTPWGYFDFNRFHCHFSPRDWQRLINNNWGFRPKRLNFKLFNIQVKEVTTNDGVTTIANNLTSTVQVFSDSEYQLPYVLGSAHQGCLPPFPADVFMIPQYGYLTLNNGSQAVGRSSFYCLEYFPSQMLRTGNNFTFSYTFEDVPFHSSYAHSQSLDRLMNPLIDQYLYYLNRTQNQSGSAQNKDLLFSRGSPAGMSVQPKNWLPGPCYRQQRVSKTKTDNNNSNFTWTGASKYNLNGRESIINPGTAMASHKDDEDKFFPMSGVMIFGKGSAGASNTALDNVMITDEEEIKATNPVATERFGTVAVNFQSSSTDPATGDVHVMGALPGMVWQDRDVYLQGPIWAKIPHTDGHFHPSPLMGGFGLKHPPPQILIKNTPVPANPPAEFSATKFASFITQYSTGQVSVEIEWELQKENSKRWNPEVQYTSNYAKSANVDFTVDNNGLYTEPRPIGTRYLTRPL

SEQ ID NO: 1500 - protein, 736 aa, synthetic construct; identical to SEQ ID NO: 688
  REGION 1..736: note = Description of Artificial Sequence: Synthetic polypeptide

SEQ ID NO: 1501 - protein, 742 aa, synthetic construct
  REGION 1..742: note = Description of Artificial Sequence: Synthetic polypeptide
MAADGYLPDWLEDNLSEGIREWWALKPGAPQPKANQQHQDNGRGLVLPGYKYLGPFNGLDKGEPVNEADAAALEHDKAYDKQLEQGDNPYLKYNHADAEFQQRLATDTSFGGNLGRAVFQAKKRILEPLGLVEEGVKTAPGKKRPLEKTPNRPTNPDSGKAPAKKKQKDGEPADSARRTLDFEDSGAGDGPPEGSSSGEMSHDAEMRAAPGGNAVEAGQGADGVGNASGDWHCDSTWSEGRVTTTSTRTWVLPTYNNHLYLRIGTTANSNTYNGFSTPWGYFDFNRFHCHFSPRDWQRLINNNWGLRPKSMRVKIFNIQVKEVTTSNGETTVANNLTSTVQIFADSTYELPYVMDAGQEGSFPPFPNDVFMVPQYGYCGVVTGKNQNQTDRNAFYCLEYFPSQMLRTGNNFEVSYQFEKVPFHSMYAHSQSLDRMMNPLLDQYLWHLQSTTTGNSLNQGTATTTYGKITTGDFAYYRKNWLPGACIKQQKFSKNANQNYKIPASGGDALLKYDTHTTLNGRWSNMAPGPPMATAGAGDSDFSNSQLIFAGPNPSGNTTTSSNNLLFTSEEEIATTNPRDTDMFGQIADNNQNATTAPHIANLDAMGIVPGMVWQNRDIYYQGPIWAKVPHTDGHFHPSPLMGGFGLKHPPPQIFIKNTPVPANPNTTFSAARINSFLTQYSTGQVAVQIDWEIQKEHSKRWNPEVQFTSNYGTQNSMLWAPDNAGNYHELRAIGSRFLTHHL

SEQ ID NO: 1502 - DNA, 2211 bp, synthetic construct
  misc_feature 1..2211: note = Description of Artificial Sequence: Synthetic polynucleotide
  source 1..2211: mol_type = other DNA
atggctgccgatggttatcttccagattggctcgaggacaacctctctgagggcattcgcgagtggtgggacttgaaacctggagccccgaagcccaaagccaaccagcaaaagcaggacgacggccggggtctggtgcttcctggctacaagtacctcggacccttcaacggactcgacaagggggagcccgtcaacgcggcggacgcagcggccctcgagcacgacaaggcctacgaccagcagctcaaagcgggtgacaatccgtacctgcggtataaccacgccgacgccgagtttcaggagcgtctgcaagaagatacgtcttttgggggcaacctcgggcgagcagtcttccaggccaagaagcgggttctcgaacctctcggtctggttgaggaaggcgctaaggcggctcctggaaagaaacgtccggtagagcagtcgccacaagagccagactcctcctcgggcatcggcaagacaggccagcagcccgctaaaaagagactcaattttggtcagactggcgactcagagtcagtccccgatccacaacctctcggagaacctccagcagccccctcaggtctgggacctaatacaatggcttcaggcggtggcgctccaatggcagacaataacgaaggcgccgacggagtgggtaattcctcgggaaattggcattgcgattccacatggctgggggacagagtcatcaccaccagcacccgaacctgggccctgcccacctacaacaaccacctctacaagcaaatctccaacggcacctcgggaggaagcaccaacgacaacacctattttggctacagcaccccctgggggtattttgacttcaacagattccactgtcacttttcaccacgtgactggcaacgactcatcaacaacaattggggattccggcccaaaagactcaacttcaagctgttcaacatccaggtcaaggaagtcacgacgaacgaaggcaccaagaccatcgccaataatctcaccagcaccgtgcaggtctttacggactcggagtaccagttaccgtacgtgctaggatccgctcaccagggatgtctgcctccgttcccggcggacgtcttcatggttcctcagtacggctatttaactttaaacaatggaagccaagccctgggacgttcctccttctactgtctggagtatttcccatcgcagatgctgagaaccggcaacaactttcagttcagctacaccttcgaggacgtgcctttccacagcagctacgcgcacagccagagcctggacaggctgatgaatcccctcatcgaccagtacctgtactacctggtcagaacgcaaacgactggaactggagggacgcagactctggcattcagccaagcgggtcctagctcaatggccaaccaggctagaaattgggtgcccggaccttgctaccggcagcagcgcgtctccacgacaaccaaccagaacaacaacagcaactttgcctggacgggagctgccaagtttaagctgaacggccgagactctctaatgaatccgggcgtggcaatggcttcccacaaggatgacgacgaccgcttcttcccttcgagcggggtcctgatttttggcaagcaaggagccgggaacgatggagtggattacagccaagtgctgattacagatgaggaagaaatcaaggctaccaaccccgtggccacagaagaatatggagcagtggccatcaacaaccaggccgccaatacgcaggcgcagaccggactcgtgcacaaccagggggtgattcccggcatggtgtggcagaatagagacgtgtacctgcagggtcccatctgggccaaaattcctcacacggacggcaactttcacccgtctcccctgatgggcggctttggactgaagcacccgcctcctcaaattctcatcaagaacacaccggttccagcggacccgccgcttaccttcaaccaggccaagctgaactctttcatcacgcagtacagcaccggacaggtcagcgtggaaatcgagtgggagctgcagaaagaaaacagcaaacgctggaatccagagattcaatacacttccaactactacaaatctacaaatgtggactttgctgtcaacacggagggggtttatagcgagcctcgccccattggcacccgttacctcacccgcaacctgtaa

SEQ ID NO: 1503 - DNA, 2592 bp, synthetic construct
  misc_feature 1..2592: note = Description of Artificial Sequence: Synthetic polynucleotide
  source 1..2592: mol_type = other DNA
ctggctgccgatggttatcttccagattggctcgaggacaacctctctgagggcattcgcgagtggtgggacttgaaacctggagccccgaagcccaaagccaaccagcaaaagcaggacgacggccggggtctggtgcttcctggctacaagtacctcggacccttcaacggactcgacaagggggagcccgtcaacgcggcggacgcagcggccctcgagcacgacaaggcctacgaccagcagctcaaagcgggtgacaatccgtacctgcggtataaccacgccgacgccgagtttcaggagcgtctgcaagaagatacgtcttttgggggcaacctcgggcgagcagtcttccaggccaagaagcgggttctcgaacctctcggtctggttgaggaaggcgctaagatggaagtgcagctccaagccagtggtggcggactggtgcaggcaggaggcagcttgaggctcagctgtgccgccagcggcttcaagatcacccactacaccatgggctggttccggcaggcccctggcaaggagagggagttcgtgagcaggattacctggggtggtgacaacaccttctacagcaacagcgtgaagggcaggttcaccatcagcagggacaacgccaagaacaccgtgtacctgcagatgaacagcctgaagcccgaggacaccgccgactactactgtgcagccggcagtaccagcaccgctacccccctgagggtggactactggggcaaaggcactcaggtgacagtgtcttcaggagggggtggcagcgctcctggaaagaaacgtccggtagagcagtcgccacaagagccagactcctcctcgggcatcggcaagacaggccagcagcccgctaaaaagagactcaattttggtcagactggcgactcagagtcagtccccgatccacaacctctcggagaacctccagcagccccctcaggtctgggacctaatacaatggcttcaggcggtggcgctccaatggcagacaataacgaaggcgccgacggagtgggtaattcctcgggaaattggcattgcgattccacatggctgggggacagagtcatcaccaccagcacccgaacctgggccctgcccacctacaacaaccacctctacaagcaaatctccaacggcacctcgggaggaagcaccaacgacaacacctattttggctacagcaccccctgggggtattttgacttcaacagattccactgtcacttttcaccacgtgactggcaacgactcatcaacaacaattggggattccggcccaaaagactcaacttcaagctgttcaacatccaggtcaaggaagtcacgacgaacgaaggcaccaagaccatcgccaataatctcaccagcaccgtgcaggtctttacggactcggagtaccagttaccgtacgtgctaggatccgctcaccagggatgtctgcctccgttcccggcggacgtcttcatggttcctcagtacggctatttaactttaaacaatggaagccaagccctgggacgttcctccttctactgtctggagtatttcccatcgcagatgctgagaaccggcaacaactttcagttcagctacaccttcgaggacgtgcctttccacagcagctacgcgcacagccagagcctggacaggctgatgaatcccctcatcgaccagtacctgtactacctggtcagaacgcaaacgactggaactggagggacgcagactctggcattcagccaagcgggtcctagctcaatggccaaccaggctagaaattgggtgcccggaccttgctaccggcagcagcgcgtctccacgacaaccaaccagaacaacaacagcaactttgcctggacgggagctgccaagtttaagctgaacggccgagactctctaatgaatccgggcgtggcaatggcttcccacaaggatgacgacgaccgcttcttcccttcgagcggggtcctgatttttggcaagcaaggagccgggaacgatggagtggattacagccaagtgctgattacagatgaggaagaaatcaaggctaccaaccccgtggccacagaagaatatggagcagtggccatcaacaaccaggccgccaatacgcaggcgcagaccggactcgtgcacaaccagggggtgattcccggcatggtgtggcagaatagagacgtgtacctgcagggtcccatctgggccaaaattcctcacacggacggcaactttcacccgtctcccctgatgggcggctttggactgaagcacccgcctcctcaaattctcatcaagaacacaccggttccagcggacccgccgcttaccttcaaccaggccaagctgaactctttcatcacgcagtacagcaccggacaggtcagcgtggaaatcgagtgggagctgcagaaagaaaacagcaaacgctggaatccagagattcaatacacttccaactactacaaatctacaaatgtggactttgctgtcaacacggagggggtttatagcgagcctcgccccattggcacccgttacctcacccgcaacctgtaa

SEQ ID NO: 1504 - DNA, 2601 bp, synthetic construct
  misc_feature 1..2601: note = Description of Artificial Sequence: Synthetic polynucleotide
  source 1..2601: mol_type = other DNA
ctggctgccgatggttatcttccagattggctcgaggacaacctctctgagggcattcgcgagtggtgggacttgaaacctggagccccgaagcccaaagccaaccagcaaaagcaggacgacggccggggtctggtgcttcctggctacaagtacctcggacccttcaacggactcgacaagggggagcccgtcaacgcggcggacgcagcggccctcgagcacgacaaggcctacgaccagcagctcaaagcgggtgacaatccgtacctgcggtataaccacgccgacgccgagtttcaggagcgtctgcaagaagatacgtcttttgggggcaacctcgggcgagcagtcttccaggccaagaagcgggttctcgaacctctcggtctggttgaggaaggcgctaagatggaggtgcagctgcaggcttctggaggaggactggtgcaggctggagggagtctgaggctgtcttgcagtgcctcagtgaggactttctccatctacgccatgggctggtttaggcaggctcccgggaaggagcgcgaattcgtggccggaatcaaccggtctggcgacgtgaccaagtacgctgatttcgtgaaaggccggtttagcatttccagagacaacgccaagaatatggtgtatctgcagatgaactccctgaaacctgaagacacagctctgtactattgtgccgctacttgggcctacgataccgtgggggctctgacatcaggatataatttttggggccaggggacccaggtgacagtgagctccggaggaggaggaagcgctcctggaaagaaacgtccggtagagcagtcgccacaagagccagactcctcctcgggcatcggcaagacaggccagcagcccgctaaaaagagactcaattttggtcagactggcgactcagagtcagtccccgatccacaacctctcggagaacctccagcagccccctcaggtctgggacctaatacaatggcttcaggcggtggcgctccaatggcagacaataacgaaggcgccgacggagtgggtaattcctcgggaaattggcattgcgattccacatggctgggggacagagtcatcaccaccagcacccgaacctgggccctgcccacctacaacaaccacctctacaagcaaatctccaacggcacctcgggaggaagcaccaacgacaacacctattttggctacagcaccccctgggggtattttgacttcaacagattccactgtcacttttcaccacgtgactggcaacgactcatcaacaacaattggggattccggcccaaaagactcaacttcaagctgttcaacatccaggtcaaggaagtcacgacgaacgaaggcaccaagaccatcgccaataatctcaccagcaccgtgcaggtctttacggactcggagtaccagttaccgtacgtgctaggatccgctcaccagggatgtctgcctccgttcccggcggacgtcttcatggttcctcagtacggctatttaactttaaacaatggaagccaagccctgggacgttcctccttctactgtctggagtatttcccatcgcagatgctgagaaccggcaacaactttcagttcagctacaccttcgaggacgtgcctttccacagcagctacgcgcacagccagagcctggacaggctgatgaatcccctcatcgaccagtacctgtactacctggtcagaacgcaaacgactggaactggagggacgcagactctggcattcagccaagcgggtcctagctcaatggccaaccaggctagaaattgggtgcccggaccttgctaccggcagcagcgcgtctccacgacaaccaaccagaacaacaacagcaactttgcctggacgggagctgccaagtttaagctgaacggccgagactctctaatgaatccgggcgtggcaatggcttcccacaaggatgacgacgaccgcttcttcccttcgagcggggtcctgatttttggcaagcaaggagccgggaacgatggagtggattacagccaagtgctgattacagatgaggaagaaatcaaggctaccaaccccgtggccacagaagaatatggagcagtggccatcaacaaccaggccgccaatacgcaggcgcagaccggactcgtgcacaaccagggggtgattcccggcatggtgtggcagaatagagacgtgtacctgcagggtcccatctgggccaaaattcctcacacggacggcaactttcacccgtctcccctgatgggcggctttggactgaagcacccgcctcctcaaattctcatcaagaacacaccggttccagcggacccgccgcttaccttcaaccaggccaagctgaactctttcatcacgcagtacagcaccggacaggtcagcgtggaaatcgagtgggagctgcagaaagaaaacagcaaacgctggaatccagagattcaatacacttccaactactacaaatctacaaatgtggactttgctgtcaacacggagggggtttatagcgagcctcgccccattggcacccgttacctcacccgcaacctgtaa

SEQ ID NO: 1505 - DNA, 2367 bp, synthetic construct
  misc_feature 1..2367: note = Description of Artificial Sequence: Synthetic polynucleotide
  source 1..2367: mol_type = other DNA
ctggctgccgatggttatcttccagattggctcgaggacaacctctctgagggcattcgcgagtggtgggacttgaaacctggagccccgaagcccaaagccaaccagcaaaagcaggacgacggccggggtctggtgcttcctggctacaagtacctcggacccttcaacggactcgacaagggggagcccgtcaacgcggcggacgcagcggccctcgagcacgacaaggcctacgaccagcagctcaaagcgggtgacaatccgtacctgcggtataaccacgccgacgccgagtttcaggagcgtctgcaagaagatacgtcttttgggggcaacctcgggcgagcagtcttccaggccaagaagcgggttctcgaacctctcggtctggttgaggaaggcgctaagatgccaagcagtgtaatcgatgcgctgcagtacaagctggagggcaccacgaggctgaccaggaagaggggtctgaagctggccacggccctcagccttagcaataagttcgtagagggcagccccagcggcggcggcggcagcggcggcggcggcagcgctcctggaaagaaacgtccggtagagcagtcgccacaagagccagactcctcctcgggcatcggcaagacaggccagcagcccgctaaaaagagactcaattttggtcagactggcgactcagagtcagtccccgatccacaacctctcggagaacctccagcagccccctcaggtctgggacctaatacaatggcttcaggcggtggcgctccaatggcagacaataacgaaggcgccgacggagtgggtaattcctcgggaaattggcattgcgattccacatggctgggggacagagtcatcaccaccagcacccgaacctgggccctgcccacctacaacaaccacctctacaagcaaatctccaacggcacctcgggaggaagcaccaacgacaacacctattttggctacagcaccccctgggggtattttgacttcaacagattccactgtcacttttcaccacgtgactggcaacgactcatcaacaacaattggggattccggcccaaaagactcaacttcaagctgttcaacatccaggtcaaggaagtcacgacgaacgaaggcaccaagaccatcgccaataatctcaccagcaccgtgcaggtctttacggactcggagtaccagttaccgtacgtgctaggatccgctcaccagggatgtctgcctccgttcccggcggacgtcttcatggttcctcagtacggctatttaactttaaacaatggaagccaagccctgggacgttcctccttctactgtctggagtatttcccatcgcagatgctgagaaccggcaacaactttcagttcagctacaccttcgaggacgtgcctttccacagcagctacgcgcacagccagagcctggacaggctgatgaatcccctcatcgaccagtacctgtactacctggtcagaacgcaaacgactggaactggagggacgcagactctggcattcagccaagcgggtcctagctcaatggccaaccaggctagaaattgggtgcccggaccttgctaccggcagcagcgcgtctccacgacaaccaaccagaacaacaacagcaactttgcctggacgggagctgccaagtttaagctgaacggccgagactctctaatgaatccgggcgtggcaatggcttcccacaaggatgacgacgaccgcttcttcccttcgagcggggtcctgatttttggcaagcaaggagccgggaacgatggagtggattacagccaagtgctgattacagatgaggaagaaatcaaggctaccaaccccgtggccacagaagaatatggagcagtggccatcaacaaccaggccgccaatacgcaggcgcagaccggactcgtgcacaaccagggggtgattcccggcatggtgtggcagaatagagacgtgtacctgcagggtcccatctgggccaaaattcctcacacggacggcaactttcacccgtctcccctgatgggcggctttggactgaagcacccgcctcctcaaattctcatcaagaacacaccggttccagcggacccgccgcttaccttcaaccaggccaagctgaactctttcatcacgcagtacagcaccggacaggtcagcgtggaaatcgagtgggagctgcagaaagaaaacagcaaacgctggaatccagagattcaatacacttccaactactacaaatctacaaatgtggactttgctgtcaacacggagggggtttatagcgagcctcgccccattggcacccgttacctcacccgcaacctgtaa

SEQ ID NO: 1506 - DNA, 2328 bp, synthetic construct
  misc_feature 1..2328: note = Description of Artificial Sequence: Synthetic polynucleotide
  source 1..2328: mol_type = other DNA
ctggctgccgatggttatcttccagattggctcgaggacaacctctctgagggcattcgcgagtggtgggacttgaaacctggagccccgaagcccaaagccaaccagcaaaagcaggacgacggccggggtctggtgcttcctggctacaagtacctcggacccttcaacggactcgacaagggggagcccgtcaacgcggcggacgcagcggccctcgagcacgacaaggcctacgaccagcagctcaaagcgggtgacaatccgtacctgcggtataaccacgccgacgccgagtttcaggagcgtctgcaagaagatacgtcttttgggggcaacctcgggcgagcagtcttccaggccaagaagcgggttctcgaacctctcggtctggttgaggaaggcgctaagatgtataccatctggatgcccgagaaccccaggcccggtaccccctgcgacatcttcaccaacagcaggggcaagcgagccagcaacggcggcggcggcggcagcggcggcggcggcagcgctcctggaaagaaacgtccggtagagcagtcgccacaagagccagactcctcctcgggcatcggcaagacaggccagcagcccgctaaaaagagactcaattttggtcagactggcgactcagagtcagtccccgatccacaacctctcggagaacctccagcagccccctcaggtctgggacctaatacaatggcttcaggcggtggcgctccaatggcagacaataacgaaggcgccgacggagtgggtaattcctcgggaaattggcattgcgattccacatggctgggggacagagtcatcaccaccagcacccgaacctgggccctgcccacctacaacaaccacctctacaagcaaatctccaacggcacctcgggaggaagcaccaacgacaacacctattttggctacagcaccccctgggggtattttgacttcaacagattccactgtcacttttcaccacgtgactggcaacgactcatcaacaacaattggggattccggcccaaaagactcaacttcaagctgttcaacatccaggtcaaggaagtcacgacgaacgaaggcaccaagaccatcgccaataatctcaccagcaccgtgcaggtctttacggactcggagtaccagttaccgtacgtgctaggatccgctcaccagggatgtctgcctccgttcccggcggacgtcttcatggttcctcagtacggctatttaactttaaacaatggaagccaagccctgggacgttcctccttctactgtctggagtatttcccatcgcagatgctgagaaccggcaacaactttcagttcagctacaccttcgaggacgtgcctttccacagcagctacgcgcacagccagagcctggacaggctgatgaatcccctcatcgaccagtacctgtactacctggtcagaacgcaaacgactggaactggagggacgcagactctggcattcagccaagcgggtcctagctcaatggccaaccaggctagaaattgggtgcccggaccttgctaccggcagcagcgcgtctccacgacaaccaaccagaacaacaacagcaactttgcctggacgggagctgccaagtttaagctgaacggccgagactctctaatgaatccgggcgtggcaatggcttcccacaaggatgacgacgaccgcttcttcccttcgagcggggtcctgatttttggcaagcaaggagccgggaacgatggagtggattacagccaagtgctgattacagatgaggaagaaatcaaggctaccaaccccgtggccacagaagaatatggagcagtggccatcaacaaccaggccgccaatacgcaggcgcagaccggactcgtgcacaaccagggggtgattcccggcatggtgtggcagaatagagacgtgtacctgcagggtcccatctgggccaaaattcctcacacggacggcaactttcacccgtctcccctgatgggcggctttggactgaagcacccgcctcctcaaattctcatcaagaacacaccggttccagcggacccgccgcttaccttcaaccaggccaagctgaactctttcatcacgcagtacagcaccggacaggtcagcgtggaaatcgagtgggagctgcagaaagaaaacagcaaacgctggaatccagagattcaatacacttccaactactacaaatctacaaatgtggactttgctgtcaacacggagggggtttatagcgagcctcgccccattggcacccgttacctcacccgcaacctgtaa

SEQ ID NO: 1507 - DNA, 2298 bp, synthetic construct
  misc_feature 1..2298: note = Description of Artificial Sequence: Synthetic polynucleotide
  source 1..2298: mol_type = other DNA
ctggctgccgatggttatcttccagattggctcgaggacaacctctctgagggcattcgcgagtggtgggacttgaaacctggagccccgaagcccaaagccaaccagcaaaagcaggacgacggccggggtctggtgcttcctggctacaagtacctcggacccttcaacggactcgacaagggggagcccgtcaacgcggcggacgcagcggccctcgagcacgacaaggcctacgaccagcagctcaaagcgggtgacaatccgtacctgcggtataaccacgccgacgccgagtttcaggagcgtctgcaagaagatacgtcttttgggggcaacctcgggcgagcagtcttccaggccaagaagcgggttctcgaacctctcggtctggttgaggaaggcgctaagatgaccttcttctacggcggcagcaggggcaagaggaacaacttcaagaccgaggagtacggcggcggcggcagcggcggcggcggcagcgctcctggaaagaaacgtccggtagagcagtcgccacaagagccagactcctcctcgggcatcggcaagacaggccagcagcccgctaaaaagagactcaattttggtcagactggcgactcagagtcagtccccgatccacaacctctcggagaacctccagcagccccctcaggtctgggacctaatacaatggcttcaggcggtggcgctccaatggcagacaataacgaaggcgccgacggagtgggtaattcctcgggaaattggcattgcgattccacatggctgggggacagagtcatcaccaccagcacccgaacctgggccctgcccacctacaacaaccacctctacaagcaaatctccaacggcacctcgggaggaagcaccaacgacaacacctattttggctacagcaccccctgggggtattttgacttcaacagattccactgtcacttttcaccacgtgactggcaacgactcatcaacaacaattggggattccggcccaaaagactcaacttcaagctgttcaacatccaggtcaaggaagtcacgacgaacgaaggcaccaagaccatcgccaataatctcaccagcaccgtgcaggtctttacggactcggagtaccagttaccgtacgtgctaggatccgctcaccagggatgtctgcctccgttcccggcggacgtcttcatggttcctcagtacggctatttaactttaaacaatggaagccaagccctgggacgttcctccttctactgtctggagtatttcccatcgcagatgctgagaaccggcaacaactttcagttcagctacaccttcgaggacgtgcctttccacagcagctacgcgcacagccagagcctggacaggctgatgaatcccctcatcgaccagtacctgtactacctggtcagaacgcaaacgactggaactggagggacgcagactctggcattcagccaagcgggtcctagctcaatggccaaccaggctagaaattgggtgcccggaccttgctaccggcagcagcgcgtctccacgacaaccaaccagaacaacaacagcaactttgcctggacgggagctgccaagtttaagctgaacggccgagactctctaatgaatccgggcgtggcaatggcttcccacaaggatgacgacgaccgcttcttcccttcgagcggggtcctgatttttggcaagcaaggagccgggaacgatggagtggattacagccaagtgctgattacagatgaggaagaaatcaaggctaccaaccccgtggccacagaagaatatggagcagtggccatcaacaaccaggccgccaatacgcaggcgcagaccggactcgtgcacaaccagggggtgattcccggcatggtgtggcagaatagagacgtgtacctgcagggtcccatctgggccaaaattcctcacacggacggcaactttcacccgtctcccctgatgggcggctttggactgaagcacccgcctcctcaaattctcatcaagaacacaccggttccagcggacccgccgcttaccttcaaccaggccaagctgaactctttcatcacgcagtacagcaccggacaggtcagcgtggaaatcgagtgggagctgcagaaagaaaacagcaaacgctggaatccagagattcaatacacttccaactactacaaatctacaaatgtggactttgctgtcaacacggagggggtttatagcgagcctcgccccattggcacccgttacctcacccgcaacctgtaa

SEQ ID NO: 1508 - DNA, 2211 bp, synthetic construct
  misc_feature 1..2211: note = Description of Artificial Sequence: Synthetic polynucleotide
  source 1..2211: mol_type = other DNA
atggctgccgatggttatcttccagattggctcgaggacaaccttagtgaaggaattcgcgagtggtgggctttgaaacctggagcccctcaacccaaggcaaatcaacaacatcaagacaacgctcgaggtcttgtgcttccgggttacaaataccttggacccggcaacggactcgacaagggggagccggtcaacgcagcagacgcggcggccctcgagcacgacaaggcctacgaccagcagctcaaggccggagacaacccgtacctcaagtacaaccacgccgacgccgagttccaggagcggctcaaagaagatacgtcttttgggggcaacctcgggcgagcagtcttccaggccaaaaagaggcttcttgaacctcttggtctggttgaggaagcggctaaggcggctcctggaaagaagaggcctgtagagcagtctcctcaggaaccggactcctccgcgggtattggcaaatcgggtgcacagcccgctaaaaagagactcaatttcggtcagactggcgacacagagtcagtcccagaccctcaaccaatcggagaacctcccgcagccccctcaggtgtgggatctcttacaatggcttcaggtggtggcgcaccagtggcagacaataacgaaggtgccgatggagtgggtagttcctcgggaaattggcattgcgattcccaatggctgggggacagagtcatcaccaccagcacccgaacctgggccctgcccacctacaacaatcacctctacaagcaaatctccaacagcacatctggaggatcttcaaatgacaacgcctacttcggctacagcaccccctgggggtattttgacttcaacagattccactgccacttctcaccacgtgactggcagcgactcatcaacaacaactggggattccggcctaagcgactcaacttcaagctcttcaacattcaggtcaaagaggttacggacaacaatggagtcaagaccatcgccaataaccttaccagcacggtccaggtcttcacggactcagactatcagctcccgtacgtgctcgggtcggctcacgagggctgcctcccgccgttcccagcggacgttttcatgattcctcagtacgggtatctgacgcttaatgatggaagccaggccgtgggtcgttcgtccttttactgcctggaatatttcccgtcgcaaatgctaagaacgggtaacaacttccagttcaactacgagtttgagaacgtacctttccatagcagctacgctcacagccaaagcctggaccgactaatgaatccactcatcgaccaatacttgtactatctctcaaagactattaacgattctggacagaatcaacaaacgctaaaattcagtgtggccggacccagcaacatggctgtccagggaagaaactacatacctggacccagctaccgacaacaacgtgtctcaaccactgtgactcaaaacaacaacagcgaatttgcttggcctggagcttcttcttgggctctcaatggacgtaatagcttgatgaatcctggacctgctatggccagccacaaagaaggagaggaccgtttctttcctttgtctggatctttaatttttggcaaacaaggaactggaagagacaacgtggatgcggacgaagtcatgataaccaacgaagaagaaattaaaactactaacccggtagcaacggagtcctatggacaagtggccataaaccaccagagtgcccaagcacaggcgcagaccggctgggttcaaaaccaaggaatacttccgggtatggtttggcaggacagagatgtgtacctgcaaggacccatttgggccaaaattcctcacacggacggcaactttcacccttctccgctgatgggagggtttggaatgaagcacccgcctcctcagatcctcatcaaaaacacacctgtacctgcggatcctccaacggccttcaacaaggacaagctgaactctttcatcacccagtattctactggccaagtcagcgtggagatcgagtgggagctgcagaaggaaaacagcaagcgctggaacccggagatccagtacacttccaactattacaagtctaataatgttgaatttgctgttaatactgaaggtgtatatagtgaaccccgccccattggcaccagatacctgactcgtaatctgtaa

SEQ ID NO: 1509 - DNA, 2277 bp, synthetic construct
  misc_feature 1..2277: note = Description of Artificial Sequence: Synthetic polynucleotide
  source 1..2277: mol_type = other DNA
ctggctgccgatggttatcttccagattggctcgaggacaaccttagtgaaggaattcgcgagtggtgggctttgaaacctggagcccctcaacccaaggcaaatcaacaacatcaagacaacgctcgaggtcttgtgcttccgggttacaaataccttggacccggcaacggactcgacaagggggagccggtcaacgcagcagacgcggcggccctcgagcacgacaaggcctacgaccagcagctcaaggccggagacaacccgtacctcaagtacaaccacgccgacgccgagttccaggagcggctcaaagaagatacgtcttttgggggcaacctcgggcgagcagtcttccaggccaaaaagaggcttcttgaacctcttggtctggttgaggaagcggctaagatgaacaaccagaagatcgtgaacctgaaggagaaggtggcccagctggaggccggcggcggcggcagcgctcctggaaagaagaggcctgtagagcagtctcctcaggaaccggactcctccgcgggtattggcaaatcgggtgcacagcccgctaaaaagagactcaatttcggtcagactggcgacacagagtcagtcccagaccctcaaccaatcggagaacctcccgcagccccctcaggtgtgggatctcttacaatggcttcaggtggtggcgcaccagtggcagacaataacgaaggtgccgatggagtgggtagttcctcgggaaattggcattgcgattcccaatggctgggggacagagtcatcaccaccagcacccgaacctgggccctgcccacctacaacaatcacctctacaagcaaatctccaacagcacatctggaggatcttcaaatgacaacgcctacttcggctacagcaccccctgggggtattttgacttcaacagattccactgccacttctcaccacgtgactggcagcgactcatcaacaacaactggggattccggcctaagcgactcaacttcaagctcttcaacattcaggtcaaagaggttacggacaacaatggagtcaagaccatcgccaataaccttaccagcacggtccaggtcttcacggactcagactatcagctcccgtacgtgctcgggtcggctcacgagggctgcctcccgccgttcccagcggacgttttcatgattcctcagtacgggtatctgacgcttaatgatggaagccaggccgtgggtcgttcgtccttttactgcctggaatatttcccgtcgcaaatgctaagaacgggtaacaacttccagttcaactacgagtttgagaacgtacctttccatagcagctacgctcacagccaaagcctggaccgactaatgaatccactcatcgaccaatacttgtactatctctcaaagactattaacgattctggacagaatcaacaaacgctaaaattcagtgtggccggacccagcaacatggctgtccagggaagaaactacatacctggacccagctaccgacaacaacgtgtctcaaccactgtgactcaaaacaacaacagcgaatttgcttggcctggagcttcttcttgggctctcaatggacgtaatagcttgatgaatcctggacctgctatggccagccacaaagaaggagaggaccgtttctttcctttgtctggatctttaatttttggcaaacaaggaactggaagagacaacgtggatgcggacgaagtcatgataaccaacgaagaagaaattaaaactactaacccggtagcaacggagtcctatggacaagtggccataaaccaccagagtgcccaagcacaggcgcagaccggctgggttcaaaaccaaggaatacttccgggtatggtttggcaggacagagatgtgtacctgcaaggacccatttgggccaaaattcctcacacggacggcaactttcacccttctccgctgatgggagggtttggaatgaagcacccgcctcctcagatcctcatcaaaaacacacctgtacctgcggatcctccaacggccttcaacaaggacaagctgaactctttcatcacccagtattctactggccaagtcagcgtggagatcgagtgggagctgcagaaggaaaacagcaagcgctggaacccggagatccagtacacttccaactattacaagtctaataatgttgaatttgctgttaatactgaaggtgtatatagtgaaccccgccccattggcaccagatacctgactcgtaatctgtaa

SEQ ID NO: 1510 - DNA, 2313 bp, synthetic construct
  misc_feature 1..2313: note = Description of Artificial Sequence: Synthetic polynucleotide
  source 1..2313: mol_type = other DNA
ctggctgccgatggttatcttccagattggctcgaggacaaccttagtgaaggaattcgcgagtggtgggctttgaaacctggagcccctcaacccaaggcaaatcaacaacatcaagacaacgctcgaggtcttgtgcttccgggttacaaataccttggacccggcaacggactcgacaagggggagccggtcaacgcagcagacgcggcggccctcgagcacgacaaggcctacgaccagcagctcaaggccggagacaacccgtacctcaagtacaaccacgccgacgccgagttccaggagcggctcaaagaagatacgtcttttgggggcaacctcgggcgagcagtcttccaggccaaaaagaggcttcttgaacctcttggtctggttgaggaagcggctaagatgtataccatctggatgcccgagaaccccaggcccggtaccccctgcgacatcttcaccaacagcaggggcaagcgagccagcaacggcggcggcggcggcagcgctcctggaaagaagaggcctgtagagcagtctcctcaggaaccggactcctccgcgggtattggcaaatcgggtgcacagcccgctaaaaagagactcaatttcggtcagactggcgacacagagtcagtcccagaccctcaaccaatcggagaacctcccgcagccccctcaggtgtgggatctcttacaatggcttcaggtggtggcgcaccagtggcagacaataacgaaggtgccgatggagtgggtagttcctcgggaaattggcattgcgattcccaatggctgggggacagagtcatcaccaccagcacccgaacctgggccctgcccacctacaacaatcacctctacaagcaaatctccaacagcacatctggaggatcttcaaatgacaacgcctacttcggctacagcaccccctgggggtattttgacttcaacagattccactgccacttctcaccacgtgactggcagcgactcatcaacaacaactggggattccggcctaagcgactcaacttcaagctcttcaacattcaggtcaaagaggttacggacaacaatggagtcaagaccatcgccaataaccttaccagcacggtccaggtcttcacggactcagactatcagctcccgtacgtgctcgggtcggctcacgagggctgcctcccgccgttcccagcggacgttttcatgattcctcagtacgggtatctgacgcttaatgatggaagccaggccgtgggtcgttcgtccttttactgcctggaatatttcccgtcgcaaatgctaagaacgggtaacaacttccagttcaactacgagtttgagaacgtacctttccatagcagctacgctcacagccaaagcctggaccgactaatgaatccactcatcgaccaatacttgtactatctctcaaagactattaacgattctggacagaatcaacaaacgctaaaattcagtgtggccggacccagcaacatggctgtccagggaagaaactacatacctggacccagctaccgacaacaacgtgtctcaaccactgtgactcaaaacaacaacagcgaatttgcttggcctggagcttcttcttgggctctcaatggacgtaatagcttgatgaatcctggacctgctatggccagccacaaagaaggagaggaccgtttctttcctttgtctggatctttaatttttggcaaacaaggaactggaagagacaacgtggatgcggacgaagtcatgataaccaacgaagaagaaattaaaactactaacccggtagcaacggagtcctatggacaagtggccataaaccaccagagtgcccaagcacaggcgcagaccggctgggttcaaaaccaaggaatacttccgggtatggtttggcaggacagagatgtgtacctgcaaggacccatttgggccaaaattcctcacacggacggcaactttcacccttctccgctgatgggagggtttggaatgaagcacccgcctcctcagatcctcatcaaaaacacacctgtacctgcggatcctccaacggccttcaacaaggacaagctgaactctttcatcacccagtattctactggccaagtcagcgtggagatcgagtgggagctgcagaaggaaaacagcaagcgctggaacccggagatccagtacacttccaactattacaagtctaataatgttgaatttgctgttaatactgaaggtgtatatagtgaaccccgccccattggcaccagatacctgactcgtaatctgtaa

SEQ ID NO: 1511 - DNA, 2283 bp, synthetic construct
  misc_feature 1..2283: note = Description of Artificial Sequence: Synthetic polynucleotide
  source 1..2283: mol_type = other DNA
ctggctgccgatggttatcttccagattggctcgaggacaaccttagtgaaggaattcgcgagtggtgggctttgaaacctggagcccctcaacccaaggcaaatcaacaacatcaagacaacgctcgaggtcttgtgcttccgggttacaaataccttggacccggcaacggactcgacaagggggagccggtcaacgcagcagacgcggcggccctcgagcacgacaaggcctacgaccagcagctcaaggccggagacaacccgtacctcaagtacaaccacgccgacgccgagttccaggagcggctcaaagaagatacgtcttttgggggcaacctcgggcgagcagtcttccaggccaaaaagaggcttcttgaacctcttggtctggttgaggaagcggctaagatgaccttcttctacggcggcagcaggggcaagaggaacaacttcaagaccgaggagtacggcggcggcggcagcgctcctggaaagaagaggcctgtagagcagtctcctcaggaaccggactcctccgcgggtattggcaaatcgggtgcacagcccgctaaaaagagactcaatttcggtcagactggcgacacagagtcagtcccagaccctcaaccaatcggagaacctcccgcagccccctcaggtgtgggatctcttacaatggcttcaggtggtggcgcaccagtggcagacaataacgaaggtgccgatggagtgggtagttcctcgggaaattggcattgcgattcccaatggctgggggacagagtcatcaccaccagcacccgaacctgggccctgcccacctacaacaatcacctctacaagcaaatctccaacagcacatctggaggatcttcaaatgacaacgcctacttcggctacagcaccccctgggggtattttgacttcaacagattccactgccacttctcaccacgtgactggcagcgactcatcaacaacaactggggattccggcctaagcgactcaacttcaagctcttcaacattcaggtcaaagaggttacggacaacaatggagtcaagaccatcgccaataaccttaccagcacggtccaggtcttcacggactcagactatcagctcccgtacgtgctcgggtcggctcacgagggctgcctcccgccgttcccagcggacgttttcatgattcctcagtacgggtatctgacgcttaatgatggaagccaggccgtgggtcgttcgtccttttactgcctggaatatttcccgtcgcaaatgctaagaacgggtaacaacttccagttcaactacgagtttgagaacgtacctttccatagcagctacgctcacagccaaagcctggaccgactaatgaatccactcatcgaccaatacttgtactatctctcaaagactattaacgattctggacagaatcaacaaacgctaaaattcagtgtggccggacccagcaacatggctgtccagggaagaaactacatacctggacccagctaccgacaacaacgtgtctcaaccactgtgactcaaaacaacaacagcgaatttgcttggcctggagcttcttcttgggctctcaatggacgtaatagcttgatgaatcctggacctgctatggccagccacaaagaaggagaggaccgtttctttcctttgtctggatctttaatttttggcaaacaaggaactggaagagacaacgtggatgcggacgaagtcatgataaccaacgaagaagaaattaaaactactaacccggtagcaacggagtcctatggacaagtggccataaaccaccagagtgcccaagcacaggcgcagaccggctgggttcaaaaccaaggaatacttccgggtatggtttggcaggacagagatgtgtacctgcaaggacccatttgggccaaaattcctcacacggacggcaactttcacccttctccgctgatgggagggtttggaatgaagcacccgcctcctcagatcctcatcaaaaacacacctgtacctgcggatcctccaacggccttcaacaaggacaagctgaactctttcatcacccagtattctactggccaagtcagcgtggagatcgagtgggagctgcagaaggaaaacagcaagcgctggaacccggagatccagtacacttccaactattacaagtctaataatgttgaatttgctgttaatactgaaggtgtatatagtgaaccccgccccattggcaccagatacctgactcgtaatctgtaa

SEQ ID NO: 1512 - DNA, 2283 bp, synthetic construct
  misc_feature 1..2283: note = Description of Artificial Sequence: Synthetic polynucleotide
  source 1..2283: mol_type = other DNA
ctggctgccgatggttatcttccagattggctcgaggacaaccttagtgaaggaattcgcgagtggtgggctttgaaacctggagcccctcaacccaaggcaaatcaacaacatcaagacaacgctcgaggtcttgtgcttccgggttacaaataccttggacccggcaacggactcgacaagggggagccggtcaacgcagcagacgcggcggccctcgagcacgacaaggcctacgaccagcagctcaaggccggagacaacccgtacctcaagtacaaccacgccgacgccgagttccaggagcggctcaaagaagatacgtcttttgggggcaacctcgggcgagcagtcttccaggccaaaaagaggcttcttgaacctcttggtctggttgaggaagcggctaagatggcagctgcggccgccgcggctgcagcggctgcagccgccgcagctgcggctgcagcgggcggcggcggcagcgctcctggaaagaagaggcctgtagagcagtctcctcaggaaccggactcctccgcgggtattggcaaatcgggtgcacagcccgctaaaaagagactcaatttcggtcagactggcgacacagagtcagtcccagaccctcaaccaatcggagaacctcccgcagccccctcaggtgtgggatctcttacaatggcttcaggtggtggcgcaccagtggcagacaataacgaaggtgccgatggagtgggtagttcctcgggaaattggcattgcgattcccaatggctgggggacagagtcatcaccaccagcacccgaacctgggccctgcccacctacaacaatcacctctacaagcaaatctccaacagcacatctggaggatcttcaaatgacaacgcctacttcggctacagcaccccctgggggtattttgacttcaacagattccactgccacttctcaccacgtgactggcagcgactcatcaacaacaactggggattccggcctaagcgactcaacttcaagctcttcaacattcaggtcaaagaggttacggacaacaatggagtcaagaccatcgccaataaccttaccagcacggtccaggtcttcacggactcagactatcagctcccgtacgtgctcgggtcggctcacgagggctgcctcccgccgttcccagcggacgttttcatgattcctcagtacgggtatctgacgcttaatgatggaagccaggccgtgggtcgttcgtccttttactgcctggaatatttcccgtcgcaaatgctaagaacgggtaacaacttccagttcaactacgagtttgagaacgtacctttccatagcagctacgctcacagccaaagcctggaccgactaatgaatccactcatcgaccaatacttgtactatctctcaaagactattaacgattctggacagaatcaacaaacgctaaaattcagtgtggccggacccagcaacatggctgtccagggaagaaactacatacctggacccagctaccgacaacaacgtgtctcaaccactgtgactcaaaacaacaacagcgaatttgcttggcctggagcttcttcttgggctctcaatggacgtaatagcttgatgaatcctggacctgctatggccagccacaaagaaggagaggaccgtttctttcctttgtctggatctttaatttttggcaaacaaggaactggaagagacaacgtggatgcggacgaagtcatgataaccaacgaagaagaaattaaaactactaacccggtagcaacggagtcctatggacaagtggccataaaccaccagagtgcccaagcacaggcgcagaccggctgggttcaaaaccaaggaatacttccgggtatggtttggcaggacagagatgtgtacctgcaaggacccatttgggccaaaattcctcacacggacggcaactttcacccttctccgctgatgggagggtttggaatgaagcacccgcctcctcagatcctcatcaaaaacacacctgtacctgcggatcctccaacggccttcaacaaggacaagctgaactctttcatcacccagtattctactggccaagtcagcgtggagatcgagtgggagctgcagaaggaaaacagcaagcgctggaacccggagatccagtacacttccaactattacaagtctaataatgttgaatttgctgttaatactgaaggtgtatatagtgaaccccgccccattggcaccagatacctgactcgtaatctgtaa

SEQ ID NO: 1513 - protein, 726 aa, synthetic construct
  REGION 1..726: note = Description of Artificial Sequence: Synthetic polypeptide
MEVQLQASGGGLVQAGGSLRLSCAASGFKITHYTMGWFRQAPGKEREFVSRITWGGDNTFYSNSVKGRFTISRDNAKNTVYLQMNSLKPEDTADYYCAAGSTSTATPLRVDYWGKGTQVTVSSGGGGSAPGKKRPVEQSPQEPDSSSGIGKTGQQPAKKRLNFGQTGDSESVPDPQPLGEPPAAPSGLGPNTMASGGGAPMADNNEGADGVGNSSGNWHCDSTWLGDRVITTSTRTWALPTYNNHLYKQISNGTSGGSTNDNTYFGYSTPWGYFDFNRFHCHFSPRDWQRLINNNWGFRPKRLNFKLFNIQVKEVTTNEGTKTIANNLTSTVQVFTDSEYQLPYVLGSAHQGCLPPFPADVFMVPQYGYLTLNNGSQALGRSSFYCLEYFPSQMLRTGNNFQFSYTFEDVPFHSSYAHSQSLDRLMNPLIDQYLYYLVRTQTTGTGGTQTLAFSQAGPSSMANQARNWVPGPCYRQQRVSTTTNQNNNSNFAWTGAAKFKLNGRDSLMNPGVAMASHKDDDDRFFPSSGVLIFGKQGAGNDGVDYSQVLITDEEEIKATNPVATEEYGAVAINNQAANTQAQTGLVHNQGVIPGMVWQNRDVYLQGPIWAKIPHTDGNFHPSPLMGGFGLKHPPPQILIKNTPVPADPPLTFNQAKLNSFITQYSTGQVSVEIEWELQKENSKRWNPEIQYTSNYYKSTNVDFAVNTEGVYSEPRPIGTRYLTRNL

SEQ ID NO: 1514 - protein, 729 aa, synthetic construct
  REGION 1..729: note = Description of Artificial Sequence: Synthetic polypeptide
MEVQLQASGGGLVQAGGSLRLSCSASVRTFSIYAMGWFRQAPGKEREFVAGINRSGDVTKYADFVKGRFSISRDNAKNMVYLQMNSLKPEDTALYYCAATWAYDTVGALTSGYNFWGQGTQVTVSSGGGGSAPGKKRPVEQSPQEPDSSSGIGKTGQQPAKKRLNFGQTGDSESVPDPQPLGEPPAAPSGLGPNTMASGGGAPMADNNEGADGVGNSSGNWHCDSTWLGDRVITTSTRTWALPTYNNHLYKQISNGTSGGSTNDNTYFGYSTPWGYFDFNRFHCHFSPRDWQRLINNNWGFRPKRLNFKLFNIQVKEVTTNEGTKTIANNLTSTVQVFTDSEYQLPYVLGSAHQGCLPPFPADVFMVPQYGYLTLNNGSQALGRSSFYCLEYFPSQMLRTGNNFQFSYTFEDVPFHSSYAHSQSLDRLMNPLIDQYLYYLVRTQTTGTGGTQTLAFSQAGPSSMANQARNWVPGPCYRQQRVSTTTNQNNNSNFAWTGAAKFKLNGRDSLMNPGVAMASHKDDDDRFFPSSGVLIFGKQGAGNDGVDYSQVLITDEEEIKATNPVATEEYGAVAINNQAANTQAQTGLVHNQGVIPGMVWQNRDVYLQGPIWAKIPHTDGNFHPSPLMGGFGLKHPPPQILIKNTPVPADPPLTFNQAKLNSFITQYSTGQVSVEIEWELQKENSKRWNPEIQYTSNYYKSTNVDFAVNTEGVYSEPRPIGTRYLTRNL

SEQ ID NO: 1515 - protein, 651 aa, synthetic construct
  REGION 1..651: note = Description of Artificial Sequence: Synthetic polypeptide
MPSSVIDALQYKLEGTTRLTRKRGLKLATALSLSNKFVEGSPSGGGGSGGGGSAPGKKRPVEQSPQEPDSSSGIGKTGQQPAKKRLNFGQTGDSESVPDPQPLGEPPAAPSGLGPNTMASGGGAPMADNNEGADGVGNSSGNWHCDSTWLGDRVITTSTRTWALPTYNNHLYKQISNGTSGGSTNDNTYFGYSTPWGYFDFNRFHCHFSPRDWQRLINNNWGFRPKRLNFKLFNIQVKEVTTNEGTKTIANNLTSTVQVFTDSEYQLPYVLGSAHQGCLPPFPADVFMVPQYGYLTLNNGSQALGRSSFYCLEYFPSQMLRTGNNFQFSYTFEDVPFHSSYAHSQSLDRLMNPLIDQYLYYLVRTQTTGTGGTQTLAFSQAGPSSMANQARNWVPGPCYRQQRVSTTTNQNNNSNFAWTGAAKFKLNGRDSLMNPGVAMASHKDDDDRFFPSSGVLIFGKQGAGNDGVDYSQVLITDEEEIKATNPVATEEYGAVAINNQAANTQAQTGLVHNQGVIPGMVWQNRDVYLQGPIWAKIPHTDGNFHPSPLMGGFGLKHPPPQILIKNTPVPADPPLTFNQAKLNSFITQYSTGQVSVEIEWELQKENSKRWNPEIQYTSNYYKSTNVDFAVNTEGVYSEPRPIGTRYLTRNL

SEQ ID NO: 1516 - protein, 638 aa, synthetic construct
  REGION 1..638: note = Description of Artificial Sequence: Synthetic polypeptide
MYTIWMPENPRPGTPCDIFTNSRGKRASNGGGGGSGGGGSAPGKKRPVEQSPQEPDSSSGIGKTGQQPAKKRLNFGQTGDSESVPDPQPLGEPPAAPSGLGPNTMASGGGAPMADNNEGADGVGNSSGNWHCDSTWLGDRVITTSTRTWALPTYNNHLYKQISNGTSGGSTNDNTYFGYSTPWGYFDFNRFHCHFSPRDWQRLINNNWGFRPKRLNFKLFNIQVKEVTTNEGTKTIANNLTSTVQVFTDSEYQLPYVLGSAHQGCLPPFPADVFMVPQYGYLTLNNGSQALGRSSFYCLEYFPSQMLRTGNNFQFSYTFEDVPFHSSYAHSQSLDRLMNPLIDQYLYYLVRTQTTGTGGTQTLAFSQAGPSSMANQARNWVPGPCYRQQRVSTTTNQNNNSNFAWTGAAKFKLNGRDSLMNPGVAMASHKDDDDRFFPSSGVLIFGKQGAGNDGVDYSQVLITDEEEIKATNPVATEEYGAVAINNQAANTQAQTGLVHNQGVIPGMVWQNRDVYLQGPIWAKIPHTDGNFHPSPLMGGFGLKHPPPQILIKNTPVPADPPLTFNQAKLNSFITQYSTGQVSVEIEWELQKENSKRWNPEIQYTSNYYKSTNVDFAVNTEGVYSEPRPIGTRYLTRNL

SEQ ID NO: 1517 - protein, 628 aa, synthetic construct
  REGION 1..628: note = Description of Artificial Sequence: Synthetic polypeptide
MTFFYGGSRGKRNNFKTEEYGGGGSGGGGSAPGKKRPVEQSPQEPDSSSGIGKTGQQPAKKRLNFGQTGDSESVPDPQPLGEPPAAPSGLGPNTMASGGGAPMADNNEGADGVGNSSGNWHCDSTWLGDRVITTSTRTWALPTYNNHLYKQISNGTSGGSTNDNTYFGYSTPWGYFDFNRFHCHFSPRDWQRLINNNWGFRPKRLNFKLFNIQVKEVTTNEGTKTIANNLTSTVQVFTDSEYQLPYVLGSAHQGCLPPFPADVFMVPQYGYLTLNNGSQALGRSSFYCLEYFPSQMLRTGNNFQFSYTFEDVPFHSSYAHSQSLDRLMNPLIDQYLYYLVRTQTTGTGGTQTLAFSQAGPSSMANQARNWVPGPCYRQQRVSTTTNQNNNSNFAWTGAAKFKLNGRDSLMNPGVAMASHKDDDDRFFPSSGVLIFGKQGAGNDGVDYSQVLITDEEEIKATNPVATEEYGAVAINNQAANTQAQTGLVHNQGVIPGMVWQNRDVYLQGPIWAKIPHTDGNFHPSPLMGGFGLKHPPPQILIKNTPVPADPPLTFNQAKLNSFITQYSTGQVSVEIEWELQKENSKRWNPEIQYTSNYYKSTNVDFAVNTEGVYSEPRPIGTRYLTRNL

SEQ ID NO: 1518 - protein, 621 aa, synthetic construct
  REGION 1..621: note = Description of Artificial Sequence: Synthetic polypeptide
MNNQKIVNLKEKVAQLEAGGGGSAPGKKRPVEQSPQEPDSSAGIGKSGAQPAKKRLNFGQTGDTESVPDPQPIGEPPAAPSGVGSLTMASGGGAPVADNNEGADGVGSSSGNWHCDSQWLGDRVITTSTRTWALPTYNNHLYKQISNSTSGGSSNDNAYFGYSTPWGYFDFNRFHCHFSPRDWQRLINNNWGFRPKRLNFKLFNIQVKEVTDNNGVKTIANNLTSTVQVFTDSDYQLPYVLGSAHEGCLPPFPADVFMIPQYGYLTLNDGSQAVGRSSFYCLEYFPSQMLRTGNNFQFNYEFENVPFHSSYAHSQSLDRLMNPLIDQYLYYLSKTINDSGQNQQTLKFSVAGPSNMAVQGRNYIPGPSYRQQRVSTTVTQNNNSEFAWPGASSWALNGRNSLMNPGPAMASHKEGEDRFFPLSGSLIFGKQGTGRDNVDADEVMITNEEEIKTTNPVATESYGQVAINHQSAQAQAQTGWVQNQGILPGMVWQDRDVYLQGPIWAKIPHTDGNFHPSPLMGGFGMKHPPPQILIKNTPVPADPPTAFNKDKLNSFITQYSTGQVSVEIEWELQKENSKRWNPEIQYTSNYYKSNNVEFAVNTEGVYSEPRPIGTRYLTRNL

SEQ ID NO: 1519 - protein, 633 aa, synthetic construct
  REGION 1..633: note = Description of Artificial Sequence: Synthetic polypeptide
MYTIWMPENPRPGTPCDIFTNSRGKRASNGGGGGSAPGKKRPVEQSPQEPDSSAGIGKSGAQPAKKRLNFGQTGDTESVPDPQPIGEPPAAPSGVGSLTMASGGGAPVADNNEGADGVGSSSGNWHCDSQWLGDRVITTSTRTWALPTYNNHLYKQISNSTSGGSSNDNAYFGYSTPWGYFDFNRFHCHFSPRDWQRLINNNWGFRPKRLNFKLFNIQVKEVTDNNGVKTIANNLTSTVQVFTDSDYQLPYVLGSAHEGCLPPFPADVFMIPQYGYLTLNDGSQAVGRSSFYCLEYFPSQMLRTGNNFQFNYEFENVPFHSSYAHSQSLDRLMNPLIDQYLYYLSKTINDSGQNQQTLKFSVAGPSNMAVQGRNYIPGPSYRQQRVSTTVTQNNNSEFAWPGASSWALNGRNSLMNPGPAMASHKEGEDRFFPLSGSLIFGKQGTGRDNVDADEVMITNEEEIKTTNPVATESYGQVAINHQSAQAQAQTGWVQNQGILPGMVWQDRDVYLQGPIWAKIPHTDGNFHPSPLMGGFGMKHPPPQILIKNTPVPADPPTAFNKDKLNSFITQYSTGQVSVEIEWELQKENSKRWNPEIQYTSNYYKSNNVEFAVNTEGVYSEPRPIGTRYLTRNL

SEQ ID NO: 1520 - protein, 623 aa, synthetic construct
  REGION 1..623: note = Description of Artificial Sequence: Synthetic polypeptide
MTFFYGGSRGKRNNFKTEEYGGGGSAPGKKRPVEQSPQEPDSSAGIGKSGAQPAKKRLNFGQTGDTESVPDPQPIGEPPAAPSGVGSLTMASGGGAPVADNNEGADGVGSSSGNWHCDSQWLGDRVITTSTRTWALPTYNNHLYKQISNSTSGGSSNDNAYFGYSTPWGYFDFNRFHCHFSPRDWQRLINNNWGFRPKRLNFKLFNIQVKEVTDNNGVKTIANNLTSTVQVFTDSDYQLPYVLGSAHEGCLPPFPADVFMIPQYGYLTLNDGSQAVGRSSFYCLEYFPSQMLRTGNNFQFNYEFENVPFHSSYAHSQSLDRLMNPLIDQYLYYLSKTINDSGQNQQTLKFSVAGPSNMAVQGRNYIPGPSYRQQRVSTTVTQNNNSEFAWPGASSWALNGRNSLMNPGPAMASHKEGEDRFFPLSGSLIFGKQGTGRDNVDADEVMITNEEEIKTTNPVATESYGQVAINHQSAQAQAQTGWVQNQGILPGMVWQDRDVYLQGPIWAKIPHTDGNFHPSPLMGGFGMKHPPPQILIKNTPVPADPPTAFNKDKLNSFITQYSTGQVSVEIEWELQKENSKRWNPEIQYTSNYYKSNNVEFAVNTEGVYSEPRPIGTRYLTRNL

SEQ ID NO: 1521 - protein, 623 aa, synthetic construct
  REGION 1..623: note = Description of Artificial Sequence: Synthetic polypeptide
MAAAAAAAAAAAAAAAAAAAGGGGSAPGKKRPVEQSPQEPDSSAGIGKSGAQPAKKRLNFGQTGDTESVPDPQPIGEPPAAPSGVGSLTMASGGGAPVADNNEGADGVGSSSGNWHCDSQWLGDRVITTSTRTWALPTYNNHLYKQISNSTSGGSSNDNAYFGYSTPWGYFDFNRFHCHFSPRDWQRLINNNWGFRPKRLNFKLFNIQVKEVTDNNGVKTIANNLTSTVQVFTDSDYQLPYVLGSAHEGCLPPFPADVFMIPQYGYLTLNDGSQAVGRSSFYCLEYFPSQMLRTGNNFQFNYEFENVPFHSSYAHSQSLDRLMNPLIDQYLYYLSKTINDSGQNQQTLKFSVAGPSNMAVQGRNYIPGPSYRQQRVSTTVTQNNNSEFAWPGASSWALNGRNSLMNPGPAMASHKEGEDRFFPLSGSLIFGKQGTGRDNVDADEVMITNEEEIKTTNPVATESYGQVAINHQSAQAQAQTGWVQNQGILPGMVWQDRDVYLQGPIWAKIPHTDGNFHPSPLMGGFGMKHPPPQILIKNTPVPADPPTAFNKDKLNSFITQYSTGQVSVEIEWELQKENSKRWNPEIQYTSNYYKSNNVEFAVNTEGVYSEPRPIGTRYLTRNL

SEQ ID NO: 1522 - DNA, 2214 bp, synthetic construct
  misc_feature 1..2214: note = Description of Artificial Sequence: Synthetic polynucleotide
  source 1..2214: mol_type = other DNA
atggctgccgatggttatcttccagattggctcgaggacaacctctctgagggcattcgcgagtggtgggacttgaaacctggagccccgaagcccaaagccaaccagcaaaagcaggacgacggccggggtctggtgcttcctggctacaagtacctcggacccttcaacggactcgacaagggggagcccgtcaacgcggcggacgcagcggccctcgagcacgacaaggcctacgaccagcagctcaaagcgggtgacaatccgtacctgcggtataaccacgccgacgtcgagtttcaggagcgtctgcaagaagatacgtcttttgggggcaacctcgggcgagcagtcttccaggccaagaagagggttctcgaaccttttggtctggttgaggaaggcgctaagacggctcctggaaagaaacgtccggtagagcagtcgccacaagagccagactcctcctcgggcatcggcaagaaaggccaacagcccgccagaaaaagactcaattttggccagactggcgactcagagtcagttccagaccctcaacctctcggagaacctccagcagcgccctctggtgtgggacctaatacaatggctgcaggcggtggcgcaccaatggcagacaataacgagggcgccgacggagtgggtaattcctcgggaaattggcattgcgattccacatggatgggggacagagtcatcaccaccagcacccgaacctgggccctgcccacctacaacaaccacctctacaagcaaatctccaacggcacctcgggaggaagcaccaacgacaacacctattttggctacagcaccccctgggggtattttgatttcaacagattccactgccacttctcaccacgtgactggcagcgactcatcaacaacaactggggattccggccaaaaagactcagcttcaagctcttcaacatccaggtcaaggaggtcacgcagaatgaaggcaccaagaccatcgccaataaccttaccagcacgattcaggtatttacggactcggaataccagctgccatacgtcctcggctccgcgcaccagggctgcctgcctccgttcccggcggacgtcttcatgattccccagtacggctaccttacactgaacaatggaagtcaagccgtaggccgttcctccttctactgcctggaatattttccttctcaaatgctgagaacgggcaacaactttgagttcagctaccagtttgaggacgtgccttttcacagcagctacgcgcacagccaaagcctggaccggctgatgaaccccctcatcgaccagtacctgtactacctgtctcggactcagtccacgggaggtaccgcaagaactcagcagttgctattttctcaggccgggcctaatacaatggccaatcaggcaaagaactggctgccaggaccctgttaccgccaacaacgcgtctcaacgacaaccgggcaaaacaacaatagcaactctgcctggactgctgggaccaaataccatctgaatggaagaaattcattggctaatcctggcatcgctatggcaacacacaaagacgacgaggagcgtttttttcccagtaacgggatcctgatttttggcaaacaaaatgctgccagagacaatgcggattacagcgatgtcatgctcaccagcgaggaagaaatcaaaaccactaaccctgtggctacagaggaatacggtatcgtggcagataacttgcagcagcaaaacacggctcctcaaattggaactgtcaacagccagggggccttacccggtatggtctggcagaaccgggacgtgtacctgcagggtcccatctgggccaagattcctcacacggacggcaacttccacccatctccgctgatgggcggctttggcctgaaacatcctccgcctcagatcctgatcaagaacacgcctgtacctgcggatcctccgaccaccttcaaccagtcaaagctgaactctttcatcacgcaatacagcaccggacaggtcagcgtggaaattgaatgggagctacagaaggaaaacagcaagcgctggaaccccgagatccagtacacctccaactactacaaatctacaagtgtggactttgctgttaatacagaaggcgtgtactctgaaccccgccccattggcacccgttacctcacccgtaatctgtaa

SEQ ID NO: 1523 - DNA, 2214 bp, synthetic construct
  misc_feature 1..2214: note = Description of Artificial Sequence: Synthetic polynucleotide
  source 1..2214: mol_type = other DNA
atggctgccgatggttatcttccagattggctcgaggacaacctctctgagggcattcgcgagtggtgggcgctgaaacctggagccccgaagcccaaagccaaccagcaaaagcaggacgacggccggggtctggtgcttcctggctacaagtacctcggacccttcaacggactcgacaagggggagcccgtcaacgcggcggacgcagcggccctcgagcacgacaaggcctacgaccagcagctcaaagcgggtgacaatccgtacctgcggtataaccacgccgacgccgagtttcaggagcgtctgcaagaagatacgtcttttgggggcaacctcgggcgagcagtcttccaggccaagaagcgggttctcgaacctctcggtctggttgaggacggcgctaagacggctcctggaaagaagagaccagtagagcagtcaccccaagaaccagactcctcctcgggcatcggcaagaaaggccaacagcccgccagaaaaagactcaattttggccagactggcgactcagagtcagttccagaccctcaacctctcggagaacctccagcaacccccgctgctgtgggacctactacaatggcttcaggcggtggcgcaccaatggcagacaataacgaaggcgccgacggagtgggtagttcctcgggaaattggcattgcgattccacatggctgggcgacagagtcatcaccaccagcacccgaacctgggccctgcccacctacaacaaccacctctacaagcaaatctccaacgggacatcgggaggagccaccaacgacaacacctacttcggctacagcaccccctgggggtattttgactttaacagattccactgccacttttcaccacgtgactggcagcgactcatcaacaacaactggggattccggcccaagagactcagcttcaagctcttcaacatccaggtcaaggaggtcacgcagaatgaaggcaccaagaccatcgccaataacctcaccagcaccatccaggtgtttacggactcggagtaccagctgccgtacgttctcggctctgcccaccagggctgcctgcctccgttcccggcggacgtgttcatgattccccagtacggctacctaacactcaacaacggtagtcaggccgtgggacgctcctccttctactgcctggaatactttccttcgcagatgctgagaaccggcaacaacttccagtttacttacaccttcgaggacgtgcctttccacagcagctacgcccacagccagagcttggaccggctgatgaatcctctgattgaccagtacctgtactacttgtctcggactcaaacaacaggaggcacggcaaatacgcagactctgggcttcagccaaggtgggcctaatacaatggccaatcaggcaaagaactggctgccaggaccctgttaccgccaacaacgcgtctcaacgacaaccgggcaaaacaacaatagcaactttgcctggactgctgggaccaaataccatctgaatggaagaaattcattggctaatcctggcatcgctatggcaacacacaaggacgacgaggagcgtttttttcccagtaacgggatcctgatttttggcaaacaaaatgctgccagagacaatgcggattacagcgatgtcatgctcaccagcgaggaagaaatcaaaaccactaaccctgtggctacagaggaatacggtatcgtggcagataacttgcagcagcaaaacacggctcctcaaattggaactgtcaacagccagggggccttacccggtatggtctggcagaaccgggacgtgtacctgcagggtcccatctgggccaagattcctcacacggacggcaacttccacccgtctccgctgatgggcggctttggcctgaaacatcctccgcctcagatcctgatcaagaacacgcctgtacctgcggatcctccgaccaccttcaaccagtcaaagctgaactctttcatcacgcaatacagcaccggacaggtcagcgtggaaatcgagtgggagctgcagaaagaaaacagcaagcgctggaaccccgagatccagtacacctccaactactacaaatctacaaatgtggactttgctgtcaacacggagggggtttatagcgagcctcgccccattggcacccgttacctcacccgcaacctgtaa

SEQ ID NO: 1524 - DNA, 2211 bp, synthetic construct
  misc_feature 1..2211: note = Description of Artificial Sequence: Synthetic polynucleotide
  variation 715: note = n is a, c, g, or t
  source 1..2211: mol_type = other DNA
atggctgccgatggttatcttccagattggctcgaggacaacctctctgagggcattcgcgagtggtgggcgctgaaacctggagccccgaagcccaaagccaaccagcaaaagcaggacgacggccggggtctggtgcttcctggctacaagtacctcggacccttcaacggactcgacaagggggagcccgtcaacgcggcggacgcagcggccctcgagcacgacaaggcctacgaccagcagctcaaagcgggtgacaatccgtacctgcggtataaccacgccgacgccgagtttcaggagcgtctgcaagaagatacgtcttttgggggcaacctcgggcgagcagtcttccaggccaagaagcgggttctcgaacctctcggtctggttgaggaaggcgctaagacggctcctggaaagaaacgtccggtagagcagtcgccacaagagccagactcctcctcgggcatcggcaagacaggccagcagcccgctaaaaagaggctcaattttggtcagactggcgactcagagtcagtccccgacccacaacctctcggagaacctccagcaacccccgctgctgtgggacctactacaatggcttcaggcggtggcgcaccaatggcagacaataacgaaggcgccgacggagtgggtaatgcctcaggaaattggcattgcgattccacatggctgggcgacagantcatcaccaccagcacccgaacatgggccttgcccacctataacaaccacctctacaagcaaatctccagtgcttcaacgggggccagcaacgacaaccactacttcggctacagcaccccctgggggtattttgatttcaacagattccactgccatttctcaccacgtgactggcagcgactcatcaacaacaattggggattccggcccaagagactcaacttcaagctcttcaacatccaagtcaaggaggtcacgcagaatgaaggcaccaagaccatcgccaataacctcaccagcaccatccaggtgtttacggactcggagtaccagctgccgtacgttctcggctctgcccaccagggctgcctgcctccgttcccggcggacgtgttcatgattccccagtacggctacctaacactcaacaacggtagtcaggccgtgggacgctcctccttctactgcctggaatattttccatctcaaatgctgcgaactggaaacaattttgaattcagctacaccttcgaggacgtgcctttccacagcagctacgcacacagccagagcttggaccgactgatgaatcctctcatcgaccagtacctgtactacttgtctcggactcaaacaacaggaggcacggcaaatacgcagactctgggcttcagccaaggtgggcctaatacaatggccaatcaggcaaagaactggctgccaggaccctgttaccgccaacaacgcgtctcaacgacaaccgggcaaaacaacaatagcaactttgcctggactgctgggaccaaataccatctgaatggaagaaattcattggctaatcctggcatcgctatggcaacacacaaagacgacgaggagcgtttttttcccagtaacgggatcctgatttttggcaaacaaaatgctgccagagacaatgcggattacagcgatgtcatgctcaccagcgaggaagaaatcaaaaccactaaccctgtggctacagaggaatacggtatcgtggcagataacttgcagcagcaaaacacggctcctcaaattggaactgtcaacagccaggggaccttacccggtatggtctggcagaaccgggacgtgtacctgcagggtcccatctgggccaagattcctcacacggacggcaacttccacccgtctccgctgatgggcggctttggcctgaaacatcctccgcctcagatcctgatcaagaacacgcctgtacctgcggatcctccgaccaccttcaaccagtcaaagctgaactctttcatcacgcaatacagcaccggacaggtcagcgtggaaattgaatgggagctacagaaggaaaacagcaagcgctggaaccccgagatccagtacacctccaattactacaaatctacaagtgtggactttgctgttaatacagaaggcgtgtactctgaaccccgccccattggcacgcgtttcctcacccgtaatctgtaa

SEQ ID NO: 1525 - DNA, 2214 bp, synthetic construct
  misc_feature 1..2214: note = Description of Artificial Sequence: Synthetic polynucleotide
  source 1..2214: mol_type = other DNA
atggctgccgatggttatcttccagattggctcgaggacaacctctctgagggcattcgcgagtggtgggcgctgaaacctggagccccgaagcccaaagccaaccagcaaaagcaggacgacggccggggtctggtgcttcctggctacaagtacctcggacccttcaacggactcgacaagggggagcccgtcaacgcggcggacgcagcggccctcgagcacgacaaggcctacgaccagcagctcaaagcgggtgacaatccgtacctgcggtataaccacgccgacgccgagtttcaggagcgtctgcaagaagatacgtcttttgggggcaacctcgggcgagcagtcttccaggccaagaagcgggttctcgaacctctcggtctggttgaggaaggcgctaagacggctcctggaaagaaacgtccggtagagcagtcgccacaagagccagactcctcctcgggcatcggcaagacaggccagcagcccgctaaaaagaggctcaattttggccagactggcgactcagagtcagttccagaccctcaacctctcggagaacctccagcagcgccctctggtgtgggacctaatacaatggctgcaggcggtggcgcaccaatggcagacaataacgaaggcgccgacggagtgggtagttcctcgggaaattggcattgcgattccacatggctgggcgacagagtcatcaccaccagcacccgaacctgggccctgcccacctacaacaaccacctctacaagcaaatctccaacgggacatcgggaggagccaccaacgacaacacctacttcggctacagcaccccctgggggtattttgactttaacagattccactgccacttttcaccacgtgactggcagcgactcatcaacaacaactggggattccggcccaagagactcagcttcaagctcttcaacatccaggtcaaggaggtcacgcagaatgaaggcaccaagaccatcgccaataacctcaccagcaccatccaggtgtttacggactcggagtaccagctgccgtacgtactaggatccgctcaccagggatgtctgcctccgttcccggcggacgtgttcatgattccccagtacggctacctaacactcaacaacggtagtcaggccgtgggacgctcctccttctactgcctggaatattttccatctcagatgctgagaacgggcaataactttaccttcagctacaccttcgaggacgtgcctttccacagcagctatgcccacagccagagcttggaccggctgatgaatcctctgattgaccagtacctgtactacttgtctcggactcaaacaacaggaggcacggcaaatacgcagactctgggcttcagccaaggtgggcctaatacaatggccaatcaggcaaagaactggctgccaggaccctgttaccgccaacaacgcgtctcaacgacaaccgggcaaaacaacaatagcaactttgcctggactgctgggaccaaataccatctgaatggaagaaattcattggctaatcctggcatcgctatggcaacacacaaagacgacgaggagcgtttttttcccagtaacgggatcctgatttttggcaaacaaaatgctgccagagacaatgcggattacagcgatgtcatgctcaccagcgaggaagaaatcaaaaccactaaccctgtggctacagaggaatacggtatcgtggcagataacttgcagcagcaaaacacggctcctcaaattggaactgtcaacagccagggggccttacccggtatggtctggcagaaccgggacgtgtacctgcagggtcccatctgggccaagattcctcacacggacggcaacttccacccgtctccgctaatgggaggatttggactgaagcacccacctcctcagatcctgatcaagaacacgccggtacctgcggatcctccgaccaccttcaaccagtcaaagctgtactctttcatcacgcaatacagcaccggacaggtcagcgtggaaattgaatgggagctgcagaaggaaaacagcaagcgctggaaccccgagatccaatacacctccaactactacaaatctacaagtgtggactttgctgttaatacagaaggcgtgtactctgaaccccgccccattggcacccgttacctcacccgtaatctgtaa

SEQ ID NO: 1526 - protein, 737 aa, synthetic construct
  REGION 1..737: note = Description of Artificial Sequence: Synthetic polypeptide
MAADGYLPDWLEDNLSEGIREWWDLKPGAPKPKANQQKQDDGRGLVLPGYKYLGPFNGLDKGEPVNAADAAALEHDKAYDQQLKAGDNPYLRYNHADVEFQERLQEDTSFGGNLGRAVFQAKKRVLEPFGLVEEGAKTAPGKKRPVEQSPQEPDSSSGIGKKGQQPARKRLNFGQTGDSESVPDPQPLGEPPAAPSGVGPNTMAAGGGAPMADNNEGADGVGNSSGNWHCDSTWMGDRVITTSTRTWALPTYNNHLYKQISNGTSGGSTNDNTYFGYSTPWGYFDFNRFHCHFSPRDWQRLINNNWGFRPKRLSFKLFNIQVKEVTQNEGTKTIANNLTSTIQVFTDSEYQLPYVLGSAHQGCLPPFPADVFMIPQYGYLTLNNGSQAVGRSSFYCLEYFPSQMLRTGNNFEFSYQFEDVPFHSSYAHSQSLDRLMNPLIDQYLYYLSRTQSTGGTARTQQLLFSQAGPNTMANQAKNWLPGPCYRQQRVSTTTGQNNNSNSAWTAGTKYHLNGRNSLANPGIAMATHKDDEERFFPSNGILIFGKQNAARDNADYSDVMLTSEEEIKTTNPVATEEYGIVADNLQQQNTAPQIGTVNSQGALPGMVWQNRDVYLQGPIWAKIPHTDGNFHPSPLMGGFGLKHPPPQILIKNTPVPADPPTTFNQSKLNSFITQYSTGQVSVEIEWELQKENSKRWNPEIQYTSNYYKSTSVDFAVNTEGVYSEPRPIGTRYLTRNL

SEQ ID NO: 1527 - protein, 737 aa, synthetic construct
  REGION 1..737: note = Description of Artificial Sequence: Synthetic polypeptide
MAADGYLPDWLEDNLSEGIREWWALKPGAPKPKANQQKQDDGRGLVLPGYKYLGPFNGLDKGEPVNAADAAALEHDKAYDQQLKAGDNPYLRYNHADAEFQERLQEDTSFGGNLGRAVFQAKKRVLEPLGLVEDGAKTAPGKKRPVEQSPQEPDSSSGIGKKGQQPARKRLNFGQTGDSESVPDPQPLGEPPATPAAVGPTTMASGGGAPMADNNEGADGVGSSSGNWHCDSTWLGDRVITTSTRTWALPTYNNHLYKQISNGTSGGATNDNTYFGYSTPWGYFDFNRFHCHFSPRDWQRLINNNWGFRPKRLSFKLFNIQVKEVTQNEGTKTIANNLTSTIQVFTDSEYQLPYVLGSAHQGCLPPFPADVFMIPQYGYLTLNNGSQAVGRSSFYCLEYFPSQMLRTGNNFQFTYTFEDVPFHSSYAHSQSLDRLMNPLIDQYLYYLSRTQTTGGTANTQTLGFSQGGPNTMANQAKNWLPGPCYRQQRVSTTTGQNNNSNFAWTAGTKYHLNGRNSLANPGIAMATHKDDEERFFPSNGILIFGKQNAARDNADYSDVMLTSEEEIKTTNPVATEEYGIVADNLQQQNTAPQIGTVNSQGALPGMVWQNRDVYLQGPIWAKIPHTDGNFHPSPLMGGFGLKHPPPQILIKNTPVPADPPTTFNQSKLNSFITQYSTGQVSVEIEWELQKENSKRWNPEIQYTSNYYKSTNVDFAVNTEGVYSEPRPIGTRYLTRNL

SEQ ID NO: 1528 - protein, 736 aa, synthetic construct
  REGION 1..736: note = Description of Artificial Sequence: Synthetic polypeptide
  VARIANT 239: note = Xaa can be any naturally occurring amino acid
MAADGYLPDWLEDNLSEGIREWWALKPGAPKPKANQQKQDDGRGLVLPGYKYLGPFNGLDKGEPVNAADAAALEHDKAYDQQLKAGDNPYLRYNHADAEFQERLQEDTSFGGNLGRAVFQAKKRVLEPLGLVEEGAKTAPGKKRPVEQSPQEPDSSSGIGKTGQQPAKKRLNFGQTGDSESVPDPQPLGEPPATPAAVGPTTMASGGGAPMADNNEGADGVGNASGNWHCDSTWLGDRXITTSTRTWALPTYNNHLYKQISSASTGASNDNHYFGYSTPWGYFDFNRFHCHFSPRDWQRLINNNWGFRPKRLNFKLFNIQVKEVTQNEGTKTIANNLTSTIQVFTDSEYQLPYVLGSAHQGCLPPFPADVFMIPQYGYLTLNNGSQAVGRSSFYCLEYFPSQMLRTGNNFEFSYTFEDVPFHSSYAHSQSLDRLMNPLIDQYLYYLSRTQTTGGTANTQTLGFSQGGPNTMANQAKNWLPGPCYRQQRVSTTTGQNNNSNFAWTAGTKYHLNGRNSLANPGIAMATHKDDEERFFPSNGILIFGKQNAARDNADYSDVMLTSEEEIKTTNPVATEEYGIVADNLQQQNTAPQIGTVNSQGTLPGMVWQNRDVYLQGPIWAKIPHTDGNFHPSPLMGGFGLKHPPPQILIKNTPVPADPPTTFNQSKLNSFITQYSTGQVSVEIEWELQKENSKRWNPEIQYTSNYYKSTSVDFAVNTEGVYSEPRPIGTRFLTRNL

SEQ ID NO: 1529 - protein, 737 aa, synthetic construct
  REGION 1..737: note = Description of Artificial Sequence: Synthetic polypeptide
MAADGYLPDWLEDNLSEGIREWWALKPGAPKPKANQQKQDDGRGLVLPGYKYLGPFNGLDKGEPVNAADAAALEHDKAYDQQLKAGDNPYLRYNHADAEFQERLQEDTSFGGNLGRAVFQAKKRVLEPLGLVEEGAKTAPGKKRPVEQSPQEPDSSSGIGKTGQQPAKKRLNFGQTGDSESVPDPQPLGEPPAAPSGVGPNTMAAGGGAPMADNNEGADGVGSSSGNWHCDSTWLGDRVITTSTRTWALPTYNNHLYKQISNGTSGGATNDNTYFGYSTPWGYFDFNRFHCHFSPRDWQRLINNNWGFRPKRLSFKLFNIQVKEVTQNEGTKTIANNLTSTIQVFTDSEYQLPYVLGSAHQGCLPPFPADVFMIPQYGYLTLNNGSQAVGRSSFYCLEYFPSQMLRTGNNFTFSYTFEDVPFHSSYAHSQSLDRLMNPLIDQYLYYLSRTQTTGGTANTQTLGFSQGGPNTMANQAKNWLPGPCYRQQRVSTTTGQNNNSNFAWTAGTKYHLNGRNSLANPGIAMATHKDDEERFFPSNGILIFGKQNAARDNADYSDVMLTSEEEIKTTNPVATEEYGIVADNLQQQNTAPQIGTVNSQGALPGMVWQNRDVYLQGPIWAKIPHTDGNFHPSPLMGGFGLKHPPPQILIKNTPVPADPPTTFNQSKLYSFITQYSTGQVSVEIEWELQKENSKRWNPEIQYTSNYYKSTSVDFAVNTEGVYSEPRPIGTRYLTRNL

SEQ ID NO: 1530 - DNA, 2208 bp, synthetic construct
  misc_feature 1..2208: note = Description of Artificial Sequence: Synthetic polynucleotide
  source 1..2208: mol_type = other DNA
atggctgccgatggttatcttccagattggctcgaggacaacctctctgagggcattcgcgagtggtgggacttgaaacctggagccccgaaacccaaagccaaccagcaaaagcaggacgacggccggggtctggtgcttcctggctacaagtacctcggacccttcaacggactcgacaagggggagcccgtcaacgcggcggatgcagcggccctcgagcacgacaaagcctacgaccggcagctcgacagcggagacaacccgtacctcaagtacaaccacgccgacgcggagtttcaggagcgccttaaagaagatacgtcttttgggggcaacctcggacgagcagtcttccaggccaagaagagggttctcgaaccttttggtctggttgaggaaggtgctaagacggctcctggaaagaaacgtccggtagagcagtcgccacaagagccagactcctcctcgggcattggcaagacaggccagcagcccgctaaaaagagactcaattttggtcagactggcgactcagagtcagtccccgacccacaacctctcggagaacctccagcaacccccgctgctgtgggacctactacaatggcttcaggtggtggcgcaccagtggcagacaataacgaaggcgccgacggagtgggtagttcctcgggaaattggcattgcgattccacatggctgggcgacagagtcatcaccaccagcacccgaacatgggccttgcccacctataacaaccacctctacaagcaaatctccagtgcttcgacgggggccagcaacgacaaccactacttcggctacagcaccccctgggggtattttgatttcaacaggttccactgccatttctcaccacgtgactggcagcgactcatcaacaacaattggggattccggcccaaaagactcaacttcaagctgttcaacatccaggtcaaggaagtcacgacgaacgaaggcaccaagaccatcgccaataatctcaccagcaccgtgcaggtctttacggactcggagtaccagttaccgtacgtgctaggatccgctcaccagggatgtctgcctccgttcccggcggacgtcttcatggttcctcagtacggctatttaactttaaacaatggaagccaagccctgggacgttcctccttctactgtctggagtatttcccatcgcagatgctgagaacgggcaacaactttacctttagctacaccttcgaggacgtgcctttccacagcagctacgcgcacagccagagcctggacaggctgatgaatcccctcatcgaccagtacctgtactacctggtcagaacgcaaacgactggaactggagggacgcagactctggcattcagccaagcgggtcctagctcaatggccaaccaggctagaaattgggtgcccggaccttgctaccggcagcagcgcgtctccacgacaaccaaccagaacaacaacagcaactttgcctggacgggagctgccaagtttaagctgaacggccgagactctctaatgaatccgggcgtggcaatggcttcccacaaggatgacgacgaccgcttcttcccttcgagcggggtcctgatttttggcaagcaaggagccgggaacgatggagtggattacagccaagtgctgattacagatgaggaagaaatcaaggctaccaaccccgtggccacagaagaatatggagcagtggccatcaacaaccaggccgccaatacgcaggcgcagaccggactcgtgcacaaccagggggtgattcccggcatggtgtggcagaatagagacgtgtacctgcagggtcccatctgggccaaaattcctcacacggacggcaactttcacccgtctcccctgatgggcggctttggactgaagcacccgcctcctcaaattctcatcaagaacacaccggttccagcggacccgccgcttaccttcaaccaggccaagctgaactctttcatcacgcagtacagcaccggacaggtcagcgtggaaatcgagtgggagctgcagaaagaaaacagcaaacgctggaatccagagattcaatacacttccaactactacaaatctacaaatgtggactttgctgtcaacacggagggggtttatagcgagcctcgccccattggcacccgttacctcacccgcaacctgtaa

SEQ ID NO: 1531 - DNA, 2211 bp, synthetic construct
  misc_feature 1..2211: note = Description of Artificial Sequence: Synthetic polynucleotide
  variation 337: note = n is a, c, g, or t
  source 1..2211: mol_type = other DNA
atggctgccgatggttatcttccagattggctcgaggacactctctctgaaggaataagacagtggtggaagctcaaacctggcccaccaccaccaaagcccgcagagcggcataaggacgacagcaggggtcttgtgcttcctggctacaagtacctcggacccttcaacggactcgacaagggggagcccgtcaacgcggcggacgcagcgaccctcgagcacgacaaggcctacgaccagcagctcaaagcgggtgacaatccgtacctgcggtataaccacgccgacgccgagtttcaggagcgtctgcaagaagatacgtcttttgggggcnacctcgggcgagcagtcttccaggccaagaagcgggttctcgaacctctcggtctggttgaggaagctgctaagacggctcctggaaagaagagaccagtagagccatcaccccagcgttctccagactcctctacgggcatcggcaagaaaggccaacagcccgccagaaaaagactcaattttggtcagactggcgactcagagtcagttccagaccctcaacctctcggagaacctccagcagcgccctctggtgtgggacctaatacaatggctgcaggcggtggcgcaccaatggcagacaataacgaaggcgccgacggagtgggtagttcctcgggaaattggcattgcgattccacatggctgggcgacagagtcatcaccaccagcacccgaacctgggccctgcccacctacaacaaccacctctacaagcaaatctccagtgcttcaacgggggccagcaacgacaaccactacttcggctacagcaccccctgggggtattttgatttcaacagattccactgccatttctcaccacgtgactggcagcgactcatcaacaacaattggggattccggcccaagagactcaacttcaagctcttcaacatccaagtcaaggaggtcacgacgaatgatggcgtcacgaccatcgctaataaccttaccagcacggttcaagtcttctcggactcagactatcagctcccgtacgtgctcgggtcggctcacgagggctgcctcccgccgttcccagcggacgttttcatgattcctcagtacggctatttaactttaaacaatggaagccaagccctgggacgttcctccttctactgtctggagtatttcccatcgcagatgctgagaaccggcaacaactttcagttcagctacaccttcgaggacgtgcctttccacagcagctacgcgcacagccagagcctggacaggctgatgaatcccctcatcgaccagtacctgtactacctggtcagaacgcaaacgactggaactggagggacgcagactctggcattcagccaagcgggtcctagctcaatggccaaccaggctagaaattgggtgcccggaccttgctaccggcagcagcgcgtctccacgacaaccaaccagaacaacaacagcaactttgcctggacgggagctgccaagtttaagctgaacggccgagactctctaatgaatccgggcgtggcaatggcttcccacaaggatgacgacgaccgcttcttcccttcgagcggggtcctgatttttggcaagcaaggagccgggaacgatggagtggattacagccaagtgctgattacagatgaggaagaaatcaaggctaccaaccccgtagccacagaagaatatggagcagtggccatcaacaaccaggccgccaatacgcaggcgcagaccggactcgtgcacaaccagggggtgattcccggaatggtgtggcaagacagagacgtatacctgcagggtcctatttgggccaaaattcctcacacggatggacactttcacccgtctcctctcatgggcggctttggacttaagcacccgcctcctcagatcctcatcaaaaacacgcctgttcctgcgaatcctccggcagagttttcggctacaaagtttgcttcattcatcacccagtattccacaggacaagtgagcgtggagattgaatgggagctgcagaaagaaaacagcaaacgctggaatcccgaagtgcagtatacatctaactatgcaaaatctgccaacgttgatttcactgtggacaacaatggactttatactgagcctcgccccattggcacccgttacctcacccgtcccctgtaa

SEQ ID NO: 1532 - DNA, 2214 bp, synthetic construct
  misc_feature 1..2214: note = Description of Artificial Sequence: Synthetic polynucleotide
  variation 335: note = n is a, c, g, or t
  source 1..2214: mol_type = other DNA
atgactgacggttaccttccagattggctagaggacaacctctctgaaggcgttcgagagtggtgggcgctgcaacctggagccccgaagcccaaagccaaccagcaaaagcaggacgacggccggggtctggtgcttcctggctacaagtacctcggacccttcaacggactcgacaagggggagcccgtcaacgcggcggacgcagcggccctcgagcacgacaaggcctacgaccagcagctcaaagcgggtgacaatccgtacctgcggtataaccacgccgacgccgagtttcaggagcgtctgcaagaagatacgtcttttgggggcancctcgggcgagcagtcttccaggccaagaagcgggttctcgaacctctcggtctggttgaggaaggcgctaagacggctcctggaaagaaacgtccggtagagccatcaccccagcgttctccagactcctctacgggcatcggcaagaaaggccaacagcccgccagaaaaagactcaattttggtcagactggcgactcagagtcagttccagaccctcaacctctcggagaacctccagcagcgccctcaggtgtgggatctcttacaatggcttcaggtggtggcgcaccagtggcagacaataacgaaggtgccgatggagtgggtagttcctcgggaaattggcattgcgattcccaatggctgggggacagagtcatcaccaccagcacccgaacctgggccctgcccacctacaacaatcacctctacaagcaaatctccaacagcacatctggaggatcttcaaatgacaacgcctacttcggctacagcaccccctgggggtattttgacttcaacagattccactgccacttctcaccacgtgactggcagcgactcatcaacaacaactggggattccggcccaagagactcagcttcaagctcttcaacatccaggtcaaggaggtcacgcagaatgaaggcaccaagaccatcgccaataacctcaccagcaccatccaggtgtttacggactcggagtaccagctgccgtacgttctcggctctgcccaccagggctgcctgcctccgttcccggcggacgtgttcatgattccccagtacggctacctaacactcaacaacggtagtcaggccgtgggacgctcctccttctactgcctggaatactttccttcgcagatgctgagaaccggcaacaacttccagtttacttacaccttcgaggacgtgcctttccacagcagctacgcccacagccagagcttggaccggctgatgaatcctctgattgaccagtacctgtactacttgtctcggactcaaacaacaggaggcacggcaaatacgcagactctgggcttcagccaaggtgggcctaatacaatggccaatcaggcaaagaactggctgccaggaccctgttaccgccaacaacgcgtctcaacgacaaccgggcaaaacaacaatagcaactttgcctggactgctgggaccaaataccatctgaatggaagaaattcattggctaatcctggcatcgctatggcaacacacaaagacgacgaggagcgtttttttcccagtaacgggatcctgatttttggcaaacaaaatgctgccagagacaatgcggattacagcgatgtcatgctcaccagcgaggaagaaatcaaaaccactaaccctgtggctacagaggaatacggtatcgtggcagataacttgcagcagcaaaacacggctcctcaaattggaactgtcaacagccagggggccttacccggtatggtctggcagaaccgggacgtgtacctgcagggtcccatctgggccaagattcctcacacggacggcaacttccacccgtctccgctgatgggcggctttggcctgaaacatcctccgcctcagatcctgatcaagaacacgcctgtacctgcggatcctccgaccaccttaaaccaggccaagctgaactctttcatcacgcaatacagcaccggacaggtcagcgtggaaattgaatgggagctgcagaaggaaaacagcaagcgctggaacccagagattcagtacacttcaaactactacaaatctacaaatgtggactttgctgtcaatacagagggaacttatagtgaaccccgccccattggcaccagatttctgactcgtaatctgtaa

SEQ ID NO: 1533 - DNA, 2211 bp, synthetic construct
  misc_feature 1..2211: note = Description of Artificial Sequence: Synthetic polynucleotide
  variation 338: note = n is a, c, g, or t
  source 1..2211: mol_type = other DNA
atggctgccgatggttatcttccagattggctcgaggacactctctctgaaggaataagacagtggtggaagctcaaacctggcccaccaccaccaaagcccgcagagcggcataaggacgacagcaggggtcttgtgcttcctgggtacaagtacctcggccccttcaacggactcgacaagggggagcccgtcaacgcggcggacgcagcggccctcgagcacgacaaggcctacgaccagcagctcgaagcgggtgacaatccgtacctgcggtataaccacgccgacgccgagtttcaggagcgtctgcaagaagatacgtcttttgggggcancctcgggcgagcagtcttccaggccaagaagcgggttctcgaacctctcggtctggttgaggaaggcgctaagacggctcctggaaagaagagaccagtagagcagtcaccccaagaaccagactcctcctcgggcatcggcaggaaaggccaacagcccgccagaaaaagactcaattttggccagactggcgactcagagtcagttccagaccctcaacctctcggagaacctccagcagcgccctctggtgtgggacctaatacaatggcttcaggcggtggcgctccaatggcagacaataacgaaggcgccgacggagtgggtaatgcctcaggaaattggcattgcgattccacatggctgggcgacagagtcatcaccaccagcacccgcacctgggccttgcccacctacaataaccacctctacaagcaaatctccagtgcttcaacgggggccagcaacgacaaccactacttcggctacagcaccccctgggggtattttgatttcaacagattccactgccacttttcaccacgtgactggcagcgactcatcaacaacaattggggattccggcccaagagactcaacttcaaactcttcaacatccaggtcaaggaggtcacgcagaatgaaggcactaagaccatcgccaataaccttaccagcacgattcaggtatttacggactcggaataccagctgccgtacgtcctcggctccgcgcaccagggctgcctgcctccgttcccggcggacgtcttcatgattccccagtacggctaccttacactgaacaatggaagtcaagccgtaggccgttcctccttctactgcctggaatattttccatctcaaatgctgcgaactggcaacaacttccagtttacctacaccttcgaggacgtgcctttccacagcagctacgcccacagccagagcttggaccggctgatgaatcctctgattgaccagtacctgtactacttgtctcggactcagtccacaggaggaactcaaggtacccagcaattgttattttctcaagctgggcctgcaaacatgtcggctcaggctaagaactggctacctggaccttgctaccggcagcagcgagtctctacgacactgtcgcaaaacaacaacagcaactttgcttggactggtgccaccaaatatcacctgaacggaagagactctttggtaaatcccggtgtcgccatggcaacccacaaggacgacgaggaacgcttcttcccgtcgagtggagtcctgatgtttggaaaacagggtgctggaagagacaatgtggactacagcagcgttatgctaaccagcgaagaagaaattaaaaccactaaccctgtagccacagaacaatacggtgtggtggttgataacttgcagcaaaccaatacggggcctattgtgggaaatgtcaacagccaaggagccttacctggtatggtctggcagaaccgggacgtgtacctgcagggtcccatctgggccaagattcctcacacggacggcaacttccacccgtctccgctgatgggcggctttggcctgaaacatcctccgcctcagatcctcatcaaaaacacacctgtacctgcggatcctccaacggccttcaacaaggacaagctgaactctttcatcacccagtattctactggccaagtcagcgtggagatcgagtgggagctgcagaaggaaaacagcaagcgctggaacccggagatccagtacacttccaactattacaagtctaataatgttgaatttgctgttaatactgaaggtgtatatagtgaaccccgccccattggcaccagatacctgactcgtaatctgtaa

SEQ ID NO: 1534 - protein, 735 aa, synthetic construct
  REGION 1..735: note = Description of Artificial Sequence: Synthetic polypeptide
MAADGYLPDWLEDNLSEGIREWWDLKPGAPKPKANQQKQDDGRGLVLPGYKYLGPFNGLDKGEPVNAADAAALEHDKAYDRQLDSGDNPYLKYNHADAEFQERLKEDTSFGGNLGRAVFQAKKRVLEPFGLVEEGAKTAPGKKRPVEQSPQEPDSSSGIGKTGQQPAKKRLNFGQTGDSESVPDPQPLGEPPATPAAVGPTTMASGGGAPVADNNEGADGVGSSSGNWHCDSTWLGDRVITTSTRTWALPTYNNHLYKQISSASTGASNDNHYFGYSTPWGYFDFNRFHCHFSPRDWQRLINNNWGFRPKRLNFKLFNIQVKEVTTNEGTKTIANNLTSTVQVFTDSEYQLPYVLGSAHQGCLPPFPADVFMVPQYGYLTLNNGSQALGRSSFYCLEYFPSQMLRTGNNFTFSYTFEDVPFHSSYAHSQSLDRLMNPLIDQYLYYLVRTQTTGTGGTQTLAFSQAGPSSMANQARNWVPGPCYRQQRVSTTTNQNNNSNFAWTGAAKFKLNGRDSLMNPGVAMASHKDDDDRFFPSSGVLIFGKQGAGNDGVDYSQVLITDEEEIKATNPVATEEYGAVAINNQAANTQAQTGLVHNQGVIPGMVWQNRDVYLQGPIWAKIPHTDGNFHPSPLMGGFGLKHPPPQILIKNTPVPADPPLTFNQAKLNSFITQYSTGQVSVEIEWELQKENSKRWNPEIQYTSNYYKSTNVDFAVNTEGVYSEPRPIGTRYLTRNL

SEQ ID NO: 1535 - protein, 736 aa, synthetic construct
  REGION 1..736: note = Description of Artificial Sequence: Synthetic polypeptide
  VARIANT 113: note = Xaa can be any naturally occurring amino acid
MAADGYLPDWLEDTLSEGIRQWWKLKPGPPPPKPAERHKDDSRGLVLPGYKYLGPFNGLDKGEPVNAADAATLEHDKAYDQQLKAGDNPYLRYNHADAEFQERLQEDTSFGGXLGRAVFQAKKRVLEPLGLVEEAAKTAPGKKRPVEPSPQRSPDSSTGIGKKGQQPARKRLNFGQTGDSESVPDPQPLGEPPAAPSGVGPNTMAAGGGAPMADNNEGADGVGSSSGNWHCDSTWLGDRVITTSTRTWALPTYNNHLYKQISSASTGASNDNHYFGYSTPWGYFDFNRFHCHFSPRDWQRLINNNWGFRPKRLNFKLFNIQVKEVTTNDGVTTIANNLTSTVQVFSDSDYQLPYVLGSAHEGCLPPFPADVFMIPQYGYLTLNNGSQALGRSSFYCLEYFPSQMLRTGNNFQFSYTFEDVPFHSSYAHSQSLDRLMNPLIDQYLYYLVRTQTTGTGGTQTLAFSQAGPSSMANQARNWVPGPCYRQQRVSTTTNQNNNSNFAWTGAAKFKLNGRDSLMNPGVAMASHKDDDDRFFPSSGVLIFGKQGAGNDGVDYSQVLITDEEEIKATNPVATEEYGAVAINNQAANTQAQTGLVHNQGVIPGMVWQDRDVYLQGPIWAKIPHTDGHFHPSPLMGGFGLKHPPPQILIKNTPVPANPPAEFSATKFASFITQYSTGQVSVEIEWELQKENSKRWNPEVQYTSNYAKSANVDFTVDNNGLYTEPRPIGTRYLTRPL

SEQ ID NO: 1536 - protein, 737 aa, synthetic construct
  REGION 1..737: note = Description of Artificial Sequence: Synthetic polypeptide
  VARIANT 112: note = Xaa can be any naturally occurring amino acid
MTDGYLPDWLEDNLSEGVREWWALQPGAPKPKANQQKQDDGRGLVLPGYKYLGPFNGLDKGEPVNAADAAALEHDKAYDQQLKAGDNPYLRYNHADAEFQERLQEDTSFGGXLGRAVFQAKKRVLEPLGLVEEGAKTAPGKKRPVEPSPQRSPDSSTGIGKKGQQPARKRLNFGQTGDSESVPDPQPLGEPPAAPSGVGSLTMASGGGAPVADNNEGADGVGSSSGNWHCDSQWLGDRVITTSTRTWALPTYNNHLYKQISNSTSGGSSNDNAYFGYSTPWGYFDFNRFHCHFSPRDWQRLINNNWGFRPKRLSFKLFNIQVKEVTQNEGTKTIANNLTSTIQVFTDSEYQLPYVLGSAHQGCLPPFPADVFMIPQYGYLTLNNGSQAVGRSSFYCLEYFPSQMLRTGNNFQFTYTFEDVPFHSSYAHSQSLDRLMNPLIDQYLYYLSRTQTTGGTANTQTLGFSQGGPNTMANQAKNWLPGPCYRQQRVSTTTGQNNNSNFAWTAGTKYHLNGRNSLANPGIAMATHKDDEERFFPSNGILIFGKQNAARDNADYSDVMLTSEEEIKTTNPVATEEYGIVADNLQQQNTAPQIGTVNSQGALPGMVWQNRDVYLQGPIWAKIPHTDGNFHPSPLMGGFGLKHPPPQILIKNTPVPADPPTTLNQAKLNSFITQYSTGQVSVEIEWELQKENSKRWNPEIQYTSNYYKSTNVDFAVNTEGTYSEPRPIGTRFLTRNL

SEQ ID NO: 1537 - protein, 736 aa, synthetic construct
  REGION 1..736: note = Description of Artificial Sequence: Synthetic polypeptide
  VARIANT 113: note = Xaa can be any naturally occurring amino acid
MAADGYLPDWLEDTLSEGIRQWWKLKPGPPPPKPAERHKDDSRGLVLPGYKYLGPFNGLDKGEPVNAADAAALEHDKAYDQQLEAGDNPYLRYNHADAEFQERLQEDTSFGGXLGRAVFQAKKRVLEPLGLVEEGAKTAPGKKRPVEQSPQEPDSSSGIGRKGQQPARKRLNFGQTGDSESVPDPQPLGEPPAAPSGVGPNTMASGGGAPMADNNEGADGVGNASGNWHCDSTWLGDRVITTSTRTWALPTYNNHLYKQISSASTGASNDNHYFGYSTPWGYFDFNRFHCHFSPRDWQRLINNNWGFRPKRLNFKLFNIQVKEVTQNEGTKTIANNLTSTIQVFTDSEYQLPYVLGSAHQGCLPPFPADVFMIPQYGYLTLNNGSQAVGRSSFYCLEYFPSQMLRTGNNFQFTYTFEDVPFHSSYAHSQSLDRLMNPLIDQYLYYLSRTQSTGGTQGTQQLLFSQAGPANMSAQAKNWLPGPCYRQQRVSTTLSQNNNSNFAWTGATKYHLNGRDSLVNPGVAMATHKDDEERFFPSSGVLMFGKQGAGRDNVDYSSVMLTSEEEIKTTNPVATEQYGVVVDNLQQTNTGPIVGNVNSQGALPGMVWQNRDVYLQGPIWAKIPHTDGNFHPSPLMGGFGLKHPPPQILIKNTPVPADPPTAFNKDKLNSFITQYSTGQVSVEIEWELQKENSKRWNPEIQYTSNYYKSNNVEFAVNTEGVYSEPRPIGTRYLTRNL

SEQ ID NO: 1538 - DNA, 2211 bp, synthetic construct
  misc_feature 1..2211: note = Description of Artificial Sequence: Synthetic polynucleotide
  source 1..2211: mol_type = other DNA
atggccgccgacggctacctgcccgactggctggaggacaacctgagcgagggcatccgcgagtggtgggccctgaagcccggcgccccccagcccaaggccaaccagcagcaccaggacaacgcccgcggcctggtgctgcccggctacaagtacctgggccccggcaacggcctggacaagggcgagcccgtgaacgccgccgacgccgccgccctggagcacgacaaggcctacgaccagcagctgaaggccggcgacaacccctacctgaagtacaaccacgccgacgccgagttccaggagcgcctgaaggaggacaccagcttcggcggcaacctgggccgcgccgtgttccaggccaagaagcgcctgctggagcccctgggcctggtggaggaggccgccaagaccgcccccggcaagaagcgccccgtggagcagagcccccaggagcccgacagcagcgccggcatcggcaagagcggcgcccagcccgccaagaagcgcctgaacttcggccagaccggcgacaccgagagcgtgcccgacccccagcccatcggcgagccccccgccgcccccagcggcgtgggcagcctgaccatggccagcggcggcggcgcccccgtggccgacaacaacgagggcgccgacggcgtgggcagcagcagcggcaactggcactgcgacagccagtggctgggcgaccgcgtgatcaccaccagcacccgcacctgggccctgcccacctacaacaaccacctgtacaagcagatcagcaacagcaccagcggcggcagcagcaacgacaacgcctacttcggctacagcaccccctggggctacttcgacttcaaccgcttccactgccacttcagcccccgcgactggcagcgcctgatcaacaacaactggggcttccgccccaagcgcctgaacttcaagctgttcaacatccaggtgaaggaggtgaccgacaacaacggcgtgaagaccatcgccaacaacctgaccagcaccgtgcaggtgttcaccgacagcgactaccagctgccctacgtgctgggcagcgcccacgagggctgcctgccccccttccccgccgacgtgttcatgatcccccagtacggctacctgaccctgaacgacggcagccaggccgtgggccgcagcagcttctactgcctggagtacttccccagccagatgctgcgcaccggcaacaacttccagttcagctacgagttcgagaacgtgcccttccacagcagctacgcccacagccagagcctggaccgcctgatgaaccccctgatcgaccagtacctgtactacctgagcaagaccatcaacggcagcggccagaaccagcagaccctgaagttcagcgtggccggccccagcaacatggccgtgcagggccgcaactacatccccggccccagctaccgccagcagcgcgtgagcaccaccgtgacccagaacaacaacagcgagttcgcctggcccggcgccagcagctgggccctgaacggccgcaacagcctgatgaaccccggccccgccatggccagccacaaggagggcgaggaccgcttcttccccctgagcggcagcctgatcttcggcaagcagggcaccggccgcgacaacgtggacgccgacaaggtgatgatcaccaacgaggaggagatcaagaccaccaaccccgtggccaccgagagctacggccaggtggccaccaaccaccagagcgcccaggcccaggcccagaccggctgggtgcagaaccagggcatcctgcccggcatggtgtggcaggaccgcgacgtgtacctgcagggccccatctgggccaagatcccccacaccgacggcaacttccaccccagccccctgatgggcggcttcggcatgaagcacccccccccccagatcctgatcaagaacacccccgtgcccgccgacccccccaccgccttcaacaaggacaagctgaacagcttcatcacccagtacagcaccggccaggtgagcgtggagatcgagtgggagctgcagaaggagaacagcaagcgctggaaccccgagatccagtacaccagcaactactacaagagcaacaacgtggagttcgccgtgaacaccgagggcgtgtacagcgagccccgccccatcggcacccgctacctgacccgcaacctgtaa

SEQ ID NO: 1539 - DNA, 2211 bp, synthetic construct
  misc_feature 1..2211: note = Description of Artificial Sequence: Synthetic polynucleotide
  source 1..2211: mol_type = other DNA
atggctgccgatggttatcttccagattggctcgaggacactctctctgaaggaataagacagtggtggaagctcaaacctggcccaccaccaccaaagcccgcagagcggcataaggacgacagcaggggtcttgtgcttcctgggtacaagtacctcggacccttcaacggactcgacaagggagagccggtcaacgaggcagacgccgcggccctcgagcacgacaaggcctacgaccagcagctcaaggccggagacaacccgtacctcaagtacaaccacgccgacgccgagttccaggagcggctcaaagaagatacgtcttttgggggcaacctcggacgagcagtcttccaggccaagaagcgggttctcgaacctctcggtctggttgaggaaggcgctaagacggctcctggaaagaaacgtccggtagagcagtcgccacaagagccagactcctcctcgggcattggcaagacaggccagcagcccgctaaaaagagactcaattttggtcagactggcgactcagagtcagtccccgacccacaacctctcggagaacctccagcaacccccgctgctgtgggacctactacaatggcttcaggcggtggcgcaccaatggcggacaataacgaaggcgccgatggagtgggtagttcctcgggaaattggcattgcgattcccaatggctgggggacagagtcatcaccaccagcacccgaacatgggccttgcccacctataacaaccacctctacaagcaaatctccagtgcttcaacgggggccagcaacgacaaccactacttcggctacagcaccccctgggggtattttgacttcaacagattccactgccacttctcaccacgtgactggcagcgactcatcaacaacaactggggattccgacccaagagactcaacttcaagctctttaacattcaagtcaaggaggtcacgcagaatgaaggcaccaagaccatcgccaataacctcaccagcaccatccaggtgtttacggactcggagtaccagctgccgtacgttctcggctccgcccaccagggctgcctgcctccgttcccggcggacgtgttcatgattccccagtacggctacctaacactcaacaacggtagtcaggccgtgggacgctcctccttctactgcctggaatactttccttcgcagatgctgagaaccggcaacaacttccagtttacttacaccttcgaggacgtgcctttccacagcagctacgcccacagccagagcttggaccggctgatgaatcctctgattgaccagtacctgtactacttgtctcggactcaaacaacaggaggcacggcaaatacgcagactctgggcttcagccaaggtgggcctaatacaatggccaatcaggcaaagaactggctgccaggaccctgttaccgccaacaacgcgtctcaacgacaaccgggcaaaacaacaatagcaactttgcctggactgctgggaccaaataccatctgaatggaagaaattcattggctaatcctggcatcgctatggcaacacacaaagacgacaaggagcgtttttttcccagtaacgggatcctgatttttggcaaacaaaatgctgccagagacaatgcggattacagcgatgtcatgctcaccagcgaggaagaaatcaaaaccactaaccctgtggctacagaggaatacggtatcgtggcagataacttgcagcagcaaaacacggctcctcaaattggaactgtcaacagccagggggccttacccggtatggtctggcagaaccgggacgtgtacctgcagggtcccatctgggccaagattcctcacacggacggcaacttccacccgtctccgctgatgggcggctttggcctgaaacatcctccgcctcagatcctgatcaagaacacgcctgtacctgcggatcctccgaccaccttcaaccagtcaaagctgaactctttcatcacgcaatacagcaccggacaggtcagcgtggaaattgaatgggagctgcagaaagaaaacagcaaacgctggaacccagagattcaatacacttccaactactacaaatctacaagtgtggactttgctgttaatacagaaggcgtgtactctgaaccccaccccattggcacccgttacctcacccgtcccctgtaa

SEQ ID NO: 1540 - DNA, 2211 bp, synthetic construct
  misc_feature 1..2211: note = Description of Artificial Sequence: Synthetic polynucleotide
  source 1..2211: mol_type = other DNA
atggctgccgatggttatcttccagattggctcgaggacaacctctctgagggcattcgcgagtggtgggcgctgaaacctggagccccgaagcccaaagccaaccagcaaaagcaggacgacggccggggtctggtgcttcctggctacaagtacctcggacccttcaacggactcgacaagggggagccggtcaacgcagcagacgcggcggccctcgagcacgacaaggcctacgaccagcagctcaaggccggagacaacccgtacctcaagtacaaccacgccgacgccgagttccaggagcggctcaaagaagatacgtcttttgggggcaacctcgggcgagcagtcttccaggccaaaaagaggcttcttgaacctcttggtctggttgaggaagcggctaagacggctcctggaaagaagaggcctgtagagcagtctcctcaggaaccggactcctccgcgggtattggcaaatcgggtgcacagcccgctaaaaagagactcaattttggtcagactggcgactcagagtcagtccccgacccacaacctctcggagaacctccagcaacccccgctgctgtgggacctactacaatggcttcaggcggtggcgcaccaatggcagacaataacgaaggcgccgacggagtgggtaatgcctcaggaaattggcattgcgattccacatggctgggcgacagagtcatcaccaccagcacccgaacctgggccctgcccacctacaataaccacctctacaagcaaatctccagtgcttcaacgggggccagcaacgacaaccactacttcggctacagcaccccctgggggtattttgatttcaacagattccactgccacttttcaccacgtgactggcagcgactcatcaacaacaattggggattccggcccaagagactcaacttcaaactcttcaacatccaagtcaaggaggtcacgcagaatgaaggcaccaagaccatcgccaataacctcaccagcaccatccaggtgtttacggactcggagtaccagctgccgtacgttctcggctctgcccaccagggctgcctgcctccgttcccggcggacgtgttcatgattccccagtacggctacctaacactcaacaacggtagtcaggccgtgggacgctcctccttctactgcctggaatactttccttcgcagatgctgagaaccggcaacaacttccagtttacttacaccttcgaggacgtgcctttccacagcagctacgcccacagccagagcttggaccggctgatgaatcctctgattgaccagtacctgtactacttgtctcggactcaaacaacaggaggcacggcaaatacgcagactctgggcttcagccaaggtgggcctaatacaatggccaatcaggcaaagaactggctgccaggaccctgttaccgccaacaacgcgtctcaacgacaaccgggcaaaacaacaatagcaactttgcctggactgctgggaccaaataccatctgaatggaagaaattcattggctaatcctggcatcgctatggcaacacacaaagacgacaaggagcgtttttttcccagtaacgggatcctgatttttggcaaacaaaatgctgccagagacaatgcggattacagcgatgtcatgctcaccagcgaggaagaaatcaaagccactaaccctgtggctacagaggaatacggtatcgtggcagataacttgcagcagcaaaacacggctcctcaaattggaactgtcaacagccagggggccttacccggtatggtttggcagaaccgggacgtgtacctgcagggtcccatctgggccaagattcctcacacggacggcaacttccacccgtctccgctgatgggcggctttggcctgaaacatcctccgcctcagatcctgatcaagaacacgcctgtacctgcggatcctccgaccaccttcaaccagtcaaagctgaactctttcatcacgcaatacagcaccggacaggtcagcgtggaaattgaatgggagctgcagaaggaaaacagcaagcgctggaaccccgagatccagtacacctccaactactacaaatctacaagtgtggactttgctgttaatacagaaggcgtgtactctgaaccccaccccattggcacccgttacctcacccgtcccctgtaa

SEQ ID NO: 1541 - DNA, 2214 bp, synthetic construct
  misc_feature 1..2214: note = Description of Artificial Sequence: Synthetic polynucleotide
  source 1..2214: mol_type = other DNA
atggctgccgatggttatcttccagattggctcgaggacaacctctctgagggcattcgcgagtggtgggacttgaaacctggagccccgaagcccaaagccaaccagcaaaagcaggacgacggccggggtctggtgcttcctggctacaagtacctcggacccttcaacggactcgacaagggggagcccgtcaacgcggcggacgcagcggccctcgagcacgacaaggcctacgaccagcagctcaaagcgggtgacaatccgtacctgcggtataaccacgccgacgccgagtttcaggagcgtctgcaagaagatacgtcttttgggggcaacctcgggcgagcagtcttccaggccaagaagcgggttctcgaacctctcggtctggttgaggaaggcgctaatacggctcctggaaagaaacgtccggtagagcagtcgccacaagagccagactcctccgcgggtattggcaaatcgggtgcacagcccgctaaaaagagactcaatttcggtcagactggcgacacagagtcagtcccagaccctcaaccaatcggagaacctcccgcagccccctcaggtgtgggatctcttacaatggcttcaggtggtggcgcaccagtggcagacaataacgaaggtgccgatggagtgggtagttcctcgggaaattggcattgcgattcccaatggctgggggacagagtcatcaccaccagcacccgaacctgggccctgcccacctacaacaatcacctctacaagcaaatctccaacagcacatctggaggatcttcaaatgacaacgcctacttcggctacagcaccccctgggggtattttgacttcaacagattccactgccacttctcaccacgtgactggcagcgactcatcaacaacaactggggattccggcctaagcgactcaacttcaagctcttcaacattcaggtcaaagaggttacggacaacaatggagtcaagaccatcgccaataacctcaccagcaccatccaggtgtttacggactcggagtaccagctgccgtacgttctcggctccgcccaccagggctgcctgcctccgttcccggcggacgtgttcatgattccccagtacggctacctaacactcaacaacggtagtcaggccgtgggacgctcctccttctactgcctggaatactttccttcgcagatgctgagaaccggcaacaacttccagtttacttacaccttcgaggacgtgcctttccacagcagctacgcccacagccagagcttggaccggctgatgaatcctctgattgaccagtacctgtactacttgtctcggactcaaacaacaggaggcacggcaaatacgcagactctgggcttcagccaaggtgggcctaatacaatggccaatcaggcaaagaactggctgccaggaccctgttaccgccaacaacgcgtctcaacgacaaccgggcaaaacaacaatagcaactttgcctggactgctgggaccaaataccatctgaatggaagaaattcattggctaatcctggcatcgctatggcctcacacaaagacgacaaggagcgtttttttcccagtaacgggatcctgatttttggcaaacaaaatgctgccagagacaatgcggattacagcgatgtcatgctcaccagcgaggaagaaatcaaaaccactaaccctgtggctacagaggaatacggtatcgtggcagataacttgcagcagcaaaacacggctcctcaaattggaactgtcaacagtcaaggagccttacctggcatggtctggcagaaccgggacgtgtacctgcagggtcccatctgggccaagattcctcacacggacggcaacttccacccgtctccgctgatgggcggctttggcctgaaacatcctccgcctcagatcctgatcaagaacacgcctgtacctgcggatcctccgaccaccttcaaccagtcaaagctgaactctttcatcacgcaatacagcaccggacaggtcagcgtggaaattgaatgggagctgcagaaggaaaacagcaagcgctggaaccccgagatccagtacaccaccaactactacaaatctacaagtgtggactttgctgttaatacagaaggcgtgtactctgaaccccaccccattggcacccgttacctcacccgtcccctgtaa

SEQ ID NO: 1542 - DNA, 2211 bp, synthetic construct
  misc_feature 1..2211: note = Description of Artificial Sequence: Synthetic polynucleotide
  source 1..2211: mol_type = other DNA
atggctgccgatggttatcttccagattggctcgaggacaacctctctgagggcattcgcgagtggtgggcgctgaaacctggagccccgaagcccaaagccaaccagcaaaagcaggacgacggccggggtctggtgcttcctggctacaagtacctcggacccttcaacggactcgacaaaggagagccggtcaacgaggcggacgcggcagccctcgaacacgacaaagcttacgaccagcagctcaaggccggtgacaatccgtacctgcggtataaccacgccgacgccgagtttcaggagcgtcttcaagaagatacgtcttttgggggcaacctcgggcgagcagtcttccaggccaagaagcgggttctcgaacctctcggtctggttgaggaaggcgctaagacggctcctggaaagaaacgtccggtagagcagtcgccacaagagccagactcctcctcgggcatcggcaagacaggccagcagcccgctaaaaagagactcaattttggtcagactggcgactcagagtcagtccccgacccacaacctctcggagaacctccagcaacccccgctgctgtgggacctactacaatggcttcaggcggtggcgcaccaatggcagacaataacgaaggcgccgacggagtgggtaatgcctcaggaaattggcattgcgattccacatggctgggcgacagagtcatcaccaccagcacccgcacctgggccttgcccacctacaataaccacctctacaagcaaatctccagtgcttcaacgggggccagcaacgacaaccactacttcggctacagcaccccctgggggtattttgactttaacagattccactgccacttttcaccacgtgactggcaaagactcatcaacaacaactggggattccggcccaagagactcaacttcaagctcttcaacatccaggtcaaggaggtcacgcagaatgaaggcaccaagaccatcgccaataaccttaccagcacgattcaggtctttacggactcggaataccagctcccgtacgtcctcggctctgcgcaccagggctgcctccctccgttcccggcggacgtgttcatgattccgcagtacggctacctaacactcaacaacggtagtcaggccgtgggacgctcctccttctactgcctggaatactttccttcgcagatgctgagaaccggcaacaacttccagtttacttacaccttcgaggacgtgcctttccacagcagctacgcccacagccagagcttggaccggctgatgaatcctctgattgaccagtacctgtactacttgtctcggactcaaacaacaggaggcacggcaaatacgcagactctgggcttcagccaaggtgggcctaatacaatggccaatcaggcaaagaactggctgccaggaccctgttaccgccaacaacgcgtctcaacgacaaccgggcaaaacaacaatagcaactttgcctggactgctgggaccaaataccatctgaatggaagaaattcattggctaatcctggcatcgctatggcaacacacaaagacgacaaggagcgtttttttcccagtaacgggatcctgatttttggcaaacaaaatgctgccagagacaatgcggattacagcgatgtcatgctcaccagcgaggaagaaatcaaaaccactaaccctgtggctacagaggaatacggtatcgtggcagataacttgcagcagcaaaacacggctcctcaaattggaactgtcaacagccagggggccttacccggtatggtctggcagaaccgggacgtgtacctgcagggtcccatctgggccaagattcctcacacggacggcaacttccacccgtctccgctgatgggcggctttggcctgaaacatcctccgcctcagatcctgatcaagaacacgcctgtacctgcggatcctccgaccaccttcaaccagtcaaagctgaactctttcatcacgcaatacagcaccggacaggtcagcgtggaaattgaatgggagctgcagaaggaaaacagcaagcgctggaaccccgagatccagtacacctccaactactacaaatctacaagtgtggactttgctgttaatacagaaggcgtgtactctgaaccccaccccattggcacccgttacctcacccgtcccctgtaa

SEQ ID NO: 1543 - DNA, 2211 bp, synthetic construct
  misc_feature 1..2211: note = Description of Artificial Sequence: Synthetic polynucleotide
  source 1..2211: mol_type = other DNA
atggctgccgatggttatcttccagattggctcgaggacaacctctctgagggcattcgcgagtggtgggcgctgaaacctggagccccgaagcccaaagccaaccagcaaaagcaggacgacggccggggtctggtgcttcctggctacaagtacctcggacccttcaacggactcgacaaaggagagccggtcaacgaggcggacgcggcagccctcgaacacgacaaagcttacgaccagcagctcaaagcgggtgacaatccgtacctgcggtataaccacgccgacgccgagtttcaggagcgtctgcaagaagatacgtcttttgggggcaacctcgggcgagcagtcttccaggccaagaagagggttctcgaaccttttggtctggttgaggaaggtgctaagacggctcctggaaagaaacgtccggtagagcagtcgccacaagagccagactcctcctcgggcattggcaagacaggccagcagcccgctaaaaagagactcaattttggtcagactggcgactcagagtcagtccccgacccacaacctctcggagaacctccagcaacccccgctgctgtgggacctactacaatggcttcaggcggtggcgcaccaatggcagacaataacgaaggcgccgacggagtgggtaatgcctcaggaaattggcattgcgattcccaatggctgggcgacagagtcatcaccaccagcaccagaacctgggccttgcccacctataacaaccacctctacaagcaaatctccagtgcttcaacgggggccagcaacgacaaccactacttcggctacagcaccccctgggggtattttgatttcaacagattccactgccacttctcaccacgtgactggcagcgactcatcaacaacaactggggattccggcctaagcgactcaacttcaagctcttcaacattcaggtcaaagaggttacggacaacaatggagtcaagaccatcgccaataaccttaccagcacggttcaagtcttctcggactcggagtaccagttgccgtacgtcctcggctctgcgcaccagggctgcctccctccgttcccggcggacgtgttcatgattccccagtacggctacctaacactcaacaacggtagtcaggccgtgggacgctcctccttctactgcctggaatactttccttcgcagatgctgagaaccggcaacaacttccagtttacttacaccttcgaggacgtgcctttccacagcagctacgcgcacagccagagcttggaccggctgatgaatcctctgattgaccagtacctgtactacttgtctcggactcaaacaacaggaggcacggcaaatacgcagactctgggcttcagccaaggtgggcctaatacaatggccaatcaggcaaagaactggctgccaggaccctgttaccgccaacaacgcgtctcaacgacaaccgggcaaaacaacaatagcaactttgcctggactgctgggaccaaataccatctgaatggaagaaattcattggctaatcctggcatcgctatggcaacacacaaagacgacaaggagcgtttttttcccagtaacgggatcctgatttttggcaaacaaaatgctgccagagacaatgcggattacagcgatgtcatgctcaccagcgaggaagaaatcaaaaccactaaccctgtggctacagaggaatacggtatcgtggcagataacttgcagcagcaaaacacggctcctcaaattggaactgtcaacagccagggggccttacccggtatggtctggcagaaccgggacgtgtacctgcagggtcccatctgggccaagattcctcacacggacggcaacttccacccgtctccgctgatgggcggctttggcctgaaacatcctccgcctcagatcctgatcaagaacacgcctgtacctgcggatcctccgaccaccttcaaccagtcaaagctgaactctttcatcacgcaatacagcaccggacaggtcagcgtggaaattgaatgggagctgcagaaggaaaacagcaagcgctggaaccccgagatccagtacacctccaactactacaaatctacaagtgtggactttgctgttaatacagaaggcgtgtactctgaaccccaccccattggcacccgttacctcacccgtcccctgtaa

SEQ ID NO: 1544 - DNA, 2244 bp, synthetic construct
  misc_feature 1..2244: note = Description of Artificial Sequence: Synthetic polynucleotide
  variation 2241: note = n is a, c, g, or t
  source 1..2244: mol_type = other DNA
atggctgccgatggttatcttccagattggctcgaggacactctctctgaaggaataagacagtggtggaagctcaaacctggcccaccaccaccaaagcccgcagagcggcataaggacgacagcaggggtcttgtgcttcctgggtacaagtacctcggacccttcaacggactcgacaagggagagccggtcaacgaggcagacgccgcggccctcgagcacgacaaagcctacgaccggcagctcgacagcggagacaacccgtacctcaagtacaaccacgccgacgcggagtttcaggagcgccttaaagaagatacgtcttttgggggcaacctcgggcgagcagtcttccaggccaagaagagggttctcgaaccttttggtctggttgaggaaggtgctaagacggctcctggaaagaaacgtccggtagagcagtcgccacaagagccagactcctcctcgggcattggcaagacaggccagcagcccgctaaaaagagactcaattttggtcagactggcgactcagagtcagtccccgacccacaacctctcggagaacctccagcaacccccgctgctgtgggacctactacaatggcttcaggcggtggcgcaccaatggcagacaataacgaaggcgccgacggagtgggtaatgcctcaggaaattggcattgcgattccacatggctgggcgacagagtcatcaccaccagcacccgaacatgggccttgcccacctataacaaccacctctacaagcaaatctccagtgcttcaacgggggccagcaacgacaaccactacttcggctacagcaccccctgggggtattttgacttcaacagattccactgccacttctcaccacgtgactggcagcgactcatcaacaacaactggggattccggcctaagcgactcaacttcaagctcttcaacattcaggtcaaagaggttacggacaacaatggagtcaagaccatcgccaataaccttaccagcacggtccaggtcttcacggactcagactatcagctcccgtacgtgctcgggtcggctcacgagggctgcctcccgccgttcccagcggacgttttcatgattcctcagtacggctacctaacactcaacaacggtagtcaggccgtgggacgctcctccttctactgcctggaatactttccttcgcagatgctgagaaccggcaacaacttccagtttacttacaccttcgaggacgtgcctttccacagcagctacgcgcacagccagagcttggaccggctgatgaatcctctgattgaccagtacctgtactacttgtctcggactcaaacaacaggaggcacggcaaatacgcagactctgggcttcagccaaggtgggcctaatacaatggccaatcaggcaaagaactggctgccaggaccctgttaccgccaacaacgcgtctcaacgacaaccgggcaaaacaacaatagcaactttgcctggactgctgggaccaaataccatctgaatggaagaaattcattggctaatcctggcatcgctatggcaacacacaaagacgacaaggagcgtttttttcccagtaacgggatcctgatttttggcaaacaaaatgctgccagagacaatgcggattacagcgatgtcatgctcaccagcgaggaagaaatcaaaaccactaaccctgtggctacagaggaatacggtatcgtggcagataacttgcagcagcaaaacacggctcctcaaattggaactgtcaacagccagggggccttacccggtatggtctggcagaaccgggacgtgtacctgcagggtcccatctgggccaagattcctcacacggacggcaacttccacccgtctccgctgatgggcggctttggcctgaaacatcctccgcctcagatcctgatcaagaacacgcctgtacctgcggatcctccgaccaccttcaaccagtcaaagctgaactctttcatcacgcaatacagcaccggacaggtcagcgtggaaattgaatgggagctgcagaaggaaaacagcaagcgctggaaccccgagatccagtacacctccaactactacaaatctacaagtgtggactttgctgttaatacagaaggcgtgtactctgaaccccaccccattggcaccagatacctgactcgtaatctgtaattgcttgttaatcaataaaccgtttaattnttt

SEQ ID NO: 1545 - DNA, 2217 bp, synthetic construct
  misc_feature 1..2217: note = Description of Artificial Sequence: Synthetic polynucleotide
  source 1..2217: mol_type = other DNA
atggctgccgatggttatcttccagattggctcgaggacaacctctctgagggcattcgcgagtggtgggacttgaaacctggagccccgaaacccaaagccaaccagcaaaagcaggacgacggccggggtctggtgcttcctggctacaagtacctcggacccttcaacggactcgacaagggggagcccgtcaacgcggcggacgcagcggccctcgagcacgacaaggcctacgaccagcagctccaagcgggtgacaatccgtacctgcggtataaccacgccgacgccgagtttcaggagcgtctgcaagaagatacgtcttttgggggcaacctcggacgagcagtcttccaggcgaaaaagagggttctcgaacctctcggtctggttgaggaaggcgctaagacggctcctggaaagaagagaccggtagagccatcaccccagcgttctccagactcctctacgggcatcggcaagaaaggccaacagcccgccagaaaaagactcaattttggtcagactggcgactcagagtcagttccagaccctcaacctctcggagaacctccagcagcgccctctggtgtgggacctaatacaatggctgcaggcggtggcgcaccaatggcagacaataacgaaggcgccgacggagtgggtagttcctcgggaaattggcattgcgattcccaatggctgggggacagagtcatcaccaccagcacccgaacctgggccctgcccacctacaacaatcacctctacaagcaaatctccaacagcacatctggaggatcttcaaatgacaacgcctacttcggctacagcaccccctgggggtattttgacttcaaccgcttccactgccacttctcaccacgtgactggcagcgactcatcaacaacaactggggattccggcccaagagactcagcttcaaactcttcaacatccaggtcaaggaggtcacgcagaatgaaggcaccaagaccatcgccaataacctcaccagcaccatccaggtgtttacggactcggagtaccagctgccgtacgttctcggctctgcccaccagggctgcctgcctccgttcccggcggacgtgttcatgattcctcagtacggctacctaacgctcaacaatggcagccaggcagtgggacggtcatccttttactgcctggaatatttcccatcgcagatgctgagaacgggcaacaactttaccttcagctacacctttgaggacgttcctttccacagcagctacgctcacagccagagtctggaccgtctcatgaatcctctgattgaccagtacctgtactacttgtctcggactcaaacaacaggaggcacggcaaatacgcagactctgggcttcagccaaggtgggcctaatacaatggccaatcaggcaaagaactggctgccaggaccctgttaccgccaacaacgcgtctcaacgacaaccgggcaaaacaacaatagcaactttgcctggactgctgggaccaaataccatctgaatggaagaaattcattggctaatcctggcatcgctatggcaacacacaaagacgacaaggagcgtttttttcccagtaacgggatcctgatttttggcaaacaaaatgctgccagagacaatgcggattacagcgatgtcatgctcaccagcgaggaagaaatcaaaaccactaaccctgtggctacagaggaatacggtatcgtggcagataacttgcagcagcaaaacacggctcctcaaattggaactgtcaacagccagggggccttacccggtatggtctggcagaaccgggacgtgtacctgcagggtcccatctgggccaagattcctcacacggacggcaacttccacccgtctccgctgatgggcggctttggacttaagcacccgcctcctcagatcctcatcaaaaacacgcctgttcctgcggatcctccgaccaccttcaaccagtcaaagctgaactctttcatcacgcaatacagcaccggacaggtcagcgtggaaattgaatgggagctgcagaaggaaaacagcaagcgctggaaccccgagatccagtacacctccaactactacaaatctacaagtgtggactttgctgttaatacagaaggcgtgtactctgaaccccaccccattggcacccgttacctcacccgtcccctgtaa

SEQ ID NO: 1546 - DNA, 2214 bp, synthetic construct
  misc_feature 1..2214: note = Description of Artificial Sequence: Synthetic polynucleotide
  source 1..2214: mol_type = other DNA
atggctgccgatggttatcttccagattggctcgaggacaacctctctgagggcattcgcgagtggtgggacttgaaacctggagccccgaagcccaaagccaaccagcaaaagcaggacgacggccggggtctggtgcttcctggctacaagtacctcggacccttcaacggactcgacaagggggagcccgtcaacgcggcggatgcagcggccctcgagcacgacaaagcctacgaccagcagctcaaagcgggtgacaatccgtacctgcggtataaccacgccgacgccgagtttcaggagcgtctgcaagaagatacgtcttttgggggcaacctcgggcgagcagtcttccaggccaagaagagggttctcgaaccttttggtctggttgaggaaggtgctaagacggctcctggaaagaaacgtccggtagagcagtcgccacaagagccagactcctcctcgggcattggcaagacaggccagcagcccgctaaaaagagactcaattttggtcagactggcgactcagagtcagtccccgacccacaacctctcggagaacctccagcaacccccgctgctgtgggacctactacaatggcttcaggcggtggcgcacccatgcaagacaataacgaaggcgccgacggagtgggtagttcctcgggaaattggcattgcgattccacatggctgggcgacagagtcatcaccaccagcacccgaacctgggccctgcccacctacaacaaccacctctacaagcaaatctccaacgggacatcgggaggagccaccaacgacaacacctacttcggctacagcaccccctgggggtattttgactttaacagattccactgccacttttcaccacgtgactggcagcgactcatcaacaacaactggggattccggcccaagagactcaacttcaagctcttcaacatccaggtcaaggaggtcacgcagaatgaaggcaccaagaccatcgccaataaccttaccagcacgattcaggtctttacggattcggaataccagctcccgtacgtcctcggctctgcgcaccagggctgcctccctccgttcccggcggacgtgttcatgattccgcagtacggctacctaacgctcaacaatggtagccaggcagtgggacggtcatccttttactgcctggaatatttcccatcgcagatgctgagaacgggcaacaactttaccttcagctacacctttgaggacgttcctttccacagcagctacgctcacagccagagtctggaccgtctcatgaatcctctgattgaccagtacctgtactacttgtctcggactcaaacaacaggaggcacggcaaatacgcagactctgggcttcagccaaggtgggcctaatacaatggccaatcaggcaaagaactggctgccaggaccctgttaccgccaacaacgcgtctcaacgacaaccgggcaaaacaacaatagcaactttgcctggactgctgggaccaaataccatctgaatggaagaaattcattggctaatcctggcatcgctatggcaacacacaaagacgacaaggagcgtttttttcccagtaacgggatcctgatttttggcaaacaaaatgctgccagagacaatgcggattacagcgatgtcatgctcaccagcgaggaagaaatcaaaaccactaaccctgtggctacagaggaatacggtatcgtggcagataacttgcagcagcaaaacacggctcctcaaattggaactgtcaacagccagggggccttacccggtatggtctggcagaaccgggacgtgtacctgcagggtcccatctgggccaagattcctcacacggacggcaacttccacccgtctccgctgatgggcggctttggcctgaaacatcctccgcctcagatcctgatcaagaacacgcctgtacctgcggatcctccgaccaccttcaaccagtcaaagctgaactctttcatcacgcaatacagcaccggacaggtcagcgtggaaattgaatgggagctgcagaaggaaaacagcaagcgctggaaccccgagatccagtacacctccaactactacaaatctacaagtgtggactttgctgttaatacagaaggcgtgtactctgaaccccaccccattggcacccgttacctcacccgtcccctgtaa

SEQ ID NO: 1547 - DNA, 2211 bp, synthetic construct
  misc_feature 1..2211: note = Description of Artificial Sequence: Synthetic polynucleotide
  source 1..2211: mol_type = other DNA
atggctgccgatggttatcttccagattggctcgaggacaacctctctgagggcattcgcgagtggtgggcgctgaaacctggagccccgaagcccaaagccaaccagcaaaagcaggacgacggccggggtctggtgcttcctggctacaagtacctcggacccttcaacggactcgacaagggggagcccgtcaacgcggcggacgcagcggccctcgagcacgacaaggcctacgaccagcagctcaaagcgggtgacaatccgtacctgcggtataaccacgccgacgccgagtttcaggagcgtctgcaagaagatacgtcttttgggggcaacctcgggcgagcagtcttccaggccaagaagcgggttctcgaacctctcggtctggttgaggaaggcgctaagacggctcctggaaagaaacgtccggtagagcagtcgccacaagagccagactcctcctcgggcatcggcaagacaggccagcagcccgctaaaaagagactcaattttggtcagactggcgactcagagtcagtccccgacccacaacctctcggagaacctccagcaacccccgctgctgtgggacctactacaatggcttcaggcggtggcgcaccaatggcagacaataacgaaggcgccgacggagtgggtagttcctcgggaaattggcattgcgattccacatggctgggcgacagagtcatcaccaccagcacccgcacctgggccttgcccacctacaataaccacctctacaagcaaatctccagtgcttcaacgggggccagcaacgacaaccactacttcggctacagcaccccctgggggtattttgacttcaacagattccactgccacttctcaccacgtgactggcagcgactcatcaacaacaactggggattccggcctaagcgactcaacttcaagctcttcaacattcaggtcaaagaggttacggacaacaatggagtcaagaccatcgccaataaccttaccagcacggtccaggtcttcacggactcagactatcagctcccgtacgtgctcgggtcggctcacgagggctgcctcccgccgttcccagcggacgttttcatgattcctcagtacgggtatctgacgctcaacaatggcagccaggcagtgggacggtcatccttttactgcctggaatatttcccatcgcagatgctgagaacgggcaataactttaccttcagctacaccttcgaggacgtgcctttccacagcagctacgcgcacagccagagcctggaccggctgatgaatcctctgattgaccagtacctgtactacttgtctcggactcaaacaacaggaggcacggcaaatacgcagactctgggcttcagccaaggtgggcctaatacaatggccaatcaggcaaagaactggctgccaggaccctgttaccgccaacaacgcgtctcaacgacaaccgggcaaaacaacaatagcaactttgcctggactgctgggaccaaataccatctgaatggaagaaattcattggctaatcctggcatcgctatggcaacacacaaagacgacaaggagcgtttttttcccagtaacgggatcctgatttttggcaaacaaaatgctgccagagacaatgcggattacagcgatgtcatgctcaccagcgaggaagaaatcaaaaccactaaccctgtggctacagaggaatacggtatcgtggcagataacttgcagcagcaaaacacggctcctcaaattggaactgtcaacagccagggggccttacccggtatggtctggcagaaccgggacgtgtacctgcagggtcccatctgggccaagattcctcacacggacggcaacttccacccgtctccgctgatgggcggctttggcctgaaacatcctccgcctcagatcctgatcaagaacacgcctgtacctgcggatcctccgaccaccttcaaccagtcaaagctgaactctttcatcacgcaatacagcaccggacaggtcagcgtggaaattgaatgggagctgcagaaggaaaacagcaagcgctggaaccccgagatccagtacacctccaactactacaaatctacaagtgtggactttgctgttaatacagaaggcgtgtactctgaaccccaccccattggcacccgttacctcacccgtcccctgtaa

SEQ ID NO: 1548 - DNA, 2214 bp, synthetic construct
  misc_feature 1..2214: note = Description of Artificial Sequence: Synthetic polynucleotide
  source 1..2214: mol_type = other DNA
atggctgccgatggttatcttccagattggctcgaggacaacctctctgagggcattcgcgagtggtgggacttgaaacctggagccccgaaacccaaagccaaccagcaaaagcaggacgacggccggggtctggtgcttcctggctacaagtacctcggacccttcaacggactcgacaagggggagcccgtcaacgcggcggatgcagcggccctcgagcacgacaaggcctacgaccagcagctcaaagcgggtgacaatccgtacctgcggtataaccacgccgacgccgagtttcaggagcgtctgcaagaagatacgtcttttgggggcaacctcgggcgagcagtcttccaggccaagaagcgggttctcgaacctctcggtctggttgaggaaggcgctaagacggctcctggaaagaagagaccggtagagccatcaccccagcgttctccagactcctctacgggcatcggcaagaaaggccaacagcccgccagaaaaagactcaattttggtcagactggcgactcagagtcagtccccgacccacaacctctcggagaacctccagcaacccccgctgctgtgggacctactacaatggcttcaggcggtggcgcaccaatggcagacaataacgaaggcgccgacggagtgggtaatgcctcaggaaattggcattgcgattccacatggctgggcgacagagtcatcaccaccagcacccgaacatgggccttgcccacctataacaaccacctctacaagcaaatctccagtgcttcaacgggggccagcaacgacaaccactacttcggctacagcaccccctgggggtattttgatttcaacagattccactgccatttctcaccacgtgactggcagcgactcatcaacaacaatttgggatcccggcccaagagactcaacttcaagctcttcatcatccaagtcaaggaggtcacgacgaatgatggcgtcacgaccatcgctaataaccttaccagcacggttcaagtcttctcggactcggagtaccagttgccgtacgtcctcggctctgcgcaccagggctgcctccctccgttcccggcggacgtgttcatgattccgcagtacggctacctaacgctcaacaatggcagccaggcagtgggacggtcatccttttactgcctggaatatttcccatcgcagatgctgagaacgggcaataactttaccttcagctacaccttcgaggacgtgcctttccacagcagctacgcgcacagccagagcctggaccggctgatgaatcctctcatcgaccagtacctgtattacctgaacagaactcagaatcagtccggaagtgcccaaaacaaggacttgctgtttagccgggggtctccagctggcatgtctgttcagcccaaaaactggctacctggaccctgttaccggcagcagcgcgtttctaaaacaaaaacagacaacaacaacagcaactttacctggactggtgcttcaaaatataaccttaatgggcgtgaatctataatcaaccctggcactgctatggcctcacacaaagacgacaaagacaagttctttcccatgagcggtgtcatgatttttggaaaggagagcgccggagcttcaaacactgcattggacaatgtcatgatcacagacgaagaggaaatcaaagccactaaccccgtggccaccgaaagatttgggactgtggcagtcaatctccagagcagcagcacagaccctgcgaccggagatgtgcatgttatgggagccttacctggaatggtgtggcaagacagagacgtatacctgcagggtcctatttgggccaaaattcctcacacggatggacactttcacccgtctcctctcatgggcggctttggacttaagcacccgcctcctcagatcctcatcaaaaacacgcctgttcctgcgaatcctccggcagagttttcggctacaaagtttgcttcattcatcacccagtattccacaggacaagtgagcgtggagattgaatgggagctgcagaaagaaaacagcaaacgctggaatcccgaagtgcagtatacatctaactatgcaaaatctgccaacgttgatttcactgtggacaacaatggactttatactgagcctcgccccattggcacccgttacctcacccgtcccctgtaa

SEQ ID NO: 1549 - DNA, 2211 bp, synthetic construct
  misc_feature 1..2211: note = Description of Artificial Sequence: Synthetic polynucleotide
  source 1..2211: mol_type = other DNA
atggctgccgatggttatcttccagattggctcgaggacaacctctctgagggcattcgcgagtggtgggcgctgaaacctggagccccgaaacccaaagccaaccagcaaaagcaggacgacggccggggtctggtgcttcctggctacaagtacctcggacccttcaacggactcgacaagggggagcccgtcaacgcggcggacgcagcggccctcgagcacgacaaggcctacgaccagcagctcaaggcgggtgacaatccgtacctgcggtataaccacgccgacgccgagtttcaggagcgtctgcaagaagatacgtcttttgggggcaacctcgggcgagcagtcttccaggccaaaaagaggcttcttgaacctcttggtctggttgaggaagcggctaagacggctcctggaaagaaacgtccggtagagcagtcgccacaagagccagactcctcctcgggcattggcaagacaggccagcagcccgctaaaaagagactcaactttgggcagactggcgactcagagtcagtgcccgaccctcaaccaatcggagaacctccagcaacccccgctgctgtgggacctactacaatggcttcaggcggtggcgcaccaatggcggacaataacgaaggcgccgatggagtgggtaattcctcgggaaattggcattgcgattccacatggctgggcgacagagtcatcaccaccagcacccgaacctgggccctgcccacctacaacaatcacctctacaagcaaatctccagtgcttcaacgggggccagcaacgacaaccactacttcggctacagcaccccctgggggtattttgatttcaacagattccactgccacttttcaccacgtgactggcagcgactcatcaacaacaactggggattccggcccaagagactcaacttcaagctcttcaacatccaggtcaaggaggtcacgcagaatgaaggcaccaagaccatcgccaataacctcaccagcaccatccaggtgtttacggactcggagtaccagctgccgtacgttctcggctccgcccaccagggctgcctgcctccgttcccggcggacgtgttcatgattccgcagtacggctacctaacgctcaacaatggcagccaggcagtgggacggtcatccttttactgcctggaatatttcccatcgcagatgctgagaacgggcaacaactttaccttcagctacacctttgaggacgttcctttccacagcagctacgctcacagccagagtctggaccgtctcatgaatcctctgattgaccagtacctgtactacttgtctcggactcaaacaacaggaggcacggcaaatacgcagactctgggcttcagccaaggtgggcctaatacaatggccaatcaggcaaagaactggctgccaggaccctgttaccgccaacaacgcgtctcaacgacaaccgggcaaaacaacaatagcaactttgcctggactgctgggaccaaataccatctgaatggaagaaattcattggctaatcctggcatcgctatggcaacacacaaagacgacaaggagcgtttttttcccagtaacgggatcctgatttttggcaaacaaaatgctgccagagacaatgcggattacagcgatgtcatgctcaccagcgaggaagaaatcaaaaccactaaccctgtggctacagaggaatacggtatcgtggcagataacttgcagcagcaaaacacggctcctcaaattggaactgtcaacagccagggggccttacccggtatggtctggcagaaccgggacgtgtacctgcagggtcccatctgggccaagattcctcacacggacggcaacttccacccgtctccgctgatgggcggctttggcctgaaacatcctccgcctcagatcctgatcaagaacacgcctgtacctgcggatcctccgaccaccttcaaccagtcaaagctgaactctttcatcacgcaatacagcaccggacaggtcagcgtggaaattgaatgggagctgcagaaggaaaacagcaagcgctggaaccccgagatccagtacacctccaactactacaaatctacaagtgtggactttgctgttaatacagaaggcgtgtactctgatccccaccccattggcacccgttacctcacccgtcccctgtaa

SEQ ID NO: 1550 - DNA, 2211 bp, synthetic construct
  misc_feature 1..2211: note = Description of Artificial Sequence: Synthetic polynucleotide
  source 1..2211: mol_type = other DNA
atggctgccgatggttatcttccagattggctcgaggacaacctctctgagggcattcgcgagtggtgggcgctgaaacctggagccccgaagcccaaagccaaccagcaagagcaggacgacggccggggtctggtgcttcctggctacaagtacctcggacccttcaacggactcgacaagggagagcccgtcaacgcggcggatgcagcggccctcgagcacgacaaagcctacgaccagcagctcaaagcgggtgacaatccgtacctgcggtataaccacgccgacgccgagtttcaggagcgtctgcaagaagatacgtcttttgggggcaacctcgggcgagcagtcttccaggccaagaagagggttctcgaaccttttggtctggttgaggaaggtgctaagacggctcctggaaagaaacgtccggtagagcagtcgccacaagagccagactcctcctcgggcattggcaagacaggccagcagcccgctaaaaagagactcaattttggtcagactggcgactcagagtcagttccagaccctcaacctctcggagaacctccagcagcgccctctggtgtgggacctaatacaatggctgcaggcggtggcgcaccaatggcagacaataacgaaggcgccgacggagtgggtagttcctcgggaaattggcattgcgattccacatggctgggcgacagagtcatcaccaccagcacccgaacctgggccctgcccacctacaacaaccacctctacaagcaaatctccagtgcttcaacgggggccagcaacgacaaccactacttcggctacagcaccccctgggggtattttgactttaacagattccactgccacttttcaccacgtgactggcagcgactcatcaacaacaactggggattccggcccaagagactcaacttcaagctcttcaacatccaggtcaaggaggtcacgcagaatgaaggcaccaagaccatcgccaataaccttaccagcacgattcaggtctttacggattcggaataccagctcccgtacgtcctcggctctgcgcaccagggctgcctccctccgttcccggcggacgtgttcatgattccgcagtacggctacctaacgctcaacaatggtagccaggcagtgggacggtcatcctttttctgcctggaatatttcccatcgcagatgctgagaacgggcaacaactttaccttcagctacacctttgaggacgttcctttccacagcagctacgctcacagccagagtctggaccgtctcatgaatcctctgattgaccagtacctgtactacttgtctcggactcaaacaacaggaggcacggcaaatacgcagactctgggcttcagccaaggtgggcctaatacaatggccaatcaggcaaagaactggctgccaggaccctgttaccgccaacaacgcgtctcaacgacaaccgggcaaaacaacaatagcaactttgcctggactgctgggaccaaataccatctgaatggaagaaattcattggctaatcctggcatcgctatggcaacacacaaagacgacaaggagcgtttttttcccagtaacgggatcctgatttttggcaaacaaaatgctgccagagacaatgcggattacagcgatgtcatgctcaccagcgaggaagaaatcaaaaccactaaccctgtggctacagaggaatacggtatcgtggcagataacttgcagcagcaaaacacggctcctcaaattggaactgtcaacagccagggggccttacccggtatggtctggcagaaccgagacgtgtacctgcagggtcccatctgggccaagattcctcacacggacggcaacttccacccgtctccgctgatgggcggctttggcctgaaacatcctccgcctcagatcctgatcaagaacacgcctgtacctgcggatcctccgaccaccttcaaccagtcaaagctgaactctttcatcacgcaatacagcaccggacaggtcagcgtggaaattgaatgggagctgcagaaggaaaacagcaagcgctggaaccccgagatccagtacacctccaactactacaaatctacaagtgtggactttgctgttaatacagaaggcgtgtactctgaaccccaccccattggcacccgttacctcacccgtcccctgtaa

SEQ ID NO: 1551 - DNA, 2211 bp, synthetic construct
  misc_feature 1..2211: note = Description of Artificial Sequence: Synthetic polynucleotide
  source 1..2211: mol_type = other DNA
atggctgccgatggttatcttccagattggctcgaggacaacctctctgagggcattcgcgagtggtgggacttgaaacctggagccccgaagcccaaagccaaccagcaaaagcaggacgacggccggggtctggtgcttcctggctacaagtacctcggacccttcaacggactcgacaagggggagcccgtcaacgcggcggacgcagcggccctcgagcacgacaaggcctacgaccagcagctcaaagcgggtgacaatccgtacctgcggtataaccacgccgacgccgagtttcaggagcgtctgcaagaagatacgtcttttgggggcaacctcgggcgagcagtcttccaggccaagaagcgggttctcgaacctctcggtctggttgaggaaggcgctaagacggctcctggaaagaaacgtccggtagagcagtcaccacaagagccagactcctcctcgggcatcggcaagacaggccagcagcccgctaaaaagagactcaattttggtcagactggcgactcagagtcagtccccgacccacaacctctcggagaacctccagcaacccccgctgctgtgggacctactacaatggcttcaggcggtggcgcaccaatggcggacaataacgaaggcgccgacggagtgggtaatgcctcaggaaattggcattgcgattccacatggctgggcgacagagtcatcaccaccagcacccgaacatgggccttgcccacctataacaaccacctctacaagcaaatctccagtgcttcaacgggggccagcaacgacaaccactacttcggctacagcaccccctgggggtattttgatttcaacagattccactgccatttctcaccacgtgactggcagcgactcatcaacaacaattggggattccggcccaagagactcaacttcaagctcttcaacatccaagtcaaggaggtcacgacgaatgatggcgtcacgaccatcgctaataaccttaccagcacggttcaagtcttctcggactcggagtaccagttgccgtacgtcctcggctctgcgcaccagggctgcctccctccgttcccggcggacgtgttcatgattccgcagtacggctacctaacgctcaacaatggcagccaggcagtgggacggtcatccttttactgcctggaatatttcccatcgcagatgctgagaacgggcaataactttaccttcagctacaccttcgaggacgtgcctttccacagcagctacgcgcacagccagagcctggaccggctgatgaatcctctcatcgaccagtacctgtattacctgaacagaactcagaatcagtccggaagtgcccaaaacaaggacttgctgtttagccgggggtctccagctggcatgtctgttcagcccaaaaactggctacctggaccctgttaccggcagcagcgcgtttctaaaacaaaaacagacaacaacaacagcaactttacctggacaggtgcttcaaaatataaccttaatgggcgtgaatctataatcaaccctggcactgctatggcctcacacaaagacgacaaagacaagttctttcccatgagcggtgtcatgatttttggaaaggagagcgccggagcttcaaacactgcattggacaatgtcatgatcacagacgaagaggaaatcaaagccactaaccccgtggccaccgaaagatttgggactgtggcagtcaatctccagaacagcagcacagaccctgcgaccggagatgtgcatgttatgggagccttacctggaatggtgtggcaagacagagacgtatacctgcagggtcctatttgggccaaaattcctcacacggatggacactttcacccgtctcctctcatgggcggctttggacttaagcacccgcctcctcagatcctcatcaaaaacacgcctgttcctgcgaatcctccggcagagttttcggctacaaagtttgcttcattcatcacccagtattccacaggacaagtgagcgtggagattgaatgggagctgcagaaagaaaacagcaaacgctggaatcccgaagtgcagtatacatctaactatgcaaaatctgccaacgttgatttcactgtagacaacaatggactttatactgtgcctcgccccattggcacccgttacctcacccgtcccctgtaa

SEQ ID NO: 1552 - DNA, 2211 bp, synthetic construct
  misc_feature 1..2211: note = Description of Artificial Sequence: Synthetic polynucleotide
  source 1..2211: mol_type = other DNA
atggctgccgatggttatcttccagattggctcgaggacaacctctctgagggcattcgcgagtggtgggcgctgaaacctggagccccgaagcccaaagccaaccagcaaaagcaggacgacggccggggtctggtgcttcctggctacaagtacctcggacccttcaacggactcgacaaaggagagccggtcaacgcggcggacgcggcggccctcgaacacgacaaggcttacgaccagcagctcaaggcgggtgacaacccctacctgcggtataaccacgccgacgccgagttccaggagcggctgcaagaagatacgtcttttgggggcaacctcgggcgagcagtcttccaggccaaaaagaggcttcttgaacctcttggtctggttgaggaaggcgctaagacggctcctggaaagaagaggcctgtagagcagtctcctcaagaaccggactcctcctcgggtattggcaaaacaggtgagcagcccgctaaaaagagactcaattttggtcagactggcgactcagagtcagtccccgacccacaacctctcggagaacctccagcaacccccgctgctgtgggacctactacaatggcttcaggcggtggcgcaccaatggcagacaataacgaaggcgccgacggagtgggtagtgcctcaggaaattggcattgcgattccacatggctgggcgacagagtcatcaccaccagcacccgaacctgggccctgcccacctataacaaccatctctacaagcaaatctccagtgcttcaacgggggccagcaacgacaaccactacttcggctacagcaccccctgggggtattttgacttcaacagattccactgccacttctcaccacgtgactggcagcgactcatcaacaacaactggggattccggcctaagcgactcaacttcaagctcttcaacattcaggtcaaagaggttacggacaacaatggagtcaagaccatcgccaataacctcaccagcaccatccaggtgttcacggactcagagtatcagctgccgtacgtgctcgggtcggctcaccagggctgcctccctccgttcccagcggacgtgttcatgattcctcagtacgggtatctgacactcaacaacggcagtcaggcagtgggacggtcatccttctactgcctggaatattttccatcgcagatgctgagaaccggcaacaactttccgttcagttacaccttcgaggacgtgcctttccacagcagctacgcgcacagccagagcctggaccggctgatgaatcctctgattgaccagtacctgtactacttgtctcggactcaaacaacaggaggcacggcaaatacgcagactctgggcttcagccaaggtgggcctaatacaatggccaatcaggcaaagaactggctgccaggaccctgttaccgccaacaacgcgtctcaacgacaaccgggcaaaacaacaatagcaactttgcctggactgctgggaccaaataccatctgaatggaagaaattcattggctaatcctggcatcgctatggcaacacacaaagacgacaaggagcgtttttttcccagtaacgggatcctgatttttggcaaacaaaatgctgccagagacaatgcggattacagcgatgtcatgctcaccagcgaggaagaaatcaaaaccactaaccctgtggctacagaggaatacggtatcgtggcagataacttgcagcagcaaaacacggctcctcaaattggaactgtcaacagccagggggccttacccggtatggtctggcagaaccgggacgtgtacctgcagggtcccatctgggccaagattcctcacacggacggcaacttccacccgtctccgctgatgggcggctttggcctgaaacatcctccgcctcagatcctgatcaagaacacgcctgtacctgcggatcctccgaccaccttcaaccagtcaaagctgaactctttcatcacgcaatacagcaccggacaggtcagcgtggaaattgaatgggagctgcagaaggaaaacagcaagcgctggaaccccgagatccagtacacctccaactactacaaatctacaagtgtggactttgctgttaatacagaaggcgtgtactctgaaccccaccccattggcacccgttacctcacccgtcccctgtaa

SEQ ID NO: 1553 - DNA, 2211 bp, synthetic construct
  misc_feature 1..2211: note = Description of Artificial Sequence: Synthetic polynucleotide
  source 1..2211: mol_type = other DNA
atggctgccgatggttatcttccagattggctcgaggacaacctctctgagggcattcgcgagtggtgggcgctgaaacctggagccccgaagcccaaagccaaccagcaaaagcaggacgacggccggggtctggtgcttcctggctacaagtacctcggacccttcaacggactcgacaagggggagcccgtcaacgcggcggacgcagcggccctcgagcacgacaaggcctacgaccagcagctcaaagcgggtgacaatccgtacctgcggtataaccacgccgacgccgagtttcaggagcgtctgcaagaagatacgtcttttgggggcaacctcgggcgagcagtcttccaggccaagaagcgggttctcgaacctctcggtctggttgaggaaggcgctaagacggctcctggaaagaaacgtccggtagaacagtcgccacaagagccagactcctcctcgggcatcggcaagacaggccagcagcccgctaaaaagagactcaattttggtcagactggcgactcagagtcagtccccgatccacaacctctcggagaacctccagcaacccccgctgctgtgggacctactacaatggcttcaggcggtggcgcaccaatggcagacaataacgaaggcgccgacggagtgggtagttcctcgggaaattggcattgcgattcccaatggctgggggacagagtcatcaccaccagcacccgaacctgggccctgcccacctacaacaaccacctctacaagcaaatctccagtgcttcaacgggggccagcaacgacaaccactacttcggctacagcaccccctgggggtattttgatttcaacagattccactgccatttctcaccacgtgactggcagcgactcatcaacaacaactggggattccggcctaagcgactcaacttcaagctcttcaacattcaggtcaaagaggttacggacaacaatggagtcaagaccatcgccaataaccttaccagcacggtccaggtcttcacggactcggagtaccagttgccgtacgtcctcggctctgcgcaccaggactgcctccctccgttcccggcggacgtgttcatgattccgcagtacggctacctaacgctcaacaatggcagccaggcagtgggacggtcatccttttactgcctggaatatttcccatcgcagatgctgagaacgggcaacaactttaccttcagctacacctttgaggacgttcctttccacagcagctacgctcacagccagagtctggaccgtctcatgaatcctctgattgaccagtacctgtactacttgtctcggactcaaacaacaggaggcacggcaaatacgcagactctgggcttcagccaaggtgggcctaatacaatggccaatcaggcaaagaactggctgccaggaccctgttaccgccaacaacgcgtctcaacgacaaccggacaaaacaacaatagcaactttgcctggactgctgggaccaaataccatctgaatggaagaaattcattggctaatcctggcatcgctatggcaacacacaaagacgacaaggagcgtttttttcccagtaacgggatcctgatttttggcaaacaaaatgctgccagagacaatgcggattacagcgatgtcatgctcaccagcgaggaagaaatcaaaaccactaaccctgtggctacagaggaatacggtatcgtggcagataacttgcagcagcaaaacacggctcctcaaattggaactgtcaacagccagggggccttacccggtatggtctggcagaaccgggacgtgtacctgcagggtcccatctgggccaagattcctcacacggacggcaacttccacccgtctccgctgatgggcggctttggcctgaaacatcctccgcctcagatcctgatcaagaacacgcctgtacctgcggatcctccgaccaccttcaaccagtcaaagctgaactctttcatcacgcaatacagcaccggacaggtcagcgtggaaattgaatgggagctgcagaaggaaaacagcaagcgctggaaccccgagatccagtacacctccaactactacaaatctacaagtgtggactttgctgttaatacagaaggcgtgtactctgaaccccaccccattggcacccgttacctcacccgtcccctgtaa

SEQ ID NO: 1554 - DNA, 2211 bp, synthetic construct
  misc_feature 1..2211: note = Description of Artificial Sequence: Synthetic polynucleotide
  source 1..2211: mol_type = other DNA
atggctgccgatggttatcttccagattggctcgaggacaacctctctgagggcattcgcgagtggtgggacttgaaacctggagccccgaagcccaaagccaaccagcaaaagcaggacgacggccggggtctggtgcttcctggctacaagtacctcggacccttcaacggactcgacaagggggagcccgtcaacgcggcggacgcagcggccctcgagcacgacaaggcctacgaccagcagctcaaagcgggtgacaatccgtacctgcggtataaccacgccgacgccgagtttcaggagcgtctgcaagaagatacgtcttttgggggcaacctcgggcgagcagtcttccaggccaagaagcgggttctcgaacctctcggtctggttgaggaaggcgctaagacggctcctggaaagaaacgtccggtagagcagtcaccacaagagccagactcctcctcgggcatcggcaagacaggccagcagcccgctaaaaagagactcaattttggtcagactggcgactcagagtcagtccccgacccacaacctctcggagaacctccagcaacccccgctgctgtgggacctactacaatggcttcaggcggtggcgcaccaatggcagacaataacgaaggtgccgacggagtgggtaatgcctcaggaaattggcattgcgattccacatggctgggcgactgagtcatcaccaccagcacccgcacctgggccttgcccacctacaataaccacctctacaagcaaatctccagtgcttcaacgggggccagcaacgacaaccactacttcggctacagcaccccctgggggtattttgatttcaacagattccactgccacttttcaccacgtgactggcagcgactcatcaacaacaattggggattccggcccaagagactcaacttcaaactcttcaacatccaagtcaaggaggtcacgcagaatgaaggcaccaagaccatcgccaataacctcaccagcaccatccaggtgtttacggactcggagtaccagctgccgtacgttctcggctctgcccaccagggctgcctgcctccgttcccggcggacgtgttcatgattccccagtacggctacctaacgctcaacaatggcagccaggcagtgggacggtcatccttttactgcctggaatactttccttcgcagatgctgagaaccggcaacaacttccagtttacttacaccttcgaggacgtgcctttccacagcagctacgcccacagccagagcttggaccggctgatgaatcctctgattgaccagtacctgtactacttgtctcggactcaaacaacaggaggcacggcaaatacgcagactctgggcttcagccaaggtgggcctaatacaatggccaatcaggcaaagaactggctgccaggaccctgttaccgccaacaacgcgtctcaacgacaaccgggcaaaacaacaatagcaactttgcctggactgctgggaccaaataccatctgaatggaagaaattcattggctaatcctggcatcgctatggcaacacacaaagacgacaaggagcgtttttttcccagtaacgggatcctgatttttggcaaacaaaatgctgccagagacaatgcggattacagcgatgtcatactcaccagcgaggaagaaatcaaaaccactaaccctgtggctacagaggaatacggtatcgtggcagataacttgcagcagcaaaacacggctcctcaaattggaactgtcaacagccagggggccttacccggtatggtctggcagaaccgggacgtgtacctgcagggtcccatctgggccaagattcctcacacggacggcaacttccacccgtctccgctgatgggcggctttggcctgaaacatcctccgcctcagatcctgatcaagaacacgcctgtacctgcggatcctccgaccaccttcaaccagtcaaagctgaactctttcatcacgcaatacagcaccggacaggtcagcgtggaaattgaatgggagctgcagaaggaaaacagcaagcgctggaaccccgagatccagtacacctccaactactacaaatctacaagtgtggactttgctgttaatacagaaggcgtgtactctgaaccccaccccattggcacccgttacctcacccgtcccctgtaa

SEQ ID NO: 1555 - DNA, 2211 bp, synthetic construct
  misc_feature 1..2211: note = Description of Artificial Sequence: Synthetic polynucleotide
  source 1..2211: mol_type = other DNA
atggctgccgatggttatcttccagattggctcgaggacactctctctgaaggaataagacagtggtggaagctcaaacctggcccaccaccaccaaagcccgcagagcggcataaggacgacagcaggggtcttgtgcttcctgggtacaagtacctcggacccttcaacggactcgacaagggagagccggtcaacgaggcagacgccgcggccctcgagcacgacaaagcctacgaccggcagctcgacagcggagacaacccgtacctcaagtacaaccacgccgacgcggagtttcaggagcgccttaaagaagatacgtcttttgggggcaacctcgggcgagcagtcttccaggccaagaagagggttctcgaaccttttggtctggttgaggaaggtgctaagacggctcctggaaagaaacgtccggtagagcagtcgccacaagagccagactcctcctcgggcattggcaagacaggccagcagcccgctaaaaagagactcaattttggtcagactggcgactcagagtcagtccccgacccacaacctctcggagaacctccagcaacccccgctgctgtgggacctactacaatggcttcaggcggtggcgcaccaatggcagacaataacgaaggcgccgacggagtgggtaatgcctcaggaaattggcattgcgattccacatggctgggcgacagagtcatcaccaccagcacccgaacatgggccttgcccacctataacaaccacctctacaagcaaatctccagtacttcaacgggggccagtaacgacaaccactacttcggctacagcaccccctgggggtattttgacttcaacagattccactgccacttctcaccacgtgactggcagcgactcatcaacaacaactggggattccggcctaagcgactcaacttcaagctcttcaacattcaggtcaaagaggttacggacaacaatggagtcaagaccatcgccaataaccttaccagcacggtccaggtcttcacggactcggagtaccagttgccgtacgtcctcggctctgcgcaccagggctgcctgcctccgttcccggcggacgtgttcatgattccgcagtacggctacctaacgctcaacaatggcagccaggcagtgggacggtcatccttttactgcctggaatatttcccatcgcagatgctgagaacgggcaacaactttaccttcagctacacttttgaggacgttcctttccacagcagctacgctcacagccagagtctggaccgtctcatgaatcctctgattgaccagtacctgtactacttgtctcggactcaaacaacaggaggcacggcaaatacgcagactctgggcttcagccaaggtgggcctaatacaatggccaatcaggcaaagaactggctgccaggaccctgttaccgccaacaacgcgtctcaacgacaaccggacaaaacaacaatagcaactttgcctggactgctgggaccaaataccatctgaatggaagaaattcattggctaatcctggcatcgctatggcaacacacaaagacgacaaggagcgtttttttcccagtaacgggatcctgatttttggcaaacaaaatgctgccagagacaatgcggattacagcgatgtcatgctcaccagcgaggaagaaatcaaaaccactaaccctgtggctacagaggaatacggtatcgtggcagataacttgcagcagcaaaacacggctcctcaaattggaactgtcaacagccagggggccttacccggtatggtctggcagaaccgggacgtgtacctgcagggtcccatctgggccaagattcctcacacggacggcaacttccacccgtctccgctgatgggcggctttggcctgaaacatcctccgcctcagatcctgatcaagaacacgcctgtacctgcggatcctccgaccaccttcaaccagtcaaagctgaactctttcatcacgcaatacagcaccggacaggtcagcgtggaaattgaatgggagctgcagaaggaaaacagcaagcgctggaaccccgagatccagtacacctccaactactacaaatctacaagtgtggactttgctgttaatacagaaggcgtgtactctgaaccccaccccattggcacccgttacctcacccgtcccctgtaa

SEQ ID NO: 1556 - DNA, 2208 bp, synthetic construct
  misc_feature 1..2208: note = Description of Artificial Sequence: Synthetic polynucleotide
  source 1..2208: mol_type = other DNA
atggctgccgatggttatcttccagattggctcgaggacaacctctctgagggcattcgcgagtggtgggacttgaaacctggagccccgaagcccaaagccaaccagcaaaagcaggacgacggccggggtctggtgcttcctggctacaagtacctcggacccttcaacggactcgacaagggggagcccgtcaacgcggcggatgcagcggccctcgagcacgacaaggcctacgaccggcagctcgacagcggagacaacccgtacctgcggtataaccacgccgacgcggagtttcaggagcgccttaaagaagatacgtcttttgggggcaacctcgggcgagcagtcttccaggccaagaagagggttctcgaaccttttggtctggttgaggaaggtgctaagacggctcctggaaagaaacgtccggtagagcagtcgccacaagagccagactcctcctcgggcattggcaagacaggccagcagcccgctaaaaagagactcaattttggtcagactggcgactcagagtcagtccccgacccacaacctctcggagaacctccagcaacccccgctgctgtgggacctactacaatggcttcaggcggtggcgcaccaatggcagacaataacgaaggcgccgacggagtgggtaatgcctcaggaaattggcattgcgattccacatggctgggcgacagagtcatcaccaccagcacccgcacctgggccttgcccacctacaataaccacctctacaagcaaatctccagtgcttcaacgggggccagcaacgacaaccactacttcggctacagcaccccctgggggtattttgactttaacagattccactgccacttttcaccacgtgactggcaaagactcatcaacaacaactggggattccggcccaagagactcaacttcaagctcttcaacatccaggtcaaggaggtcacgcagaatgaaggcaccaagaccatcgccaataaccttaccagcacgattcaggtctttacggactcggaataccagctcccgtacgtcctcggctctgcgcaccagggctgcctccctccgttcccggcggacgtgttcatgattccgcagtacggctacctaacactcaacaacggtagtcaggccgtgggacgctcctccttctactgcctggaatactttccttcgcagatgctgagaaccggcaacaacttccagtttacttacaccttcgaggacgtgcctttccacagcagctacgcccacagccagagcttggaccggctgatgaatcctctgattgaccagtacctgtactacttgtctcggactcaaacaacaggaggcacggcaaatacgcagactctgggcttcagccaaggtgggcctaatacaatggccaatcaggcaaagaactggctgccaggaccctgttaccgccaacaacgcgtctcaacgacaaccgggcaaaacaacaatagcaactttgcctggactgctgggaccaaataccatctgaatggaagaaattcactggctaatcctggcatcgctatggcaacacacaaagacgacaggagcgtttttttccagtaccgggatcctgattttggcaaacaaaatgctgccagagacaatgcggattacagcgatgtcatgctcaccagcgaggaagaaatcaaaaccactaaccctgtggctacagaggaatacggtatcgtggcagataacttgcagcagcaaaacacggctcctcaaattggaactgtcaacagccagggggccttacccggtatggtctggcagaaccgggacgtgtacctgcagggtcccatctgggccaagattcctcacacggacggcaacttccacccgtctccgctgatgggcggctttggcctgaaacatcctccgcctcagatcctgatcaagaacacgcctgtacctgcggatcctccgaccaccttcaaccagtcaaagctgaactctttcatcacgcaatacagcaccggacaggtcagcgtggaaattgaatgggagctgcagaaggaaaacagcaagcgctggaaccccgagatccagtacacctccaactactacaaatctacaagtgtggactttgctgttaatacagaaggcgtgtactctgaaccccaccccattggcacccgttacctcacccgtcccctgtaa

SEQ ID NO: 1557 - DNA, 2211 bp, synthetic construct
  misc_feature 1..2211: note = Description of Artificial Sequence: Synthetic polynucleotide
  source 1..2211: mol_type = other DNA
atggctgccgatggttatcttccagattggctcgaggacaacctctctgagggcattcgcgagtggtgggcgctgaaacctggagccccgaagcccaaagccaaccagcaaaagcaggacgacggccggggtctggtgcttcctggctacaagtacctcggacccttcaacggactcgacaagggggagcccgtcaacgcggcggatgcagcagccctcgaacacgacaaagcttacgaccagcagctcaaggccggtgacaacccctacctcaagtataaccacgccgacgccgagtttcaggagcgtcttcaaggagatacgtcttttgggggcaacctcggacgagcagtcttccaggccaagaagcgggttctcgaacctcttggtctggttgaggaagcggctaagacggctcctggaaagaagaggcctgtagagcagtctcctcaggaaccggactcctccgcgggtattggcaaatcgggtgcacagcccgctaaaaagagactcaatttcggtcagactggcgacacagagtcagtcccagaccctcaacctctcggagaacctccagcagcgccctctggtgtgggacctaatacaatggctgcaggcggtggcgcaccaatggcagacaataacgaaggtgccgatggagtgggtagttcctcgggaaattggcattgcgattcccaatggctgggggacagagtcatcaccaccagcacccgaacctgggccctgcccacctacaacaaccacctctacaagcaaatctccagtgcttcaacgggggccagcaacgacaaccactacttcggctacagcaccccttgggggtattttgacttcaacagattccactgccacttttcaccacgtgactggcagcgactcatcaacaacaactggggattccggcctaagcgactcaacttcaagctcttcaacattcaggtcaaagaggttacggacaacaatggagtcaagaccatcgccaataaccttaccagcacggtccaggtcttcacggactcagactatcagctcccgtacgtgctcgggtcggctcacgagggctgcctccctccgttcccggcggacgtgttcatgattccgcagtacggctacctaacgctcaacaatggcagccaggcagtgggacggtcatccttttactgcctggaatactttccttcgcagatgctgagaaccggcaacaacttccagtttacttacaccttcgaggacgtgcctttccacagcagctacgctcacagccagagtctggaccgtctcatgaatcctctgattgaccagtacctgtactacttgtctcggactcaaacaacaggaggcacggcaaatacgcagactctgggcttcagccaaggtgggcctaatacaatggccaatcaggcaaagaactggctgccaggaccctgttaccgccaacaacgcgtctcaacgacaaccgggcaaaacaacaatagcaactttgcctggactgctgggaccaaataccatctgaatggaagaaattcattggctaatcctggcatcgctatggcaacacacaaagacgacaaggagcgtttttttcccagtaacgggatcctgatttttggcaaacaaaatgctgccagagacaatgcggattacagcgatgtcatgctcaccagcgaggaagaaatcaaaaccactaaccctgtggctacagaggaatacggtatcgtagcagataacttgcagcagcaaaacacggctcctcaaattggaactgtcaacagccagggggccttacccggtatggtctggcagaaccgggacgtgtacctgcagggtcccatctgggccaagattcctcacacggacggcaacttccacccgtctccgctgatgggcggctttggcctgaaacatcctccgcctcagatcctgatcaagaacacgcctgtacctgcggatcctccgaccaccttcaaccagtcaaagctgaactctttcatcacgcaatacagcaccggacaggtcagcgtggaaattgaatgggagctgcagaaggaaaacagcaagcgctggaaccccgagatccagtacacctccaactactacaaatctacaagtgtggactttgctgttaatacagaaggcgtgtactctgaaccccaccccattggcacccgttacctcacccgtcccctgtaa

SEQ ID NO: 1558 - DNA, 2211 bp, synthetic construct
  misc_feature 1..2211: note = Description of Artificial Sequence: Synthetic polynucleotide
  source 1..2211: mol_type = other DNA
atggctgccgatggttatcttccagattggctcgaggacactctctctgaaggaataagacagtggtggaagctcaaacctggcccaccaccaccaaagcccgcagagcggcataaggacgacagcaggggtcttgtgcttcctgggtacaagtacctcggacccttcaacggactcgacaagggagagccggtcaacgaggcagacgccgcggccctcgagcacgacaaagcctacgaccggcagctcgacagcggagacaacccgtacctcaagtacaaccacgccgacgcggagtttcaggagcgccttaaagaagatacgtcttttgggggcaacctcgggcgagcagtcttccaggccaagaagagggttctcgaaccttttggtctggttgaggaagcggctaagacggctcctggaaagaaacgtccggtagagcagtcgccacaagagccagactcctcctcgggcattggcaagacaggccagcagcccgctaaaaagagactcaattttggtcagactggcgactcagagtcagtccccgacccacaacctctcggagaacctccagcaacccccgctgctgtgggacctactacaatggcttcaggcggtggcgcaccaatggcagacaataacgaaggcgccgacggagtgggtaatgcctcaggaaattggcattgcgattccacatggctgggcgacagagtcatcaccaccagcacccgaacatgggccttgcccacctataacaaccacctctacaagcaaatctccagtgcttcaacgggggccagcaacgacaaccactacttcggctacagcaccccctgggggtattttgacttcaacagattccactgccacttctcaccacgtgactggcagcgactcatcaacaacaactggggattccggcctaagcgactcaacttcaagctcttcaacattcaggtcaaagaggttacggacaacaatggagtcaagaccatcgccaataaccttaccagcacggtccaggtcttcacggactcagactatcagctcccgtacgtgctcgggtcggctcacgagggctgcctcccgccgttcccagcggacgttttcatgattcctcagtacggctacctaacactcaacaacggtagtcaggccgtgggacgctcctccttctactgcctggaatactttccttcgcagatgctgagaacgggcaacaactttaccttcagctacacctttgaggacgttcctttccacagcagctacgctcacagccagagtctggaccgtctcatgaatcctctgattgaccagtacctgtactacttgtctcggactcaaacaacaggaggcacggcaaatacgcagactctgggcttcagccaaggtgggcctaatacaatggccaatcaggcaaagaactggctgccaggaccctgttaccgccaacaacgcgtctcaacgacaaccgggcaaaacaacaatagcaactttgcctggactgctgggacaaaataccatctgaatggaagaaattcattggctaatcctggcatcgctatggcaacacacaaagacgacaaggagcgtttttttcccagtaacgggattctgatttttggcaaacaaaatgctgccagagacaatgcggattacagcgatgtcatgctcaccagcgaggaagaaatcaaaaccactaaccctgtggctacagaggaatacggtatcgtggcagataacttgcagcagcaaaacacggctcctcaaattggaactgtcaacagccagggggccttacccggtatggtctggcagaaccgggacgtgtacctgcagggtcccatctgggccaagattcctcacacggacggcaacttccacccgtctccgctgatgggcggctttggacttaagcacccgcctcctcagatcctcatcaaaaacacgcctgttcctgcggatcctccgaccaccttcaaccagtcaaagctgaactctttcatcacgcaatacagcaccggacaggtcagcgtggaaattgaatgggagctgcagaaggaaaacagcaagcgctggaaccccgagatccagtacacctccaactactacaaatctacaagtgtggactttgctgttaatacagaaggcgtgtactctgaaccccaccccattggcacccgttacctcacccgtcccctgtaa

SEQ ID NO: 1559 - DNA, 2211 bp, synthetic construct
  misc_feature 1..2211: note = Description of Artificial Sequence: Synthetic polynucleotide
  source 1..2211: mol_type = other DNA
atggctgccgatggttatcttccagattggctcgaggacaacctctctgagggcattcgcgagtggtgggcgctgaaacctggagccccgaagcccaaagccaaccagcaaaagcaggacgacggccggggtctggtgcttcctggctacaagtacctcggacccttcaacggactcgacaaaggagagccggtcaacgcggcggacgcagcggccctcgagcacgacaaggcctacgaccagcagctcaaagcgggtgacaatccgtacctgcggtataaccacgccgacgccgagtttcaggagcgtctgcaagaagatacgtcttttgggggcaacctcgggcgagcagtcttccaggccaagaagcgggttctcgaacctctcggtctggttgaggaaggcgctaagacggctcctggaaagaaacgtccggtagagcagtcgccacaagagccagactcctcctcgggcatcggcaagacaggccagcagcccgctaaaaagagactcaattttggtcagactggcgactcagagtcagtccccgacccacaacctctcggagaacctccagcaacccccgctgctgtgggacctactacaatggcttcaggcggtggcgcaccaatggcagacaataacgaaggcgccgacggagtgggtagttcctcgggaaattggcattgcgattccacatggctgggcgacagagtcatcaccaccagcacccgcacctgggccttgcccacctacaataaccacctctacaagcaaatctccagtgcttcaacgggggccagcaacgacaaccactacttcggctacagcaccccctgggggtattttgacttcaacagattccactgccacttctcaccacgtgactggcagcgactcatcaacaacaactggggattccggcctaagcgactcaacttcaagctcttcaacattcaggtcaaagaggttacggacaacaatggagtcaagaccatcgccaataaccttaccagcacggtccaggtcttcacggactcggagtaccagttgccgtacgtcctcggctctgcgcaccagggctgcctccctccgttcccggcggacgtgttcatgattccgcagtacggctacctaacgctcaacaatggcagccaggcagtgggacggtcatccttttactgcctggaatatttcccatcgcagatgctgagaacgggcaacaactttaccttcagctacacctttgaggacgttcctttccacagcagctacgctcacagccagagtctggaccgtctcatgaatcctctgattgaccagtacctgtactacttgtctcggactcaaacaacaggaggcacggcaaatacgcagactctgggcttcagccaaggtgggcctaatacaatggccaatcaggcaaagaactggctgccaggaccctgttaccgccaacaacgcgtctcaacgacaaccgggcaaaacaacaatagcaactttgcctggactgctgggaccaaataccatctgaatggaagaaattcattggctaatcctggcatcgctatggcaacacacaaagacgacaaggagcgtttttttcccagtaacgggatcctgatttttggcaaacaaaatgctgccagagacaatgcggattacagcgatgtcatgctcaccagcgaggaagaaatcaaaaccactaaccctgtggctacagaggaatacggtatcgtggcagataacttgcagcagcaaaacacggctcctcaaattggaactgtcaacagccagggggccttacccggtatggtctggcagaaccgggatgtgtacctgcagggtcccatctgggccaagattcctcacacggacggcaacttccacccgtctccgctgatgggcggctttggcctgaaacatcctccgcctcagatcctgatcaagaacacgcctgtacctgcggatcctccgaccaccttcaaccagtcaaagctgaactctttcatcacgcaatacagcaccggacaggtcagcgtggaaattgaatgggagctgcagaaggaaaacagcaagcgctggaaccccgagatccagtacacctccaactactacaaatctacaagtgtggactttgctgttaatacagaaggcgtgtactctgaaccccaccccattggcacccgttacctcacccgtcccctgtaa

SEQ ID NO: 1560 - DNA, 2214 bp, synthetic construct
  misc_feature 1..2214: note = Description of Artificial Sequence: Synthetic polynucleotide
  source 1..2214: mol_type = other DNA
atggctgccgatggttatcttccagattggctcgaggacaaccttagtgaaggaattcgcgagtggtgggcgctgaaacctggagccccgaagcccaaagccaaccagcaaaagcaggacgacggccggggtctggtgcttcctggctacaagtacctcggacccttcaacggactcgacaagggggagcccgtcaacgcggcggacgcagcggccctcgagcacgacaaggcctacgaccagcagctcaaagcgggtgacaatccgtacctgcggtataaccacgccgacgccgagtttcaggagcgtctgcaagaagatacgtcttttgggggcaacctcgggcgagcagtcttccaggccaagaagcgggttctcgaacctctcggtctggttgaggaaggcgctaagacggctcctggaaagaaacgtccggtagagcagtcgccacaagagccagactcctcctcgggcatcggcaagacaggccagcagcccgctaaaaagagactcaatttcggtcagactggcgacacagagtcagtcccagaccctcaaccaatcggagaacctcccgcagccccctcaggtgtgggatctcttacaatggcttcaggtggtggcgcaccagtggcagacaataacgaaggtgccgatggagtgggtagttcctcgggaaattggcattgcgattcccaatggctgggggacagagtcatcaccaccagcaccagaacctgggccttgcccacctacaataaccacctctacaagcaaatctccaacagcacatctggaggatcttcaaatgacaacgcctacttcggctacagcaccccctgggggtattttgactttaacagattccactgccacttttcaccacgtgactggcagcgactcatcaacaacaactggggattccgacccaagagactcaacttcaagctcttcaacatccaggtcaaggaggtcacgcagaacgaaggcaccaagaccatcgccaataacctcaccagcaccatccaggtgtttacggactcggagtaccagctgccgtacgttctcggctccgcccaccagggctgcctgcctccgttcccggcggacgtgttcatgattccccagtacggctacctaacgctcaacaacggtagtcaggccgtgggacgctcctccttctactgcctggaatactttccttcgcagatgctgagaaccggcaacaacttccagtttacttacaccttcgaggacgtgcctttccacagcagctacgcgcacagccagagcttggaccggctgatgaatcctctgattgaccagtacctgtactacttgtctcggactcaaacaacaggaggcacggcaaatacgcagactctgggcttcagccaaggtgggcctaatacaatggccaatcaggcaaagaactggctgccaggaccctgttaccgccaacaacgcgtctcaacgacaaccgggcaaaacaacaatagcaactttgcctggactgctgggaccaaataccatctgaatggaagaaattcattggctaatcctggcatcgctatggcaacacacaaagacgacaaggagcgtttttttcccagtaacgggatcctgatttttggcaaacaaaatgctgccagagacaatgcggattacagcgatgtcatgctcaccagcgaggaagaaatcaaaaccactaaccctgtggctacagaggaatacggtatcgtggcagataacttgcagcagcaaaacacggctcctcaaattggaactgtcaacagccagggggccttacccggtatggtctggcagaaccgggacgtgtacctgcagggtcccatctgggccaagattcctcacacggacggcaacttccacccgtctccgctgatgggcggctttggcctgaaacatcctccgcctcagatcctgatcaagaacacgcctgtacctgcggatcctccgaccaccttcaaccagtcaaagctgaactctttcatcacgcaatacagcaccggacaggtcagcgtggaaattgaatgggagctgcagaaggaaaacagcaagcgctggaaccccgagatccagtacacctccaactactacaaatctacaagtgtggactttgctgttaatacagaaggcgtgtactctgaaccccaccccattggcactcgttacctcacccgtcccctgtaa

SEQ ID NO: 1561 - DNA, 2211 bp, synthetic construct
  misc_feature 1..2211: note = Description of Artificial Sequence: Synthetic polynucleotide
  source 1..2211: mol_type = other DNA
atggctgccgatggttatcttccagattggctcgaggacaacctctctgagggcattcgcgagtggtgggcgctgaaacctggagccccgaagcccaaagccaaccagcaaaagcaggacgacggccggggtctggtgcttcctggctacaagtacctcggacccttcaacggactcgacaagggggagcccgtcaacgcggcggatgcagcagccctcgaacacgacaaagcttacgaccagcagctcaaggccggtgacaacccctacctcaagtataaccacgccgacgccgagtttcaggagcgtcttcaaggagatacgtcttttgggggcaacctcggacgagcagtcttccaggccaagaagcgggttctcgaacctcttggtctggttgaggaagcggctaagacggctcctggaaagaagaggcctgtagagcagtctcctcaggaaccggactcctccgcgggtattggcaaatcgggtgcacagcccgctaaaaagagactcaatttcggtcagactggcgacacagagtcagtcccagaccctcaacctctcggagaacctccagcagcgccctctggtgtgggacctaatacaatggctgcaggcggtggcgcaccaatggcagacaataacgaaggtgccgatggagtgggtagttcctcgggaaattggcattgcgattcccaatggctgggggacagagtcatcaccaccagcacccgaacctgggccctgcccacctacaacaaccacctctacaagcaaatctccagtgcttcaacgggggccagcaacgacaaccactacttcggctacagcaccccttgggggtattttgacttcaacagattccactgccacttctcaccacgtgactggcagcgactcatcaacaacaactggggattccggcctaagcgactcaacttcaagctcttcaacattcaggtcaaagaggttacggacaacaatggagtcaagaccatcgccaataaccttaccagcacggtccaggtcttcacggactcggagtaccagttgccgtacgtcctcggctctgcgcaccagggctgcctccctccgttcccggcggacgtgttcatgattccgcagtacggctacctaacgctcaacaatggcagccaggcagtgggacggtcatccttttactgcctggaatatttcccatcgcagatgctgagaacgggcaacaactttaccttcagctacacctttgaggacgttcctttccacagcagctacgctcacagccagagtctggaccgtctcatgaatcctctgattgaccagtacctgtactacttgtctcggactcaaacaacaggaggcacggcaaatacgcagactctgggcttcagccaaggtgggcctaatacaatggccaatcaggcaaagaactggctgccaggaccctgttaccgccaacaacgcgtctcaacgacaaccgggcaaaacaacaatagcaactttgcctggactgctgggaccaaataccatctgaatggaagaaattcattggctaatcctggcatcgctatggcaacacacaaagacgacaaggagcgtttttttcccagtaacgggatcctgatttttgacaaacaaaatgctgccagagacaatgcggattacagcgatgtcatgctcaccagcgaggaagaaatcaaaaccactaaccctgtggctacagaggaatacggtatcgtggcagataacttgcagcagcaaaacacggctcctcaaattggaactgtcaacagccagggggccttacccggtatggtctggcagaaccgggatgtgtacctgcagggtcccatctgggccaagattcctcacacggacggcaacttccacccgtctccgctgatgggcggctttggcctgaaacatcctccgcctcagatcctgatcaagaacacgcctgtacctgcggatcctccgaccaccttcaaccagtcaaagctgaactctttcatcacgcaatacagcaccggacaggtcagcgtggaaattgaatgggagctgcagaaggaaaacagcaagcgctggaaccccgagatccagtacacctccaactactacaaatctacaagtgtggactttgctgttaatacagaaggcgtgtactctgaaccccaccccattggcacccgttacctcacccgtcccctgtaa

SEQ ID NO: 1562 - DNA, 2211 bp, synthetic construct
  misc_feature 1..2211: note = Description of Artificial Sequence: Synthetic polynucleotide
  source 1..2211: mol_type = other DNA
atggctgccgatggttatcttccagattggctcgaggacactctctctgaaggaataagacagtggtggaagctcaaacctggcccaccaccaccaaagcccgcagagcggcataaggacgacagcaggggtcttgtgcttcctgggtacaagtacctcggacccttcaacggactcgacaagggagagccggtcaacgaggcagacgccgcggccctcgagcacgacaaagcctacgaccggcagctcgacagcggagacaacccgtacctcaagtacaaccacgccgacgcggagtttcaggagcgccttaaagaagatacgtcttttgggggcaacctcggacgagcagtcttccaggcgaaaaagagggttcttgaacctctgggcctggttgaggaacctgttaagacggctccgggaaaaaagaggccggtagagcactctcctgtggagccagactcctcctcgggaaccggaaaggcgggccagcagcctgcaagaaaaagattgaattttggtcagactggcgactcagagtcagtccccgacccacaacctctcggagaacctccagcaacccccgctgctgtgggacctaatacgatggctacaggcagtggcgcaccaatggcagacaataacgagggcgccgacggagtgggtaattcctcgggaaattggcattgcgattccacatggatgggcgacagagtcatcaccaccagcaccagaacctgggccctgcccacttacaacaaccatctctacaagcaaatctccagtgcttcaacgggggccagcaacgacaaccactacttcggctacagcaccccctgggggtattttgacttcaacagattccactgccacttctcaccacgtgactggcagcgactcatcaacaacaactggggattccggcctaagcgactcaacttcaagctcttcaacattcaggtcaaagaggttacggacaacaatggagtcaagaccatcgccaataaccttaccagcaccatccaggtctttacggactcggaataccagctgccgtacgttctcggctctgcccaccagggctgcctgcctccgttcccggcggacgtgttcatgattccccagtacggctacctaacactcaacaacggtagtcaggccgtgggacgctcctccttctactgcctggaatatttcccatcgcagatgctgagaacgggcaacaactttaccttcagctacacctttgaggacgttcctttccacagcagctacgctcacagccagagtctggaccgtctcatgaatcctctgattgaccagtacctgtactacttgtctcggactcaaacaacaggaggcaaggcaaatacgcagactctgggcttcagccaaggtgggcctaatacaatggccaatcaggcaaagaactggctgccaggaccctgttaccgccaacaacgcgtctcaacgacaaccgggcaaaacaacaatagcaactttgcctggactgctgggaccaaataccatctgaatggaagaaattcattggctaatcctggcatcgctatggcaacacacaaagacgacaaggagcgtttttttcccagtaacgggatcctgatttttggcaaacaaaatgctgccagagacaatgcggattacagcgatgtcatgctcaccagcgaggaagaaatcaaaaccactaaccctgtggctacagaggaatacggtatcgtggcagataacttgcagcagcaaaacacggctcctcaaattggaactgtcaacagccagggggccttacccggtatggtctggcagaaccgggacgtgtacctgcagggtcccatctgggccaagattcctcacacggacggcaacttccacccgtctccgctgatgggcggctttggcctgaaacatcctccgcctcagatcctgatcaagaacacgcctgtacctgcggatcctccgaccaccttcaaccagtcaaagctgaactctttcatcacgcaatacagcaccggacaggtcagcgtggaaattgaatgggagctgcagaaggaaaacagcaagcgctggaaccccgagatccagtacacctccaactactacaaatctacaagtgtggactttgctgttaatacagaaggcgtgtactctgaaccccaccccattggcacccgttacctcacccgtcccctgtaa

SEQ ID NO: 1563 - DNA, 2211 bp, synthetic construct
  misc_feature 1..2211: note = Description of Artificial Sequence: Synthetic polynucleotide
  source 1..2211: mol_type = other DNA
atggctgccgatggttatcttccagattggctcgaggacaacctctctgagggcattcgcgagtggtgggcgctgaaacctggagccccgaagcccaaagccaaccagcaaaagcaggacgacggccggggtctggtgcttcctggctacaagtacctcggacccttcaacggactcgacaagggggagcccgtcaacgcggcggacgcagcggccctcgagcacgacaaggcctacgaccagcagctcaaagcgggtgacaatccgtacctgcggtataaccacgccgacgccgagtttcaggagcgtctgcaagaagatacgtcttttgggggcaacctcgggcgagcagtcttccaggccaagaagcgggttctcgaaccttttggtctggttgaggaaggtgctaagacggctcctggaaagaaacgtccggtagagcagtcgccacaagagccagactcctcctcgggcatcggcaagacaggccagcagcccgctaaaaagagactcaattttggtcagactggcgactcagagtcagtccccgacccacaacctctcggagaacctccagcaacccccgctgctgtgggacctactacaatggcttcaggcggtggcgcaccaatggcggacaataacgaaggcgccgacggagtgggtaatgcctcaggaaattggcattgcgattccacatggctgggcgacagagtcatcaccaccagcacccgcacctgggccttgcccacctacaataaccacctctacaagcaaatctccagtgcttcaacgggggccagcaacgacaaccactacttcggctacagcaccccctgggggtattttgacttcaacagattccactgccacttttcaccacgtgactggcaaagactcatcaacaacaactggggattccggcctaagcgactcaacttcaagctcttcaacattcaggtcaaagaggttacggacaacaatggagtcaagaccatcgccaataaccttaccagcacggtccaggtcttcacggactcggagtaccagttgccgtacgtcctcggctctgcgcaccagggctgcctccctccgttcccggcggacgtgttcatgattccgcagtacggctacctaacgctcaacaatggcagccaggcagtgggacggtcatccttttactgcctggaatatttcccatcgcagatgctgagaacgggcaacaactttaccttcagctacacctttgaggacgttcctttccacagcagctacgctcacagccagagtctggaccgtctcatgaatcctctgattgaccagtacctgtactacttgtctcggactcaaacaacaggaggcacgggaaatacgcagactctgggcttcagccaaggtgggcctaatacaatggccaatcaggcaaagaactggctgccaggaccctgttaccgccaacaacgcgtctcaacgacaaccgggcaaaacaacaatagcaactttgcctggactgctgggaccaaataccatctgaatggaagaaattcattggctaatcctggcatcgctatggcaacacacaaagacgacaaggagcgtttttttcccagtaacgggatcctgatttttggcaaacaaaatgctgccagagacaatgcggattacagcgatgtcatgctcaccagcgaggaagaaatcaaaaccactaaccctgtggctacagaggaatacggtatcgtggcagataacttgcagcagcaaaacacggctcctcaaattggaactgtcaacagccagggggccttacccggtatggtctggcagaaccgggacgtgtacctgcagggtcccatctgggccaagattcctcacacggacggcaacttccacccgtctccgctgatgggcggctttggcctgaaacatcctccgcctcagatcctgatcaagaacacgcctgtacctgcggatcctccgaccaccttcaaccagtcaaagctgaactctttcatcacgcaatacagcaccggacaggtcagcgtggaaattgaatgggagctgcagaaggaaaacagcaagcgctggaaccccgagatccagtacacctccaactactacaaatctacaagtgtggactttgctgttaatacagaaggcgtgtactctgaaccccaccccattggcacccgttacctcacccgtcccctgtaa

SEQ ID NO: 1564 - DNA, 2211 bp, synthetic construct
  misc_feature 1..2211: note = Description of Artificial Sequence: Synthetic polynucleotide
  source 1..2211: mol_type = other DNA
atggctgccgatggttatcttccagattggctcgaggacaacctctctgagggcattcgcgagtggtgggacttgaaacctggagccccgaaacccaaagccaaccagcaaaagcaggacgacggccggggtctggtgcttcctggctacaagtacctcggacccttcaacggactcgacaagggggagcccgtcaacgcggcggacgcagcggccctcgagcacgacaaggcctacgaccagcagctcaaagcgggtgacaatccgtacctgcggtataaccacgccgacgccgagtttcaggagcgtctgcaagaagatacgtcttttgggggcaacctcgggcgagcagtcttccaggccaagaagcgggttctcgaacctctcggtctggttgaggaaggcgctaagacggctcctggaaagaagaggcctgtagagcagtcgccacaagagccagactcctcctcgggcatcggcaagacaggccagcagcccgctaaaaagagactcaattttggtcagactggcgactcagagtcagtccccgatccacaacctctcggagaacctccagcaacccccgctgctgtgggacctactacaatggcttcaggcggtggcgcaccaatggcagacaataacgaaggcgccgacggagtgggtagttcctcgggaaattggcattgcgattccacatggctgggcgacagagtcatcaccaccagcacccgaacatgggccttgcccacctataacaaccacctctacaagcaaatctccagtgcttcaacgggggccagcaacgacaaccactacttcggctacagcaccccctgggggtattttgacttcaacagattccactgccacttctcaccacgtgactggcagcgactcatcaacaacaactggggattccggcctaagcgactcaacttcaagctcttcaacatccaggtcaaggaggtcacgcagaatgaaggcaccaagaccatcgccaataacctcaccagcaccatccaggtgtttacggactcggagtaccagcttccgtacgtcctcggctctgcgcaccagggctgcctccctccgttcccggcggacgtgttcatgattccgcagtacggctacctaacgctcaacaatggcagccaggcagtgggacggtcatccttttactgcctggaatatttcccatcgcagatgctgagaacgggcaacaactttaccttcagctacacctttgaggacgttcctttccacagcagctacgcgcacagccagagcttggaccggctgatgaatcctctgattgaccagtacctgtactacttgtctcggactcaaacaacaggaggcacggcaaatacgcagactctgggcttcagccaaggtgggcctaatacaatggccaatcaggcaaagaactggctgccaggaccctgttaccgccaacaacgcgtctcaacgacaaccgggcaaaacaacaatagcaactttgcctggactgctgggaccaaataccatctgaatggaagaaattcattggctaatcctggcatcgctatggcaacacacaaagacgacaaggagcgtttttttcccagtaacgggatcctgatttttggcaaacaaaatgctgccagagacaatgcggattacagcgatgtcatgctcaccagcgaggaagaaatcaaaaccactaaccctgtggctacagaggaatacggtatcgtggcagataacttgcagcagcaaaacacggctcctcaaattggaactgtcaacagccagggggccttacccggtatggtctggcagaaccgggacgtgtacctgcagggtcccatctgggccaagattcctcacacggacggcaacttccacccgtctccgctgatgggcggctttggcctgaaacatcctccgcctcagatcctgatcaagaacacgcctgtacctgcggatcctccgaccaccttcaaccagtcaaagctgaactctttcatcacgcaatacagcaccggacaggtcagcgtggaaattgaatgggagctgcagaaggaaaacagcaagcgctggaaccccgagatccagtacacctccaactactacaaatctacaagtgtggactttgctgttaatacagaaggcgtgtactctgaaccccaccccattggcacccgttacctcacccgtcccctgtaa

SEQ ID NO: 1565 - DNA, 2211 bp, synthetic construct
  misc_feature 1..2211: note = Description of Artificial Sequence: Synthetic polynucleotide
  source 1..2211: mol_type = other DNA
atggctgccgatggttatcttccagattggctcgaggacaacctctctgagggcattcgcgagtggtgggcgctgaaacctggagccccgaagcccaaagccaaccagcaaaagcaggacgacggccggggtctggtgcttcctggctacaagtacctcggacccttcaacggactcgacaagggggagcccgtcaacgcggcggatgcagcggccctcgagcacgacaaggcctacgaccagcagctcaaagcgggtgacaatccgtacctgcggtataaccacgccgacgccgagtttcaggagcgtctgcaagaagatacgtcttttgggggcaacctcgggcgagcagtcttccaggccaagaagcgggttctcgaacctctcggtctggttgaggaaggcgctaagacggctcctggaaagaaacgtccggtagagcagtcgccacaagagccagactcctcctcgggcatcggcaagacaggccagcagcccgctaaaaagagactcaattttggtcagactggcgactcagagtcagtccccgacccacaacctctcggagaacctccagcaacccccgctgctgtgggacctactacaatggctgcaggcggtggcgcaccaatggcagacaataacgaaggcgccgacggagtgggtagttcctcgggaaattggcattgcgattccacatggatgggcgacagagtcatcaccaccagcacccgaacctgggccttgcccacctataacaaccatctctacaagcaaatctccagtgcttcaacgggggccagcaacgacaaccactacttcggctacagcaccccctgggggtattttgacttcaacagattccactgccacttctcaccacgtgactggcagcgactcatcaacaacaactggggattccggcccaagagactcagcttcaagctcttcaacatccaggtcaaggaggtcacgcagaatgaaggcaccaagaccatcgccaataacctcaccagcaccatccaggtgtttacggactcggagtaccagctgccgtacgtcctcggctctgcgcaccagggctgcctccctccgttcccggcggacgtgttcatgattccgcagtacggctacctaacgctcaacaatggcagccaggcagtgggacggtcatccttttactgcctggaatatttcccatcgcagatgctgagaacgggcaacaactttaccttcagctacacctttgaggacgttcctttccacagcagctacgctcacagccagagcttggaccggctgatgaatcctctgattgaccagtacctgtactacttgtctcggactcaaacaacaggaggcacggcaaatacgcagactctgggtttcagccaaggtgggcctaatacaatggccaatcaggcaaagaactggctgcaaggaccctgttaccgccaacaacgcgtctcaacgacaaccgggcaaaacaacaatagcaactttgcctggactgctgggaccaaataccatctgaatggaagaaattcattggctaatcctggcatcgctatggcaacacacaaagacgacaaggagcgtttttttcccagtaacgggatcctgatttttggcaaacaaaatgctgccagagacaatgcggattacagcgatgtcatgctcaccagcgaggaagaaatcaaaaccactaaccctgtggctacagaggaatacggtatcgtggcagataacttgcagcagcaaaacacggctcctcaaattggaactgtcaacagccagggggccttacccggtatggtctggcagaacctggacgtgtacctgcagggtcccatctgggccaagattcctcacacggacggcaacttccacccgtctccgctgatgggcggctttggcctgaaacatcctccgcctcagatcctgatcaagaacacgcctgtacctgcggatcctccgaccaccttcaaccagtcaaagctgaactctttcatcacgcaatacagcaccggacaggtcagcgtggaaattgaatgggagctgcagaaggaaaacagcaagcgctggaaccccgagatccagtacacctccaactactacaaatctacaagtgtggactttgctgttaatacagaaggcgtgtactctgaaccccaccccattggcacccgttacctcacccgtcccctgtaa

SEQ ID NO: 1566 - DNA, 2214 bp, synthetic construct
  misc_feature 1..2214: note = Description of Artificial Sequence: Synthetic polynucleotide
  source 1..2214: mol_type = other DNA
atggctgccgatggttatcttccagattggctcgaggacaacctctctgagggcattcgcgagtggtgggcgctgaaacctggagccccgaagcccaaagccaaccagcaaaagcaggacgacggccggggtctggtgcttcctggctacaagtacctcggacccttcaacggactcgacaagggagagcccgtcaacgcggcggacgcagcggccctcgagcacgacaaggcctacgaccagcagctcaaagcgggtgacaatccgtacctgcggtataaccacgccgacgccgagtttcaggagcgtctgcaagaagatacgtcttttgggggcaacctcgggcgagcagtcttccaggccaagaagcgggttctcgaacctctcggtctggttgaggaaggcgctaagacggctcctggaaagaagagaccggtagagccatcaccccagcgttctccagactcctcctcgggcatcggcaagacaggccagcagcccgctaaaaagagactcaattttggtcagactggcgactcagagtcagtccccgacccacaacctctcggagaacctccagcaacccccgctgctgtgggacctactacaatggcttcaggtggtggcgcaccaatggcagacaataacgaaggcgccgacggagtgggtaatgcctcaggaaattggcattgcgattcccaatggctgggcgacagagtcatcaccaccagcacccgaacatgggccttgcccacctataacaaccacctctacaagcaaatctccagtgcttcaacgggggccagcaacgacaaccactacttcggctacagcaccccctgggggtattttgacttcaacagattccactgccacttttcaccacgtgactggcagcgactcatcaacaacaactggggattccggcctaagcgactcaacttcaagctcttcaacattcaggtcaaagaggttacggacaacaatggagtcaagaccatcgccaataaccttaccagcacggtccaggtcttcacggactcagactatcagctcccgtacgtgctcgggtcggctcacgagggctgcctcccgccgttcccagcggacgttttcatgattccccagtacggctacctaacactcaacaacggtagtcaggccgtgggacgctcctccttctactgcctggaatactttccttcgcagatgctgagaaccggcaacaacttccagtttacttacaccttcgaggacgtgcctttccacagcagctacgctcacagccagagcttggaccggctgatgaatcctctgattgaccagtacctgtactacttgtctcggactcaaacaacaggaggcacggcaaatacgcagactttgggcttcagccaaggtgggcctaatacaatggccaatcaggcaaagaactgggtgccaggaccctgttaccgccaacaacgggtttcaacggcaaccgggcaaaacaacaatagcaactttgcctggactgctgggaccaaataccatctgaaaggaagaaattcattggctaatcctggcatcgctatggcaacacacaaagacgacaaggagcgtttttttcccagtaacgggatcctgatttttggcaaacaaaatgctgccagagacaatgcggattacagcgatgtcatgctcaccagcgaggaagaaatcaaaaccactaaccctgtggctacagaggaatacggtatcgtggcagataacttgcagcagcaaaacacggctcctcaaattggaactgtcaacagccagggggccttacccggtatggtctggcagaaccgggacgtgtacctgcagggtcccatctgggccaagattcctcacacggacggcaacttccacccgtctccgctgatgggcggctttggcctgaaacatcctccgcctcagatcctgatcaagaacacgcctgtacctgcggatcctccgaccaccttcaaccagtcaaagctgaactctttcatcacgcaatacagcaccggacaggtcagcgtggaaattgaatgggagctgcagaaggaaaacagcaaacgctggaacccagagattcaatacacttccaactactacaaatctacaagtgtggactttgctgttaatacagaaggcgtgtactctgaaccccaccccattggcacccgttacctcacccgtcccctgtaa

SEQ ID NO: 1567 - DNA, 2214 bp, synthetic construct
  misc_feature 1..2214: note = Description of Artificial Sequence: Synthetic polynucleotide
  variation 676: note = n is a, c, g, or t
  variation 697: note = n is a, c, g, or t
  variation 715: note = n is a, c, g, or t
  variation 748: note = n is a, c, g, or t
  variation 750: note = n is a, c, g, or t
  variation 757: note = n is a, c, g, or t
  variation 763: note = n is a, c, g, or t
  source 1..2214: mol_type = other DNA
atggctgccgatggttatcttccagattggctcgaggacactctctctgaaggaataagacagtggtggaagctcaaacctggcccaccaccaccaaagcccgcagagcggcataaggacgacagcaggggtcttgtgcttcctgggtacaagtacctcggacccttcaacggactcgacaagggagagccggtcaacgaggcagacgccgcggccctcgagcacgacaaagcctacgaccggcagctcgacagcggagacaacccgtacctcaagtacaaccacgccgacgcggagtttcaggagcgccttaaagaagatacgtcttttgggggcaacctcggacgagcagtcttccaggcgaaaaagagggttcttgaacctctcggtctggttgaggaaggcgctaagacggctcctggaaagaaacgtccggtagagcagtcgccacaagagccagactcctcctcgggcatcggcaagacaggccagcagcccgctaaaaagagactcaattttggtcagactggcgactcagagtcagtccccgacccacaacctctcggagaacctccagcaacgccctctggtgtgggacctaatacaatggctgcaggcggtggcgctccaatggcagacaataacgaaggcgccgacggagtgggtagttcctcangaaattggcattgcgattccncatggctgggcgacagantcatcaccaccagcacccgaacctgggccctgncnacctacnacaacnacctctacaagcaaatctccaacagcacatctggaggagccaccaacgacaacacctacttcggctacagcaccccctgggggtattttgactttaacagattccactgccacttttcaccacgtgactggcagcgactcatcaacaacaactggggattccggcctaagcgactcaacttcaagctcttcaacatccaggtcaaggaggtcacgcagaatgaaggcaccaagaccatcgccaataacctcaccagcaccatccaggtgtttacggactcggagtaccagctgccgtacgttctcggctctgcccaccagggctgcctgcctccgttcccggcggacgtgttcatgattccccagtacggctacctaacactcaacaacggtagtcaggccgtgggacgctcctccttctactgcctggaatactttccttcgcagatgctgagaaccggcaacaacttccagtttacttacaccttcgaggacgtgcctttccacagcagctacgcccacagccagagcttggaccggctgatgaatcctctgattgaccagtacctgtactacttgtctcggactcaaacaacaggaggcacggcaaatacgcagactctgggcttcagccaaggtgggcctaatacaatggccaatcaggcaaagaactggctgccaggaccctgttaccgccaacaacgcgtctcaacgacaaccgggcaaaacaacaatagcaactttgcctggactgctgggaccaaataccatctgaatggaagaaattcattggctaatcctggcatcgctatggcaacacacaaagacgacaaggagcgtttttttcccagtaacgggatcctgatttttggcaaacaaaatgctgccagagacaatgcggattacagcgatgtcatgctcaccagcgaggaagaaatcaaaaccactaaccctgtggctacagaggaatacggtatcgtggcagataacttgcagcagcaaaacacggctcctcaaattggaactgtcaacagccagggggccttacccggtatggtttggcagaaccgggacgtgtacctgcagggtcctatctgggccaagattcctcacacggacggaaactttcatccctcgccgctgatgggaggctttggactgaaacacccgcctcctcagatcctgattaagaatacacctgttcccgcggatcctccaactaccttcagtcaagctaagctggcgtcgttcatcacgcaatacagcacaggacaagtgagtgtggaaattgaatgggagctgcagaaagaaaacagcaagcgctggaatcccgaagtgcagtacacatccaattatgcaaaatctgccaacgttgattttactgtggacaacaatggactttatactgagcctcgccccattggcacccgttaccttacccgtcccctgtaa

SEQ ID NO: 1568 - DNA, 2214 bp, synthetic construct
  misc_feature 1..2214: note = Description of Artificial Sequence: Synthetic polynucleotide
  source 1..2214: mol_type = other DNA
atggctgccgatggttatcttccagattggctcgaggacaacctctctgagggcattcgcgagtggtgggacttgaaacctggagccccgaagcccaaagccaaccagcaaaagcaggacgacggccggggtctggtgcttcctggctacaagtacctcggacccttcaacggactcgacaagggggagcccgtcaacgcggcggacgcagcggccctcgagcacgacaaggcctacgaccagcagctcaaagcgggtgacaatccgtacctgcggtataaccacgccgacgccgagtttcaggagcgtctgcaagaagatacgtcttttgggggcaacctcgggcgagcagtcttccaggccaagaagcgggttctcgaacctctcggtctggttgaggaaggcgctaagacggctcctggaaagaagagaccggtagagccatcaccccagcgttctccagactcctctacgggcatcggcaagaaaggccagcagcccgcgaaaaagagactcaactttgggcagactggcgactcagagtcagtgcccgaccctcaaccaatcggagaaccccccgcaggcccctctggtgtgggatctcttacaatggcttcaggtggtggcgcaccagtggcagacaataacgaaggtgccgatggagtgggtagttcctcgggaaattggcattgcgattcccaatggctgggggacagagtcatcaccaccagcacccgaacatgggccttgcccacctataacaaccacctctacaagcaaatctccagtgcttcaacgggggccagcaacgacaaccactacttcggctacagcaccccctgggggtattttgactttaacagattccactgccacttctcaccacgtgactggcagcgactcatcaacaacaactggggattccggcccaagagactcaacttcaagctcttcaacatccaggtcaaggaggtcacggacaatgatggagtcaagaccatcgccaataaccttaccagcacgattcaggtctttacggactcggaataccagttgccgtacgtcctcggctctgcgcaccagggctgcctgcctccgttcccggcggacgtgttcatgattccgcagtacggctacctaacgctcaacaatggcagccaggcagtgggacggtcatccttttactgcctggaatatttcccatcgcagatgctgagaacgggcaacaactttaccttcagctacacttttgaggacgttcctttccacagcagctacgctcacagccagagtctggaccgtctcatgaatcctctgattgaccagtacctgtactacttgtctcggactcaaacaacaggaggcacggcaaatacgcagactctgggcttcagccaaggtgggcctaatacaatggccaatcacgcaaagaactggctgccaggaccctgttaccgccaacaacgcgtctcaacgacaaccggacaaaacaacaatagcaactttgcctggactgctgggaccaaataccatctgaatggaagaaattcattggctaatcctggcatcgctatggcaacacacaaagacgacaaggagcgtttttttcccagtaacgggatcctgatttttggcaaacaaaatgctgccagagacaatgcggattacagcgatgtcatgctcaccagcgaggaagaaatcaaaaccactaaccctgtggctacagaggaatacggtatcgtggcagataacttgcagcagcaaaacacggctcctcaaattggaactgtcaacagccagggggccttacccggtatggtctggcagaaccgggacgtgtacctgcagggtcccatctgggccaagattcctcacacggacggcaacttccacccgtctccgctgatgggcggctttggcctgaaacatcctccgcctcagatcctgatcaagaacacgcctgtacctgcggatcctccgaccaccttcaaccagtcaaagctgaactctttcatcacgcaatacagcaccggacaggtcagcgtggaaattgaatgggagctgcagaaggaaaacagcaagcgctggaaccccgagatccagtacacctccaactactacaaatctacaagtgtggactttgctgttaatacagaaggcgtgtactctgaaccccaccccattggcacccgttacctcacccgtcccctgtaa

SEQ ID NO: 1569 - DNA, 2211 bp, synthetic construct
  misc_feature 1..2211: note = Description of Artificial Sequence: Synthetic polynucleotide
  source 1..2211: mol_type = other DNA
atggctgccgatggttatcttccagattggctcgaggacactctctctgaaggaataagacagtggtggaagctcaaacctggcccaccaccaccaaagcccgcagagcggcacaaggacgacagcaggggtcttgtgcttcctgggtacaagtacctcggacccttcaacggactcgacaagggagagccggtcaacgaggcagacgccgcggccctcgagcacgacaaagcctacgaccggcagctcgacagcggagacaacccgtacctcaagtacaaccacgccgacgcggagtttcaggagcgccttaaagaagatacgtcttttgggggcaacctcggacgagcagtcttccaggcgaaaaagagggttcttgaacctctgggcctggttgaggaacctgttaagacggctccgggaaaaaagaggccggtagagcactctcctgtggagccagactcctcctcgggaaccggaaaggcgggccagcagcctgctaaaaagagactcaattttggtcagactggcgactcagagtcagtccccgacccacaacctctcggagaacctccagcaacccccgctgctgtgggacctactacaatggcttcaggtggtggcgcaccaatggcagacaataacgaaggcgccgacggagtgggtaatgcctcaggaaattggcattgcgattccacatggctgggcgacagagtcatcaccaccagcacccgcacctgggccttgcccacctacaataaccacctctacaagcaaatctccagtgcttcaacgggggccagcaacgacaaccactacttcggctacagcaccccctgggggtattttgacttcaacagattccactgccacttctcaccacgtgactggcagcgactcatcaacaacaactggggattccggcccaagagactcaacttcaaactcttcaacatccaagtcaaggaggtcacgcagaatgaaggcaccaagaccatcgccaataacctcaccagcaccatccaggtgtttacggactcggagtaccagctgccgtacgttctcggctctgcccaccagggctgcctgcctccgttcccggcggacgtgttcatgattccccagtacggctacctaacactcaacaacggtagtcaggccgtgggacgctcctccttctactgcctggaatactttccttcgcagatgctgagaaccggcaacaacttccagtttacttacaccttcgaggacgtgcctttccacagcagctacgcgcacagccagagcttggaccggctgatgaatcctctgattgaccagtacctgtactacttgtctcggactcaaacaacaggaggcacggcaaatacgcagactctgggcttcagccaaggtgggcctaatacaatggccaatcaggcaaagaactggctgccaggaccctgttaccgccaacaacgcgtctcaacgacaaccgggcaaaacaacaatagcaactttgcctggactgctgggaccaaataccatctgaatggaagaaattcattggctaatcctggcatcgctatggcaacacacaaagacgacaaggagcgtttttttcccagtaacgggatcctgatttttggcaaacaaaatgctgccagagacaatgcggattacagcgatgtcatgctcaccagcgaggaagaaatcaaaaccactaaccctgtggctacagaggaatacggtatcgtggcagataacttgcagcagcaaaacacggctcctcaaattggaactgtcaacagccagggggccttacccggtatggtctggcagaaccgggacgtgtacctgcagggtcccatctgggccaagattcctcacacggacggcaacttccacccgtctccgctgatgggcggctttggcctgaaacatcctccgcctcagatcctgatcaagaacacgcctgtacctgcggatcctccgaccaccttcaaccagtcaaagctgaactctttcatcacgcaatacagcaccggacaggtcagcgtggaaattgaatgggagctgcagaaggaaaacagcaagcgctggaaccccgagatccagtacacctccaactactacaaatctacaagtgtggactttgctgttaatacagaaggcgtgtactctgaaccccaccccattggcacccgttacctcacccgtcccctgtaa

SEQ ID NO: 1570 - DNA, 2211 bp, synthetic construct
  misc_feature 1..2211: note = Description of Artificial Sequence: Synthetic polynucleotide
  source 1..2211: mol_type = other DNA
atggctgccgatggttatcttccagattggctcgaggacaacctctctgagggcattcgcgagtggtgggcgctgaaacctggagccccgaagcccaaagccaaccagcaaaagcaggacgacggccggggtctggtgcttcctggctacaagtacctcggacccttcaacggactcgacaagggggagcccgtcaacgcggcggatgcagcggccctcgagcacgacaaggcctacgaccagcagctccaagcgggtgacaatccgtacctgcggtataaccacgccgacgccgagtttcaggagcgtcttcaaggagatacgtcttttgggggcaacctcggacgagcagtcttccaggccaagaagcgggttctcgaacctctcggtctggttgaggaaggcgctaagacggctcctggaaagaaacgtccggtagagcagtcgccacaagagccagactcctcctcgggcatcggcaagacaggccagcagcccgctaaaaagagactcaattttggtcagactggcgactcagagtcagtccccgacccacaacctctcggagaacctccagcaacccccgctgctgtgggacctactacaatggcttcaggcggtggcgcaccaatggcggacaataacgaaggcgccgatggagtgggtaatgcctcaggaaattggcattgcgattccacatggctgggcgacagagtcatcaccaccagcacccgcacctgggccttgcccacctacaataaccacctctacaagcaaatctccagtgcttcaacgggggccagcaacgacaaccactacttcggctacagcaccccctgggggtattttgacttcaacagattccactgccacttctcaccacgtgactggcagcgactcatcaacaacaactggggattccggcctaagcgactcaacttcaagctcttcaacattcaggtcaaagaggttacggacaacaatggagtcaagaccatcgccaataacctcaccagcaccatccaggtgtttacggactcggagtaccagctgccgtacgttctcggctctgcccaccagggctgcctgcctccgttcccggcggacgtgttcatgattccccagtacggctacctaacactcaacaacggtagtcaggccgtgggacgctcctccttctactgcctggaatactttccttcgcagatgctgagaaccggcaacaacttccagtttacttacaccttcgaggacgtgcctttccacagcagctacgcccacagccagagcttggaccggctgatgaatcctctgattgaccagtacctgtactacttgtctcggactcaaacaacaggaggcacggcaaatacgcagactctgggcttcagccaaggtgggcctaatacaatggccaatcaggcaaagaactggctgccaggaccctgttaccgccaacaacgcgtctcaacgacaaccgggcaaaacaacaatagcaactttgcctggactgctgggaccaaataccatctgaatggaagaaattcattggctaatcctggcatcgctatggcaacacacaaagacgacaaggagcgtttttttcccagtaacgggatcctgatttttggcaaacaaaatgctgccagagacaatgcggattacagcgatgtcatgctcaccagcgaggaagaaatcaaaaccactaaccctgtggctacagaggaatacggtatcgtggcagataacttgcagcagcaaaacacggctcctcaaattggaactgtcaacagccagggggccttacccggtatggtctggcagaaccgggacgtgtacctgcagggtcccatctgggccaagattcctcacacggacggcaacttccacccgtctccgctgatgggcggctttggcctgaaacatcctccgcctcagatcctgatcaagaacacgcctgtacctgcggatcctccgaccaccttcaaccagtcaaagctgaactctttcatcacgcaatacagcaccggacaggtcagcgtggaaattgaatgggagctgcagaaggaaaacagcaagcgctggaaccccgagatccagtacacctccaactactacaaatctacaagtgtggactttgctgttaatacagaaggcgtgtactctgaaccccaccccattggcacccgttacctcacccgtcccctgtaa

SEQ ID NO: 1571 - DNA, 2217 bp, synthetic construct
  misc_feature 1..2217: note = Description of Artificial Sequence: Synthetic polynucleotide
  source 1..2217: mol_type = other DNA
atggctgccgatggttatcttccagattggctcgaggacactctctctgaaggaataagacagtggtggaagctcaaacctggcccaccaccaccaaagcccgcagagcggcataaggacgacagcaggggtcttgtgcttcctgggtacaagtacctcggacccttcaacggactcgacaagggggagcccgtcaacgcggcggatgcagcggccctcgagcacgacaaggcctacgaccagcagctcaaagcgggtgacaatccgtacctgcggtataaccacgccgacgcggagtttcaggagcgccttaaagaagatacgtcttttgggggcaacctcggacgagcagtcttccaggcgaaaaagagggttcttgaacctctcggtctggttgaggaaggcgctaagacggctcctggaaagaagagaccggtagagccatcaccccagcgttctccagactcctctacgggcatcggcaagaaaggccaacagcccgccagaaaaagactcaattttggtcagactggcgactcagagtcagttccagaccctcaacctctcggagaacctccagcagcgccctctggtgtgggacctaatacaatggctgcaggcggtggcgcaccaatggcagacaataacgaaggcgccgacggagtgggtagttcctcgggaaattggcattgcgattcccaatggctgggggacagagtcatcaccaccagcaccagaacctgggccctgcccacctacaacaatcacctctacaagcaaatctccaacagcacatctggaggatcttcaaatgacaacgcctacttcggctacagcaccccctgggggtattttgacttcaaccgcttccactgccacttctcaccacgtgactggcagcgactcatcaacaacaactggggattccggcccaagagactcaacttcaagctcttcaacattcaggtcaaagaggttacggacaacaatggagtcaagaccatcgccaataaccttaccagcacggtccaggtctttacggactcggagtaccagttgccgtacgtcctcggctctgcgcaccagggctgcctccctccgttcccggcggacgtgttcatgattccccagtacggctacctaacactcaacaacggtagtcaggccgtgggacgctcctccttctactgcctggaatatttcccttctcagatgctgagaacgggcaacaactttaccttcagctacacctttgaggacgttcctttccacagcagctacgctcacagccagagtctggaccgtctcatgaatcctctgattgaccagtacctgtactacttgtctcggactcaaacaacaggaggcacggcaaatacgcagactctgggcttcagccaaggtgggcctaatacaatggccaatcaggcaaagaactggctgccaggaccctgttaccgccaacaacgcgtctcaacgacaaccgggcaaaacaacaatagcaactttgcctggactgctgggaccaaataccatctgaatggaagaaattcattggctaatcctggcatcgctatggcaacacacaaagacgacaaggagcgtttttttcccagtaacgggatcctgatttttggcaaacaaaatgctgccagagacaatgcggattacagcgatgtcatgctcaccagcgaggaagaaatcaaaaccactaaccctgtggctacagaggaatacggtatcgtggcagataacttgcagcagcaaaacacggctcctcaaattggaactgtcaacagccagggggccttacccggtatggtctggcagaaccgggacgtgtacctgcagggtcccatctgggcaaagattccacacacggacggacattttcacccctctcccctcatgggtggattcggacttaaacaccctcctccacagattctcatcaagaacaccccggtacctgcgaatcctccgaccaccttcaaccagtcaaagctgaactctttcatcacgcaatacagcacaggacaagtgagtgtggaaattgaatgggagctgcagaaagaaaacagcaagcgctggaatcccgaagtgcagtacacatccaattatgcaaaatctgccaacgttgattttactgtggacaacaatggactttatactgagcctcgccccattggcacccgttaccttacccgtcccctgtaa

SEQ ID NO: 1572 - DNA, 2211 bp, synthetic construct
  misc_feature 1..2211: note = Description of Artificial Sequence: Synthetic polynucleotide
  source 1..2211: mol_type = other DNA
atggctgccgatggttatcttccagattggctcgaggacaacctctctgagggcattcgcgagtggtgggcgctgaaacctggagccccgaaacccaaagccaaccagcaaaagcaggacgacggccggggtctggtgcttcctggctacaagtacctcggacccttcaacggactcgacaagggggagcccgtcaacgcggcggacgcagcggccctcgagcacgacaaggcctacgaccagcagctcaaggcgggtgacaatccgtacctgcggtataaccacgccgacgccgagtttcaggagcgtctgcaagaagatacgtcttttgggggcaacctcgggcgagcagtcttccaggccaaaaagaggcttcttgaacctcttggtctggttgaggaaggggctaagacggctcctggaaagaaacgtccggtagagcagtcgccacaagagccagactcctcctcgggcattggcaagacaggccagcagcccgctaaaaagagactcaactttgggcagactggcgactcagagtcagtgcccgatcctcaacctctcggagaacctccagcaacccccgctgctgtgggacctactacaatggcttcaggcggtggcgcaccaatggcggacaataacgaaggcgccgatggagtgggtaattcctcgggaaattggcattgcgattccacatggatgggcgacagagtcatcaccaccagcacccgaacctgggccctgcccacctacaacaatcacctctacaagcaaatctccagtgcttcaacgggggccagcaacgacaaccactacttcggctacagcaccccctgggggtattttgatttcaacagattccactgccatttttcaccacgtgactggcagcgactcatcaacaacaactggggattccggcccaagagactcaacttcaagctcttcaacatccaggtcaaggaggtcacgcagaatgaaggcaccaagaccatcgccaataaccttaccagcacgattcaggtctttacggattcggaataccagctcccgtacgtcctcggctctgcgcaccagggctgcctccctccgttcccggcggacgtgttcattattccgcagtacggctacctaacgctcaacaatggtagccaggcagtgggacggtcatccttttactgcctggaatatttcccatcgcagatgctgagaacgggcaacaactttaccttcagctacacctttgaggacgttcctttccacagcagctacgctcacagccagagtctggaccgtctcatgaatcctctgattgaccagtacctgtactacttgtctcggactcaaacaacaggaggcacggcaaatacgcagactctgggcttcagccaaggtgggcctaatacaatggccaatcaggcaaagaactggctgccaggaccctgttaccgccaacaacgcgtctcaacgacaaccgggcaaaacaacaatagcaactttgcctggactgctgggaccaaataccatctgaatggaagaaattcattggctaatcctggcatcgctatggcaacacacaaagacgacaaggagcgtttttttcccagtaacgggatcctgatttttggcaaacaaaatgctgccagagacaatgcggattacagcgatgtcatgctcaccagcgaggaagaaatcaaaaccactaaccctgtggctacagaggaatacggtatcgtggcagataacttgcagcagcaaaacacggctcctcaaattggaactgtcaacagccagggggccttacccggtatggtctggcagaaccgggacgtgtacctgcagggtcccatctgggccaagattcctcacacggacggcaacttccacccgtctccgctgatgggcggctttggcctgaaacatcctccgcctcagatcctgatcaagaacacgccagtacctgcggatcctccgaccaccttcaaccagtcaaagctgaactctttcatcacgcaatacagcaccggacaggtcagcgtggaaattgaatgggagctgcagaaggaaaacagcaagcgctggaaccccgagatccagtacacctccaactactacaaatctacaagtgtggactttgctgttaatacagaaggcgtgtactctgaaccccaccccattggcacccgttacctcacccgtcccctgtaa

SEQ ID NO: 1573 - DNA, 2211 bp, synthetic construct
  misc_feature 1..2211: note = Description of Artificial Sequence: Synthetic polynucleotide
  source 1..2211: mol_type = other DNA
atggctgccgatggttatcttccagattggctcgaggacaacctctctgagggcattcgcgagtggtgggcgctgaaacctggagccccgaaacccaaagccaaccagcaaaagcaggacgacggccggggtctggtgcttcctggctacaagtacctcggacccttcaacggactcgacaagggggagcccgtcaacgcggcggatgcagcggccctcgagcacgacaaggcctacgaccagcagctcaaggcgggtgacaatccgtacctgcggtataaccacgccgacgccgagtttcaggagcgtctgcaagaagatacgtcttttgggggcaacctcgggcgagcagtcttccaggccaaaaagagggttcttgaaccttttggtctggttgaggaagctgctaagacggctcctggaaagaaacgtccggtagagcagtcgccacaagagccagactcctcctcgggcattggcaagacaggccagcagcccgctaaaaagagactcaattttggtcagactggcgactcagagtcagtgcccgaccctcaacctctcggagaacctccagcaacccccgctgctgtgggacctactacaatggcttcaggcggtggcgcaccaatggcagacaataacgaaggcgccgatggagtgggtaatgcctcaggaaattggcattgcgattccacatggctgggcgacagagtcatcaccaccagcacccgaacctgggccctgcccacctacaacaatcacctctacaagcaaatctccagtgcttcaacgggggccagcaacgacaaccactacttcggctacagcaccccctgggggtattttgactttaacagattccactgccacttttcaccacgtgactggcagcgactcatcaacaacaactggggattccggcccaagagactcaacttcaagctcttcaacatccaggtcaaggaggtcacgcagaatgaaggcaccaagaccatcgccaataacctcaccagcaccattcaggtctttacggattcggaataccagctcccgtacgtcctcggctctgcccaccagggctgcctccctccgttcccggcggacgtgttcatgattccgcagtacggctacctaacgctcaacaatggtagccaggcagtgggacggtcatccttttactgcctggaatatttcccatcgcagatgctgagaacgggcaacaactttaccttcagctacacctttgaggacgttcctttccacagcagctacgctcacagccagagtctggaccgtctcatgaatcctctgattgaccagtacctgtactacttgtctcggactcaaacaacaggaggcacggcaaatacgcagactctgggcttcagccaaggtgggcctaatacaatggccaatcacgcaaagaactggctgccaggaccctgttaccgccaacaacgcgtctcaacgacaaccgggcaaaacaacaatagcaactttgcctggactgctgggaccaaataccatctgaatggaagaaattcattggctaatcctggcatcgctatggcaacacacaaagacgacaaggagcgtttttttcccagtaacgggatcctgatttttggcaaacaaaatgctgccagagacaatgcggattacagcgatgtcatgctcaccagcgaggaagaaatcaaaaccactaaccctgtggctacagaggaatacggtatcgtggcagataacttgcagcagcaaaacacggctcctcaaattggaactgtcaacagccagggggccttacccggtatggtctggcagaaccgggacgtgtacctgcagggtcccatctgggccaagattcctcacacggacggcaacttccacccgtctccgctgatgggcggctttggcctgaaacatcctccgcctcagatcctgatcaagaacacgcctgtacctgcggatcctccgaccaccttcaaccagtcaaagctgaactctttcatcacgcaatacagcaccggacaggtcagcgtggaaattgaatgggagctgcagaaggaaaacagcaagcgctggaaccccgagatccagtacacctccaactactacaaatctacaagtgtggactttgctgttaatacagaaggcgtgtactctgaaccccaccccattggcacccgttacctcacccgtcccctgtaa

SEQ ID NO: 1574 - DNA, 2211 bp, synthetic construct
  misc_feature 1..2211: note = Description of Artificial Sequence: Synthetic polynucleotide
  source 1..2211: mol_type = other DNA
atggctgccgatggttatcttccagattggctcgaggacaacctctctgagggcattcgcgagtggtgggcgctgaaacctggagccccgaagcccaaagccaaccagcaaaagcaggacgacggccggggtctggtgcttcctggctacaagtacctcggacccttcaacggactcgacaaaggagagcccgtcaacgaggcggacgcggcggccctcgaacacgacaaggcttacgaccagcagctcaaggccggtgacaacccctacctgcggtacaaccacgccgacgccgagttccaggagcggctgcaagaagatacgtcttttgggggcaacctcgggcgagcagtcttccaggccaagaagaggcttcttgaacctcttggtctggttgaggaagcggctaagacggctcctggaaagaagaggcctgtagagcagtctcctcaggaaccggactcctccgcgggtattggcaaatcaggtgcacagcccgctaaaaagagactcaattttggtcagactggcgactcagagtcagtccccgacccacaacctctcggagaacctccagcaacccccgctgctgtgggacctactacaatggcttcaggcggtggcgcaccaatggcagacaataacgaaggcgccgatggagtgggtaatgcctcaggaaattggcattgcgattccacatggctgggcgacagagtcatcaccaccagcacccgaacctgggccctgcccacctataacaaccatctctacaagcaaatctccagtgcttcaacgggggccagtaacgacaaccactacttcggctacagcaccccctgggggtattttgactttaacagattccactgccacttctcaccacgtgactggcagcgactcatcaacaacaactggggattccggcccaagcgactcaacttcaagctcttcaacattcaggtcaaagaggttacggacaacgatggagtcaagaccatcgccaataaccttaccagcaccattcaggtgtttacggactcggaataccagctgccgtacgttctcggctccgcccaccagggctgcctgcctccgttcccggcggacgtgttcatgattccccagtacggctacctaacactcaacaacggtagtcaggccgtgggacgctcctccttctactgcctggaatactttccttcgcagatgctgagaactggcaacaacttccagtttacttacaccttcgaggacgtgcctttccacagcagctacgcccacagccagagcttggaccggctgatgaatcctctgattgaccagtacctgtactacttgtctcggactcaaacaacaggaggcacggcaaatacgcagactctgggcttcagccaaggtgggcctaatacaatggccaatcaggcaaagaactggctgccaggaccctgttaccgccaacaacgcgtctcaacgacaaccgggcaaaacaacaatagcaactttgcctggactgctgggaccaaataccatctgaatggaagaaattcattggctaatcctggcatcgctatggcaacacacaaagacgacaaggagcgtttttttcccagtaacgggatcctgatttttggcaaacaaaatgctgccagagacaatgcggattacagcgatgtcatgctcaccagcgaggaagaaatcaaaaccactaaccctgtggctacagaggaatacggtatcgtggcagataacttgcagcagcaaaacacggctcctcaaattggaactgtcaacagccagggggccttacccggtatggtctggcagaaccgggacgtgtacctgcagggtcccatctgggccaagattcctcacacggacggcaacttccacccgtctccgctgatgggcggctttggcctgaaacatcctccgcctcagatcctgatcaagaacacgcctgtacctgcggatcctccgaccaccttcaaccagtcaaagctgaactctttcatcacgcaatacagcaccggacaggtcagcgtggaaattgaatgggagctgcagaaggaaaacagcaagcgctggaaccccgagatccagtacacctccaactactacaaatctacaagtgtggactttgctgttaatacagaaggcgtgtactctgaaccccaccccattggcacccgttacctcacccgtcccctgtaa

SEQ ID NO: 1575 - DNA, 2211 bp, synthetic construct
  misc_feature 1..2211: note = Description of Artificial Sequence: Synthetic polynucleotide
  source 1..2211: mol_type = other DNA
atggctgccgatggttatcttccagattggctcgaggacaacctctctgagggcattcgcgagtggtgggcgctgaaacctggagccccgaagcccaaagccaaccagcaaaagcaggacgacggccggggtctggtgcttcctggctacaagtacctcggacccttcaacggactcgacaagggggagcccgtcaacgcggcggatgcagcggccctcgagcacgacaaagcctacgaccagcagctcaaagcgggtgacaatccgtacctgcggtataaccacgccgacgccgagtttcaggagcgtctgcaagaagatacgtcttttgggggcaacctcgggcgagcagtcttccaggccaagaagagggttctcgaacctttgggtctggttgaggaaggggctaagacggctcctggaaagaaaaggccggtagagcagtctcctcaggaaccggactcctccgcgggtattggcaagacaggtgcacagcccgctaaaaagagactcaattttggtcagactggcgactcagagtcagtccccgacccacaacctctcggagaacctccagcaacccccgctgctgtgggacctactacaatggcttcaggcggtggcgcaccaatggcagacaataacgaaggcgccgacggagtgggtagtgcctcgggaaattggcattgcgattccacatggctgggcgacagagtcatcaccaccagcacccgaacctgggccctgcccacctataacaaccatctctacaagcaaatctccagtgcttcaacgggggccagtaacgacaaccactacttcggctacagcaccccctgggggtattttgacttcaacagattccactgccacttctcaccacgtgactggcagcgactcatcaacaacaactggggattccggcccaagcgactcaacttcaagctcttcaacattcaggtcaaagaggttacggacaacaatggagtcaagaccatcgccaataaccttaccagcacgatccaggtctttacggactcggagtaccagctgccgtacgtcctcggctctgcgcaccagggctgcctgcctccgttcccggcggacgtgttcatgattccgcagtacggctacctaacgctcaacaatggtagccaggcagtgggacggtcatccttttactgcctggaatatttcccatcgcagatgctgagaacgggcaacaactttaccttcagctacacctttgaggacgttcctttccacagcagctacgctcacagccagagtctggaccgtctcatgaatcctctgattgaccagtacctgtactacttgtctcggactcaaacaacaggaggcacggcaaatacgcagactctgggcttcagccaaggtgggcctaatacaatggccaatcaggcaaagaactggctgccaggaccctgttaccgccaacaacgcgtctcaacgacaaccgggcaaaacaacaatagcaactttgcctggactgctgggaccaaataccatctgaatggaagaaattcattggctaatcctggcatcgctatggcaacacacaaagacgacaaggagcgtttttttcccagtaacgggatcctgatttttggcaaacaaaatgctgccagagacaatgcggattacagcgatgtcatgctcaccagcgaggaagaaatcaaaaccactaaccctgtggctacagaggaatacggtatcgtggcagataacttgcagcagcaaaacacggctcctcaaattggaactgtcaacagccagggggccttacccggtatggtctggcagaaccgggacgtgtacctgcagggtcccatctgggccaagattcctcacacggacggcaacttccacccgtctccgctgatgggcggctttggcctgaaacatcctccgcctcagatcctgatcaagaacacgcctgtacctgcggatcctccgaccaccttcaaccagtcaaagctgaactctttcatcacgcaatacagcaccggacaggtcagcgtggaaattgaatgggagctgcagaaggaaaacagcaagcgctggaaccccgagatccagtacacctccaactactacaaatctacaagtgtggactttgctgttaatacagaaggcgtgtactctgaaccccaccccattggcacccgttacctcacccgtcccctgtaa

SEQ ID NO: 1576 - DNA, 2211 bp, synthetic construct
  misc_feature 1..2211: note = Description of Artificial Sequence: Synthetic polynucleotide
  source 1..2211: mol_type = other DNA
atggctgccgatggttatcttccagattggctcgaggacaacctctctgagggcattcgcgagtggtgggacttgaaacctggagccccgaagcccaaagccaaccagcaaaagcaggacgacggccggggtctggtgcttcctggctacaagtacctcggacccttcaacggactcgacaagggggagcccgtcaacgcggcggacgcagcggccctcgagcacgacaaggcctacgaccagcagctcaaagcgggtgacaatccgtacctgcggtataaccacgccgacgccgagtttcaggagcgtctgcaagaagatacgtcttttgggggcaacctcggacgagcagtcttccaggccaaaaagaggcttcttgaacctcttggtctggttgaggaagcggctaagacggctcctggaaagaagaggcctgtagagcagtctcctcaggaaccggactcctccgcgggtattggcaaatcgggtgcacagcccgctaaaaagagactcaatttcggtcagactggcgacacagagtcagtcccagaccctcaaccaatcggagaacctccagcagcgccctctggtgtgggacctaatacaatggctgcaggcggtggcgcaccaatggcagacaataacgaaggtgccgatggagtgggtagttcctcgggaaattggcattgcgattcccaatggctgggggacagagtcatcaccaccagcacccgaacctgggccctgcccacctataacaaccacctctacaagcaaatctccagtgcttcaacgggggccagcaacgacaaccactactttggctacagcaccccttgggggtattttgacttcaacagattccactgccacttttcaccacgtgactggcaaagactcatcaacaacaactggggattccgacccaagagactcaacttcaagctcttcaacatccaggtcaaggaggtcacgcagaatgaaggcaccaagaccatcgccaataacctcaccagcaccatccaggtgtttacggactcggagtaccagctgccgtacgttctcggctctgcccaccagggctgcctgcctccgttcccggcggacgtgttcatgattccccagtacggctacctaacactcaacaacggtagtcaggccgtgggacgctcctccttctactgcctggaatactttccttcgcagatgctgagaaccggcaacaacttccagtttacttacaccttcgaggacgtgcctttccacagcagctacgcgcacagccagagcttggaccggctgatgaatcctctgattgaccagtacctgtactacttgtctcggactcaaacaacaggaggcacggcaaatacgcagactctgggcttcagccaaggtgggcctaatacaatggccaatcacgcaaagaactggctgccaggaccctgttaccgccaacaacgcgtctcaacgacaaccgggcaaaacaacaatagcaactttgcctggactgctgggaccaaataccatctgaatggaagaaattcattggctaatcctggcatcgctatggcaacacacaaagacgacaaggagcgtttttttcccagtaacgggatcctgatttttggcaaacaaaatgctgccagagacaatgcggattacagcgatgtcatgctcaccagcgaggaagaaatcaaaaccactaaccctgtggctacagaggaatacggtatcgtggcagataacttgcagcagcaaaacacggctcctcaaattggaactgtcaacagccagggggccttacccggtatggtctggcagaaccgggacgtgtacctgcagggtcccatctgggccaagattcctcacacggacggcaacttccacccgtctccgctgatgggcggctttggcctgaaacatcctccgcctcagatcctgatcaagaacacgcctgtacctgcggatcctccgaccaccttcaaccagtcaaagctgaactctttcatcacgcaatacagcaccggacaggtcagcgtggaaattgaatgggagctgcagaaggaaaacagcaagcgctggaaccccgagatccagtacacctccaactactacaaatctacaagtgtggactttgctgttaatacagaaggcgtgtactctgaaccccaccccattggcacccgttacctcacccgtcccctgtaa

SEQ ID NO: 1577 - DNA, 2214 bp, synthetic construct
  misc_feature 1..2214: note = Description of Artificial Sequence: Synthetic polynucleotide
  source 1..2214: mol_type = other DNA
atggctgccgatggttatcttccagattggctcgaggacaaccttagtgaaggaattcgcgagtggtgggcgctgaaacctggagccccgaagcccaaagccaaccagcaaaagcaggacgacggccggggtctggtgcttcctggctacaagtacctcggacccttcaacggactcgacaagggggagcccgtcaacgcggcggacgcagcggccctcgagcacgacaaggcctacgaccagcagctcaaagcgggtgacaatccgtacctgcggtataaccacgccgacgccgagtttcaggagcgtctgcaagaagatacgtcttttgggggcaacctcgggcgagcagtcttccaggccaagaagcgggttctcgaacctctcggtctggttgaggaaggcgctaagacggctcctggaaagaaacgtccggtagagcagtcgccacaagagccagactcctcctcgggcatcggcaagacaggccagcagcccgctaaaaagagactcaatttcggtcagactggcgacacagagtcagtcccagaccctcaaccaatcggagaacctcccgcagccccctcaggtgtgggatctcttacaatggcttcaggtggtggcgcaccagtggcagacaataacgaaggtgccgatggagtgggtagttcctcgggaaattggcattgcgattcccaatggctgggggacagagtcatcaccaccagcaccagaacctgggccttgcccacctacaataaccacctctacaagcaaatctccaacagcacatctggaggatcttcaaatgacaacgcctacttcggctacagcaccccctgggggtattttgactttaacagattccactgccacttttcaccacgtgactggcagcgactcatcaacaacaactggggattccgacccaagagactcaacttcaagctcttcaacatccaggtcaaggaggtcacgcagaacgaaggcaccaagaccatcgccaataacctcaccagcaccatccaggtgtttacggactcggagtaccagctgccgtacgttctcggctccgcccaccagggctgcctgcctccgttcccggcggacgtgttcatgattccccagtacggctacctaacgctcaacaacggtagtcaggccgtgggacgctcctccttctactgcctggaatactttccttcgcagatgctgagaaccggcaacaacttccagtttacttacaccttcgaggacgtgcctttccacagcagctacgcgcacagccagagcttggaccggctgatgaatcctctgattgaccagtacctgtactacttgtctcggactcaaacaacaggaggcacggcaaatacgcagactctgggcttcagccaaggtgggcctaatacaatggccaatcaggcaaagaactggctgccaggaccctgttaccgccaacaacgcgtctcaacgacaaccgggcaaaacaacaatagcaactttgcctggactgctgggaccaaataccatctgaatggaagaaattcattggctaatcctggcatcgctatggcaacacacaaagacgacaaggagcgtttttttcccagtaacgggatcctgatttttggcaaacaaaatgctgccagagacaatgcggattacagcgatgtcatgctcaccagcgaggaagaaatcaaaaccactaaccctgtggctacagaggaatacggtatcgtggcagataacttgcagcagcaaaacacggctcctcaaattggaactgtcaacagccagggggccttacccggtatggtctggcagaaccgggacgtgtacctgcagggtcccatctgggccaagattcctcacacggacggcaacttccacccgtctccgctgatgggcggctttggcctgaaacatcctccgcctcagatcctgatcaagaacacgcctgtacctgcggatcctccgaccaccttcaaccagtcaaagctgaactctttcatcacgcaatacagcaccggacaggtcagcgtggaaattgaatgggagctgcagaaggaaaacagcaagcgctggaaccccgagatccagtacacctccaactactacaaatctacaagtgtggactttgctgttaatacagaaggcgtgtactctgaaccccaccccattggcacccgttacctcacccgtcccctgtaa

SEQ ID NO: 1578 - DNA, 2214 bp, synthetic construct
  misc_feature 1..2214: note = Description of Artificial Sequence: Synthetic polynucleotide
  source 1..2214: mol_type = other DNA
atggctgccgatggttatcttccagattggctcgaggacaaccttagtgaaggaattcgcgagtggtgggcgctgaaacctggagccccgaagcccaaagccaaccagcaaaagcaggacgacggccggggtctggtgcttcctggctacaagtacctcggacccttcaacggactcgacaagggggagcccgtcaacgcggcggacgcagcggccctcgagcacgacaaggcctacgaccagcagctcaaagcgggtgacaatccgtacctgcggtataaccacgccgacgcggagtttcaggagcgccttaaagaagatacgtcttttgggggcaacctcgggcgagcagtcttccaggccaagaagagggttctcgaaccttttggtctggttgaggaaggtgctaagacggctcctggaaagaaacgtccggtagagcagtcgccacaagagccagactcctcctcgggcatcggcaagacaggccagcagcccgctaaaaagagactcaattttggtcagactggcgactcagagtcagttccagaccctcaacctctcggagaacctccagcagcgccctctggtgtgggacctaatacaatggctgcaggcggtggcgcaccaatggcagacaataacgaaggtgccgatggagtgggtagttcctcgggaaattggcattgcgattcccaatggctggggaacagagtcatcaccaccagcacccgaacctgggccctgcccacctacaacaatcacctctacaagcaaatctccaacagcacatctggaggatcttcaaatgacaacgcctacttcggctacagcaccccctgggggtattttgacttcaacagattccactgccacttctcaccacgtgactggcagcgactcatcaacaacaactggggattccggcccaagagactcaacttcaagctcttcaacattcaggtcaaagaggttacggacaacaatggagtcaagaccatcgccaataaccttaccagcacggtccaggtcttcacggactcggagtaccagttgccgtacgtcctcggctctgcgcaccagggctgcctccctccgttcccggcggacgtgttcatgattccgcaatacggctacctgacgctcaacaacggtagccaagccgtgggacgttcatccttttactgcctggaatatttcccttctcagatgctgagaaccggcaacaacttccagtttacttacaccttcgaggacgtgcctttccacagcagctacgcgcacagccagagcttggaccggctgatgaatcctctgattgaccagtacctgtactacttgtctcggactcaaacaacaggaggcacggcaaatacgcagactctgggcttcagccaaggtgggcctaatacaatggccaatcaggcaaagaactggctgccaggaccctgttaccgccaacaacgcgtctcaacgacaaccgggcaaaacaacaatagcaactttgcctggactgctgggaccaaataccatctgaatggaagaaattcattggctaatcctggcatcgctatggcaacacacaaagacgacaaggagcgtttttttcccagtaacgggatcctgatttttggcaaacaaaatgctgccagagacaatgcggattacagcgatgtcatgctcaccagcgaggaagaaatcaaaaccactaaccctgtggctacagaggaatacggtatcgtggcagataacttgcagcagcaaaacacggctcctcaaattggaactgtcaacagccagggggccttacccggtatggtctggcagaaccgggacgtgtacctgcagggtcccatctgggccaagattcctcacacggacggcaacttccacccgtctccgctgatgggcggctttggcctgaaacatcctccgcctcagatcctgatcaagaacacgcctgtacctgcggatcctccgaccaccttcaaccagtcaaagctgaactctttcatcacgcaatacagcaccggacaggtcagcgtggaaattgaatgggagctgcagaaggaaaacagcaagcgctggaaccccgagatccagtacacctccaactactacaaatctacaagtgtggactttgctgttaatacagaaggcgtgtactctgaaccccaccccattggcacccgttacctcacccgtcccctgtaa

SEQ ID NO: 1579 - DNA, 2211 bp, synthetic construct
  misc_feature 1..2211: note = Description of Artificial Sequence: Synthetic polynucleotide
  source 1..2211: mol_type = other DNA
atggctgccgatggttatcttccagattggctcgaggacaacctctctgagggcattcgcgagtggtgggacttgaaacctggagccccgaagcccaaagccaaccagcaaaagcaggacgacggccggggtctggtgcttcctggctacaagtacctcggacccttcaacggactcgacaggggggagcccgtcaacgcggcggacgcagcggccctcgagcacgacaaggcctacgaccagcagctcaaagcgggtgacaatccgtacctgcggtataaccacgccgacgccgagtttcaggagcgtctgcaagaagatacgtcttttgggggcaacctcgggcgagcagtcttccaggccaagaagcgggttctcgaacctctcggtctggttgaggaaggcgctaagacggctcctggaaagaaacgtccggtagagcagtcgccacaagagccagactcctcctcgggcatcggcaagacaggccagcagcccgctaaaaagagactcaattttggtcagactggcgactcagagtcagtccccgacccacaacctctcggagaacctccagcaacccccgctgctgtgggacctactacaatggcttcaggcggtggcgcaccaatggcagacaataacgaaggcgccgacggagtgggtaatgcctcaggaaattggcattgcgattccacatggctgggcgacagagtcatcaccaccagcacccgaacctgggccttgcccacctataacaaccacctctacaagcaaatctccagtgcttcaacgggggccagcaacgacaaccactacttcggctacagcaccccctgggggtattttgacttcaacagattccactgccacttctcaccacgtgactggcagcgactcatcaacaacaactggggattccggcctaagcgactcaacttcaagctcttcaacattcaggtcaaagaggttacggacaacaatggagtcaagaccatcgccaataacctcaccagcaccatccaggtgtttacggactcggagtaccagctgccgtacgttctcggctctgcccaccagggctgcctgcctccgttcccggcggacgtgttcatgattccccagtacggctacctaacactcaacaacggtagtcaggccgtgggacgctcctccttctactgcctggaatactttccttcgcagatgctgagaaccggcaacaacttccagtttacttacaccttcgaggacgtgcctttccacagcagctacgcccacagccagagcttggaccggctgatgaatcctctgattgaccagtacctgtactacttgtctcggactcaaacaacaggaggcacggcaaatacgcagactctgggcttcagccaaggtgggcctaatacaatggccaatcaggcaaagaactggctgccaggaccctgttaccgccaacaacgcgtctcaacgacaaccgggcaaaacaacaatagcaactttgcctggactgctgggaccaaataccatctgaatggaagaaattcattggctaatcctggcatcgctatggcaacacacaaagacgacaaggagcgtttttttcccagtaacgggatcctgatttttggcaaacaaaatgctgccagagacaatgcggattacagcgatgtcatgctcaccagcgaggaagaaatcaaaaccactaaccctgtggctacagaggaatacggtatcgtggcagataacttgcagcagcaaaacacggctcctcaaattggaactgtcaacagccagggggccttacccggtatggtctggcagaaccgggacgtgtacctgcagggtcccatctgggccaagattcctcacacggacggcaacttccacccgtctccgctgatgggcggctttggcctgaaacatcctccgcctcagatcctgatcaagaacacgcctgtacctgcggatcctccgaccaccttcaaccagtcaaagctgaactctttcatcacgcaatacagcaccggacaggtcagcgtggaaattgaatgggagctgcagaaggaaaacagcaagcgctggaaccccgagatccagtacacctccaactactacaaatctacaagtgtggactttgctgttaatacagaaggcgtgtactctgaaccccaccccattggcacccgttacctcacccgtcccctgtaa

SEQ ID NO: 1580 - DNA, 2211 bp, synthetic construct
  misc_feature 1..2211: note = Description of Artificial Sequence: Synthetic polynucleotide
  source 1..2211: mol_type = other DNA
atggctgccgatggttatcttccagattggctcgaggacaacctctctgagggcattcgcgagtggtgggacttgaaacctggagccccgaagcccaaagccaaccagcaaaagcaggacgacggccggggtctggtgcttcctggctacaagtacctcggacccttcaacggactcgacaagggggagcccgtcaacgcggcggacgcagcggccctcgagcacgacaaggcctacgaccagcagctcaaagcgggtgacaatccgtacctgcggtataaccacgccgacgccgagtttcaggagcgtctgcaagaagatacgtcttttgggggcaacctcgggcgagcagtcttccaggccaagaagcgggttctcgaacctctcggtctggttgaggaaggcgctaagacggctcctggaaagaaacgtccggtagagcagtcgccacaagagccagactcctcctcgggcatcggcaagaaaggccaacagcccgccagaaaaagactcaattttggtcagactggcgactcagagtcagttccagaccctcaacctctcggagaacctcccgcagccccctcaggtgtgggatctcttacaatggcttcaggcggtggcgcaccaatggcagacaataacgaaggcgccgacggagtgggtaatgcctcaggaaattggcattgcgattccacatggctgggcgacagagtcatcaccaccagcacccgaacatgggccttgcccacttacaacaaccatctctacaagcaaatctccagtgcttcaacgggggccagcaacgacaaccactacttcggctacagcaccccctgggggtattttgatttcaacagattccactgccacttttcaccacgtgactggcaaagactcatcaacaacaactggggattccgacccaagagactcaacttcaagctctttaacattcaagtcaaagaggtcacgcagaatgaaggcaccaagaccatcgccaataaccttaccagcacggtccaggtcttcacggactcagactatcagctcccgtacgttctcggctccgcccaccagggctgcctgcctccgttcccggcggacgtgttcatgattccccagtacggctacctaacactcaacaacggtagtcaggccgtgggacgctcctccttctactgcctggaatactttccttcgcagatgctgagaaccggcaacaacttccagtttacttacacctttgaggacgttcctttccacagcagctacgctcacagccagagtctggaccgtctcatgaatcctctgattgaccagtacctgtactacttgtctcggactcaaacaacaggaggcacggcaaatacgcagactctgggcttcagccaaggtgggcctaatacaatggccaatcaggcaaagaactggctgccaggaccctgttaccgccaacaacgcgtctcaacgacaaccgggcaaaacaacaatagcaactttgcctggactgctggaaccaaataccatctgaatggaagaaattcattgtctaatcctggcatcgctatggcgacacacaaagacgacaaggagcgtttttttcccagtaacgggatcctgatttttggcaaacaaaatgctgccagagacaatgcggattacagcgatgtcatgctcaccagcgaggaagaaatcaaaaccactaaccctgtggctacagaggaatacggtatcgtggcagataacttgcagcagcaaaacacggctcctcaaattggaactgtcaacagccagggggccttacccggtatggtctggcagaaccgggacatgtacctgcagggtcccatctgggccaagattcctcacacggacggcaacttccacccgtctccgctgatgggcggctttggcctgaaacatcctccgcctcagatcctgatcaagaacacgcctgtacctgcggatcctccgaccaccttcaaccagtcaaagctgaactctttcatcacgcaatacagcaccggacaggtcagcgtggaaattgaatgggagctgcagaaggaaaacagcaagcgctggaaccccgagatccagtacacctccaactactacaaatctacaagtgtggactttgctgttaatacagaaggcgtgtactctgaaccccaccccattggcacccgttacctcacccgtcccctgtaa

SEQ ID NO: 1581 - DNA, 2211 bp, synthetic construct
  misc_feature 1..2211: note = Description of Artificial Sequence: Synthetic polynucleotide
  source 1..2211: mol_type = other DNA
atggctgccgatggttatcttccagattggctcgaggacaacctctctgagggcattcgcgagtggtgggcgctgaaacctggagccccgaagcccaaagccaaccagcaaaagcaggacgacggccggggtctggtgcttcctggctacaagtacctcggacccttcaacggactcgacaagggggagcccgtcaacgcggcggatgcagcggccctcgagcacgacaaggcctacgaccagcagctcaaagcgggtgacaatccgtacctgcggtataaccacgccgacgccgagtttcaggagcgtctgcaggaagatacgtcttttgggggcaacctcgggcgagcagtcttccaggccaagaagagggttctcgaaccttttggtctggttgaggaaggcgctaagacggctcctggaaagaaacgtccggtagagcagtcgccacaagagccagactcctcctcgggcatcggcaagacaggccagcagcccgctaaaaagagactcaattttggtcagactggcggctcagagtcagtccccgacccacaacctctcggagaacctccagcaacccccgctgctgtgggacctactacaatggctgcaggcggtggcgcaccaatggcagacaataacgaaggcgccgacggagtgggtagttcctcgggaaattggcattgcgattccacatggctgggcgacagagtcatcaccaccagcaccagaacctgggccttgcccacctataacaaccacctctacaagcaaatctccagtgcttcaacgggggccagcaacgacaaccactacttcggctacagcaccccctgggggtattttgatttcaacagattccactgccatttctcaccacgtgactggcagcgactcatcaacaacaactggggattccggcccaagagactcaacttcaaactcttcaacattcaggtcaaagaggttacggacaacaatggagtcaagaccatcgccaataaccttaccagcacggtccaggtgtttacggactcggagtaccagctgccgtacgttctcggctctgcccaccagggctgcctccctccgttcccggcggacgtgttcatgattccgcagtacggctacctaacgctcaacaatggcagccaggcagtgggacggtcatccttttactgcctggaatatttcccttctcagatgctgagaacgggcaacaactttaccttcagctacacctttgaggaagtgcctttccacagcagctacgcgcacagccagagcctggaccggctgatgaatcctctgattgaccagtacctgtactacttgtctcggactcaaacaacaggaggcacggcaaatacgcagactctgggcttcagccaaggtgggcctaatacaatggccaatcaggcaaagaactggctgccaggaccctgttaccgccaacaacgcgtctcaacgacaaccgggcaaaacaacaatagcaactttgcctggactgctgggaccaaataccatctgaatggaagaaattcattggctaatcctggcatcgctatggcctcacacaaagacgacaaggagcgtttttttcccagtaacgggatcctgatttttggcaaacaaaatgctgccagagacaatgcggattacagcgatgtcatgctcaccagcgaggaagaaatcaaaaccactaaccctgtggctacagaggaatacggtatcgtggcagataacttgcagcagcaaaacacggctcctcaaattggaactgtcaacagccagggggccttacccggtatggtctggcagaaccgggacgtgtacctgcagggtcccatctgggccaagattcctcacacggacggcaacttccacccgtctccgctgatgggcggctttggcctgaaacatcctccgcctcagatcctgatcaagaacacgcctgtacctgcggatcctccgaccaccttcaaccagtcaaagctgaactctttcatcacgcaatacagcaccggacaggtcagcgtggaaattgaatgggagctgcagaaggaaaacagcaagcgctggaaccccgagatccagtacacctccaactactacaaatctacaagtgtggactttgctgttaatacagaaggcgtgtactctgaaccccaccccattggcacccgttacctcacccgtcccctgtaa

SEQ ID NO: 1582 - protein, 736 aa, synthetic construct
  REGION 1..736: note = Description of Artificial Sequence: Synthetic polypeptide
MAADGYLPDWLEDTLSEGIRQWWKLKPGPPPPKPAERHKDDSRGLVLPGYKYLGPFNGLDKGEPVNEADAAALEHDKAYDQQLKAGDNPYLKYNHADAEFQERLKEDTSFGGNLGRAVFQAKKRVLEPLGLVEEGAKTAPGKKRPVEQSPQEPDSSSGIGKTGQQPAKKRLNFGQTGDSESVPDPQPLGEPPATPAAVGPTTMASGGGAPMADNNEGADGVGSSSGNWHCDSQWLGDRVITTSTRTWALPTYNNHLYKQISSASTGASNDNHYFGYSTPWGYFDFNRFHCHFSPRDWQRLINNNWGFRPKRLNFKLFNIQVKEVTQNEGTKTIANNLTSTIQVFTDSEYQLPYVLGSAHQGCLPPFPADVFMIPQYGYLTLNNGSQAVGRSSFYCLEYFPSQMLRTGNNFQFTYTFEDVPFHSSYAHSQSLDRLMNPLIDQYLYYLSRTQTTGGTANTQTLGFSQGGPNTMANQAKNWLPGPCYRQQRVSTTTGQNNNSNFAWTAGTKYHLNGRNSLANPGIAMATHKDDKERFFPSNGILIFGKQNAARDNADYSDVMLTSEEEIKTTNPVATEEYGIVADNLQQQNTAPQIGTVNSQGALPGMVWQNRDVYLQGPIWAKIPHTDGNFHPSPLMGGFGLKHPPPQILIKNTPVPADPPTTFNQSKLNSFITQYSTGQVSVEIEWELQKENSKRWNPEIQYTSNYYKSTSVDFAVNTEGVYSEPHPIGTRYLTRPL

SEQ ID NO: 1583 - protein, 736 aa, synthetic construct
  REGION 1..736: note = Description of Artificial Sequence: Synthetic polypeptide
MAADGYLPDWLEDNLSEGIREWWALKPGAPKPKANQQKQDDGRGLVLPGYKYLGPFNGLDKGEPVNAADAAALEHDKAYDQQLKAGDNPYLKYNHADAEFQERLKEDTSFGGNLGRAVFQAKKRLLEPLGLVEEAAKTAPGKKRPVEQSPQEPDSSAGIGKSGAQPAKKRLNFGQTGDSESVPDPQPLGEPPATPAAVGPTTMASGGGAPMADNNEGADGVGNASGNWHCDSTWLGDRVITTSTRTWALPTYNNHLYKQISSASTGASNDNHYFGYSTPWGYFDFNRFHCHFSPRDWQRLINNNWGFRPKRLNFKLFNIQVKEVTQNEGTKTIANNLTSTIQVFTDSEYQLPYVLGSAHQGCLPPFPADVFMIPQYGYLTLNNGSQAVGRSSFYCLEYFPSQMLRTGNNFQFTYTFEDVPFHSSYAHSQSLDRLMNPLIDQYLYYLSRTQTTGGTANTQTLGFSQGGPNTMANQAKNWLPGPCYRQQRVSTTTGQNNNSNFAWTAGTKYHLNGRNSLANPGIAMATHKDDKERFFPSNGILIFGKQNAARDNADYSDVMLTSEEEIKATNPVATEEYGIVADNLQQQNTAPQIGTVNSQGALPGMVWQNRDVYLQGPIWAKIPHTDGNFHPSPLMGGFGLKHPPPQILIKNTPVPADPPTTFNQSKLNSFITQYSTGQVSVEIEWELQKENSKRWNPEIQYTSNYYKSTSVDFAVNTEGVYSEPHPIGTRYLTRPL

SEQ ID NO: 1584 - protein, 737 aa, synthetic construct
  REGION 1..737: note = Description of Artificial Sequence: Synthetic polypeptide
MAADGYLPDWLEDNLSEGIREWWDLKPGAPKPKANQQKQDDGRGLVLPGYKYLGPFNGLDKGEPVNAADAAALEHDKAYDQQLKAGDNPYLRYNHADAEFQERLQEDTSFGGNLGRAVFQAKKRVLEPLGLVEEGANTAPGKKRPVEQSPQEPDSSAGIGKSGAQPAKKRLNFGQTGDTESVPDPQPIGEPPAAPSGVGSLTMASGGGAPVADNNEGADGVGSSSGNWHCDSQWLGDRVITTSTRTWALPTYNNHLYKQISNSTSGGSSNDNAYFGYSTPWGYFDFNRFHCHFSPRDWQRLINNNWGFRPKRLNFKLFNIQVKEVTDNNGVKTIANNLTSTIQVFTDSEYQLPYVLGSAHQGCLPPFPADVFMIPQYGYLTLNNGSQAVGRSSFYCLEYFPSQMLRTGNNFQFTYTFEDVPFHSSYAHSQSLDRLMNPLIDQYLYYLSRTQTTGGTANTQTLGFSQGGPNTMANQAKNWLPGPCYRQQRVSTTTGQNNNSNFAWTAGTKYHLNGRNSLANPGIAMASHKDDKERFFPSNGILIFGKQNAARDNADYSDVMLTSEEEIKTTNPVATEEYGIVADNLQQQNTAPQIGTVNSQGALPGMVWQNRDVYLQGPIWAKIPHTDGNFHPSPLMGGFGLKHPPPQILIKNTPVPADPPTTFNQSKLNSFITQYSTGQVSVEIEWELQKENSKRWNPEIQYTTNYYKSTSVDFAVNTEGVYSEPHPIGTRYLTRPL

SEQ ID NO: 1585 - protein, 736 aa, synthetic construct
  REGION 1..736: note = Description of Artificial Sequence: Synthetic polypeptide
MAADGYLPDWLEDNLSEGIREWWALKPGAPKPKANQQKQDDGRGLVLPGYKYLGPFNGLDKGEPVNEADAAALEHDKAYDQQLKAGDNPYLRYNHADAEFQERLQEDTSFGGNLGRAVFQAKKRVLEPLGLVEEGAKTAPGKKRPVEQSPQEPDSSSGIGKTGQQPAKKRLNFGQTGDSESVPDPQPLGEPPATPAAVGPTTMASGGGAPMADNNEGADGVGNASGNWHCDSTWLGDRVITTSTRTWALPTYNNHLYKQISSASTGASNDNHYFGYSTPWGYFDFNRFHCHFSPRDWQRLINNNWGFRPKRLNFKLFNIQVKEVTQNEGTKTIANNLTSTIQVFTDSEYQLPYVLGSAHQGCLPPFPADVFMIPQYGYLTLNNGSQAVGRSSFYCLEYFPSQMLRTGNNFQFTYTFEDVPFHSSYAHSQSLDRLMNPLIDQYLYYLSRTQTTGGTANTQTLGFSQGGPNTMANQAKNWLPGPCYRQQRVSTTTGQNNNSNFAWTAGTKYHLNGRNSLANPGIAMATHKDDKERFFPSNGILIFGKQNAARDNADYSDVMLTSEEEIKTTNPVATEEYGIVADNLQQQNTAPQIGTVNSQGALPGMVWQNRDVYLQGPIWAKIPHTDGNFHPSPLMGGFGLKHPPPQILIKNTPVPADPPTTFNQSKLNSFITQYSTGQVSVEIEWELQKENSKRWNPEIQYTSNYYKSTSVDFAVNTEGVYSEPHPIGTRYLTRPL

SEQ ID NO: 1586 - protein, 736 aa, synthetic construct
  REGION 1..736: note = Description of Artificial Sequence: Synthetic polypeptide
MAADGYLPDWLEDNLSEGIREWWALKPGAPKPKANQQKQDDGRGLVLPGYKYLGPFNGLDKGEPVNEADAAALEHDKAYDQQLKAGDNPYLRYNHADAEFQERLQEDTSFGGNLGRAVFQAKKRVLEPFGLVEEGAKTAPGKKRPVEQSPQEPDSSSGIGKTGQQPAKKRLNFGQTGDSESVPDPQPLGEPPATPAAVGPTTMASGGGAPMADNNEGADGVGNASGNWHCDSQWLGDRVITTSTRTWALPTYNNHLYKQISSASTGASNDNHYFGYSTPWGYFDFNRFHCHFSPRDWQRLINNNWGFRPKRLNFKLFNIQVKEVTDNNGVKTIANNLTSTVQVFSDSEYQLPYVLGSAHQGCLPPFPADVFMIPQYGYLTLNNGSQAVGRSSFYCLEYFPSQMLRTGNNFQFTYTFEDVPFHSSYAHSQSLDRLMNPLIDQYLYYLSRTQTTGGTANTQTLGFSQGGPNTMANQAKNWLPGPCYRQQRVSTTTGQNNNSNFAWTAGTKYHLNGRNSLANPGIAMATHKDDKERFFPSNGILIFGKQNAARDNADYSDVMLTSEEEIKTTNPVATEEYGIVADNLQQQNTAPQIGTVNSQGALPGMVWQNRDVYLQGPIWAKIPHTDGNFHPSPLMGGFGLKHPPPQILIKNTPVPADPPTTFNQSKLNSFITQYSTGQVSVEIEWELQKENSKRWNPEIQYTSNYYKSTSVDFAVNTEGVYSEPHPIGTRYLTRPL

SEQ ID NO: 1587 - protein, 736 aa, synthetic construct
  REGION 1..736: note = Description of Artificial Sequence: Synthetic polypeptide
MAADGYLPDWLEDTLSEGIRQWWKLKPGPPPPKPAERHKDDSRGLVLPGYKYLGPFNGLDKGEPVNEADAAALEHDKAYDRQLDSGDNPYLKYNHADAEFQERLKEDTSFGGNLGRAVFQAKKRVLEPFGLVEEGAKTAPGKKRPVEQSPQEPDSSSGIGKTGQQPAKKRLNFGQTGDSESVPDPQPLGEPPATPAAVGPTTMASGGGAPMADNNEGADGVGNASGNWHCDSTWLGDRVITTSTRTWALPTYNNHLYKQISSASTGASNDNHYFGYSTPWGYFDFNRFHCHFSPRDWQRLINNNWGFRPKRLNFKLFNIQVKEVTDNNGVKTIANNLTSTVQVFTDSDYQLPYVLGSAHEGCLPPFPADVFMIPQYGYLTLNNGSQAVGRSSFYCLEYFPSQMLRTGNNFQFTYTFEDVPFHSSYAHSQSLDRLMNPLIDQYLYYLSRTQTTGGTANTQTLGFSQGGPNTMANQAKNWLPGPCYRQQRVSTTTGQNNNSNFAWTAGTKYHLNGRNSLANPGIAMATHKDDKERFFPSNGILIFGKQNAARDNADYSDVMLTSEEEIKTTNPVATEEYGIVADNLQQQNTAPQIGTVNSQGALPGMVWQNRDVYLQGPIWAKIPHTDGNFHPSPLMGGFGLKHPPPQILIKNTPVPADPPTTFNQSKLNSFITQYSTGQVSVEIEWELQKENSKRWNPEIQYTSNYYKSTSVDFAVNTEGVYSEPHPIGTRYLTRNL

SEQ ID NO: 1588 - protein, 738 aa, synthetic construct
  REGION 1..738: note = Description of Artificial Sequence: Synthetic polypeptide
MAADGYLPDWLEDNLSEGIREWWDLKPGAPKPKANQQKQDDGRGLVLPGYKYLGPFNGLDKGEPVNAADAAALEHDKAYDQQLQAGDNPYLRYNHADAEFQERLQEDTSFGGNLGRAVFQAKKRVLEPLGLVEEGAKTAPGKKRPVEPSPQRSPDSSTGIGKKGQQPARKRLNFGQTGDSESVPDPQPLGEPPAAPSGVGPNTMAAGGGAPMADNNEGADGVGSSSGNWHCDSQWLGDRVITTSTRTWALPTYNNHLYKQISNSTSGGSSNDNAYFGYSTPWGYFDFNRFHCHFSPRDWQRLINNNWGFRPKRLSFKLFNIQVKEVTQNEGTKTIANNLTSTIQVFTDSEYQLPYVLGSAHQGCLPPFPADVFMIPQYGYLTLNNGSQAVGRSSFYCLEYFPSQMLRTGNNFTFSYTFEDVPFHSSYAHSQSLDRLMNPLIDQYLYYLSRTQTTGGTANTQTLGFSQGGPNTMANQAKNWLPGPCYRQQRVSTTTGQNNNSNFAWTAGTKYHLNGRNSLANPGIAMATHKDDKERFFPSNGILIFGKQNAARDNADYSDVMLTSEEEIKTTNPVATEEYGIVADNLQQQNTAPQIGTVNSQGALPGMVWQNRDVYLQGPIWAKIPHTDGNFHPSPLMGGFGLKHPPPQILIKNTPVPADPPTTFNQSKLNSFITQYSTGQVSVEIEWELQKENSKRWNPEIQYTSNYYKSTSVDFAVNTEGVYSEPHPIGTRYLTRPL

SEQ ID NO: 1589 - protein, 737 aa, synthetic construct
  REGION 1..737: note = Description of Artificial Sequence: Synthetic polypeptide
MAADGYLPDWLEDNLSEGIREWWDLKPGAPKPKANQQKQDDGRGLVLPGYKYLGPFNGLDKGEPVNAADAAALEHDKAYDQQLKAGDNPYLRYNHADAEFQERLQEDTSFGGNLGRAVFQAKKRVLEPFGLVEEGAKTAPGKKRPVEQSPQEPDSSSGIGKTGQQPAKKRLNFGQTGDSESVPDPQPLGEPPATPAAVGPTTMASGGGAPMQDNNEGADGVGSSSGNWHCDSTWLGDRVITTSTRTWALPTYNNHLYKQISNGTSGGATNDNTYFGYSTPWGYFDFNRFHCHFSPRDWQRLINNNWGFRPKRLNFKLFNIQVKEVTQNEGTKTIANNLTSTIQVFTDSEYQLPYVLGSAHQGCLPPFPADVFMIPQYGYLTLNNGSQAVGRSSFYCLEYFPSQMLRTGNNFTFSYTFEDVPFHSSYAHSQSLDRLMNPLIDQYLYYLSRTQTTGGTANTQTLGFSQGGPNTMANQAKNWLPGPCYRQQRVSTTTGQNNNSNFAWTAGTKYHLNGRNSLANPGIAMATHKDDKERFFPSNGILIFGKQNAARDNADYSDVMLTSEEEIKTTNPVATEEYGIVADNLQQQNTAPQIGTVNSQGALPGMVWQNRDVYLQGPIWAKIPHTDGNFHPSPLMGGFGLKHPPPQILIKNTPVPADPPTTFNQSKLNSFITQYSTGQVSVEIEWELQKENSKRWNPEIQYTSNYYKSTSVDFAVNTEGVYSEPHPIGTRYLTRPL

SEQ ID NO: 1590 - protein, 736 aa, synthetic construct
  REGION 1..736: note = Description of Artificial Sequence: Synthetic polypeptide
MAADGYLPDWLEDNLSEGIREWWALKPGAPKPKANQQKQDDGRGLVLPGYKYLGPFNGLDKGEPVNAADAAALEHDKAYDQQLKAGDNPYLRYNHADAEFQERLQEDTSFGGNLGRAVFQAKKRVLEPLGLVEEGAKTAPGKKRPVEQSPQEPDSSSGIGKTGQQPAKKRLNFGQTGDSESVPDPQPLGEPPATPAAVGPTTMASGGGAPMADNNEGADGVGSSSGNWHCDSTWLGDRVITTSTRTWALPTYNNHLYKQISSASTGASNDNHYFGYSTPWGYFDFNRFHCHFSPRDWQRLINNNWGFRPKRLNFKLFNIQVKEVTDNNGVKTIANNLTSTVQVFTDSDYQLPYVLGSAHEGCLPPFPADVFMIPQYGYLTLNNGSQAVGRSSFYCLEYFPSQMLRTGNNFTFSYTFEDVPFHSSYAHSQSLDRLMNPLIDQYLYYLSRTQTTGGTANTQTLGFSQGGPNTMANQAKNWLPGPCYRQQRVSTTTGQNNNSNFAWTAGTKYHLNGRNSLANPGIAMATHKDDKERFFPSNGILIFGKQNAARDNADYSDVMLTSEEEIKTTNPVATEEYGIVADNLQQQNTAPQIGTVNSQGALPGMVWQNRDVYLQGPIWAKIPHTDGNFHPSPLMGGFGLKHPPPQILIKNTPVPADPPTTFNQSKLNSFITQYSTGQVSVEIEWELQKENSKRWNPEIQYTSNYYKSTSVDFAVNTEGVYSEPHPIGTRYLTRPL

SEQ ID NO: 1591 - protein, 737 aa, synthetic construct
  REGION 1..737: note = Description of Artificial Sequence: Synthetic polypeptide
MAADGYLPDWLEDNLSEGIREWWDLKPGAPKPKANQQKQDDGRGLVLPGYKYLGPFNGLDKGEPVNAADAAALEHDKAYDQQLKAGDNPYLRYNHADAEFQERLQEDTSFGGNLGRAVFQAKKRVLEPLGLVEEGAKTAPGKKRPVEPSPQRSPDSSTGIGKKGQQPARKRLNFGQTGDSESVPDPQPLGEPPATPAAVGPTTMASGGGAPMADNNEGADGVGNASGNWHCDSTWLGDRVITTSTRTWALPTYNNHLYKQISSASTGASNDNHYFGYSTPWGYFDFNRFHCHFSPRDWQRLINNNLGSRPKRLNFKLFIIQVKEVTTNDGVTTIANNLTSTVQVFSDSEYQLPYVLGSAHQGCLPPFPADVFMIPQYGYLTLNNGSQAVGRSSFYCLEYFPSQMLRTGNNFTFSYTFEDVPFHSSYAHSQSLDRLMNPLIDQYLYYLNRTQNQSGSAQNKDLLFSRGSPAGMSVQPKNWLPGPCYRQQRVSKTKTDNNNSNFTWTGASKYNLNGRESIINPGTAMASHKDDKDKFFPMSGVMIFGKESAGASNTALDNVMITDEEEIKATNPVATERFGTVAVNLQSSSTDPATGDVHVMGALPGMVWQDRDVYLQGPIWAKIPHTDGHFHPSPLMGGFGLKHPPPQILIKNTPVPANPPAEFSATKFASFITQYSTGQVSVEIEWELQKENSKRWNPEVQYTSNYAKSANVDFTVDNNGLYTEPRPIGTRYLTRPL

SEQ ID NO: 1592 - protein, 736 aa, synthetic construct
  REGION 1..736: note = Description of Artificial Sequence: Synthetic polypeptide
MAADGYLPDWLEDNLSEGIREWWALKPGAPKPKANQQKQDDGRGLVLPGYKYLGPFNGLDKGEPVNAADAAALEHDKAYDQQLKAGDNPYLRYNHADAEFQERLQEDTSFGGNLGRAVFQAKKRLLEPLGLVEEAAKTAPGKKRPVEQSPQEPDSSSGIGKTGQQPAKKRLNFGQTGDSESVPDPQPIGEPPATPAAVGPTTMASGGGAPMADNNEGADGVGNSSGNWHCDSTWLGDRVITTSTRTWALPTYNNHLYKQISSASTGASNDNHYFGYSTPWGYFDFNRFHCHFSPRDWQRLINNNWGFRPKRLNFKLFNIQVKEVTQNEGTKTIANNLTSTIQVFTDSEYQLPYVLGSAHQGCLPPFPADVFMIPQYGYLTLNNGSQAVGRSSFYCLEYFPSQMLRTGNNFTFSYTFEDVPFHSSYAHSQSLDRLMNPLIDQYLYYLSRTQTTGGTANTQTLGFSQGGPNTMANQAKNWLPGPCYRQQRVSTTTGQNNNSNFAWTAGTKYHLNGRNSLANPGIAMATHKDDKERFFPSNGILIFGKQNAARDNADYSDVMLTSEEEIKTTNPVATEEYGIVADNLQQQNTAPQIGTVNSQGALPGMVWQNRDVYLQGPIWAKIPHTDGNFHPSPLMGGFGLKHPPPQILIKNTPVPADPPTTFNQSKLNSFITQYSTGQVSVEIEWELQKENSKRWNPEIQYTSNYYKSTSVDFAVNTEGVYSDPHPIGTRYLTRPL

SEQ ID NO: 1593 - protein, 736 aa, synthetic construct
  REGION 1..736: note = Description of Artificial Sequence: Synthetic polypeptide
MAADGYLPDWLEDNLSEGIREWWALKPGAPKPKANQQEQDDGRGLVLPGYKYLGPFNGLDKGEPVNAADAAALEHDKAYDQQLKAGDNPYLRYNHADAEFQERLQEDTSFGGNLGRAVFQAKKRVLEPFGLVEEGAKTAPGKKRPVEQSPQEPDSSSGIGKTGQQPAKKRLNFGQTGDSESVPDPQPLGEPPAAPSGVGPNTMAAGGGAPMADNNEGADGVGSSSGNWHCDSTWLGDRVITTSTRTWALPTYNNHLYKQISSASTGASNDNHYFGYSTPWGYFDFNRFHCHFSPRDWQRLINNNWGFRPKRLNFKLFNIQVKEVTQNEGTKTIANNLTSTIQVFTDSEYQLPYVLGSAHQGCLPPFPADVFMIPQYGYLTLNNGSQAVGRSSFFCLEYFPSQMLRTGNNFTFSYTFEDVPFHSSYAHSQSLDRLMNPLIDQYLYYLSRTQTTGGTANTQTLGFSQGGPNTMANQAKNWLPGPCYRQQRVSTTTGQNNNSNFAWTAGTKYHLNGRNSLANPGIAMATHKDDKERFFPSNGILIFGKQNAARDNADYSDVMLTSEEEIKTTNPVATEEYGIVADNLQQQNTAPQIGTVNSQGALPGMVWQNRDVYLQGPIWAKIPHTDGNFHPSPLMGGFGLKHPPPQILIKNTPVPADPPTTFNQSKLNSFITQYSTGQVSVEIEWELQKENSKRWNPEIQYTSNYYKSTSVDFAVNTEGVYSEPHPIGTRYLTRPL

SEQ ID NO: 1594 - protein, 736 aa, synthetic construct
  REGION 1..736: note = Description of Artificial Sequence: Synthetic polypeptide
MAADGYLPDWLEDNLSEGIREWWDLKPGAPKPKANQQKQDDGRGLVLPGYKYLGPFNGLDKGEPVNAADAAALEHDKAYDQQLKAGDNPYLRYNHADAEFQERLQEDTSFGGNLGRAVFQAKKRVLEPLGLVEEGAKTAPGKKRPVEQSPQEPDSSSGIGKTGQQPAKKRLNFGQTGDSESVPDPQPLGEPPATPAAVGPTTMASGGGAPMADNNEGADGVGNASGNWHCDSTWLGDRVITTSTRTWALPTYNNHLYKQISSASTGASNDNHYFGYSTPWGYFDFNRFHCHFSPRDWQRLINNNWGFRPKRLNFKLFNIQVKEVTTNDGVTTIANNLTSTVQVFSDSEYQLPYVLGSAHQGCLPPFPADVFMIPQYGYLTLNNGSQAVGRSSFYCLEYFPSQMLRTGNNFTFSYTFEDVPFHSSYAHSQSLDRLMNPLIDQYLYYLNRTQNQSGSAQNKDLLFSRGSPAGMSVQPKNWLPGPCYRQQRVSKTKTDNNNSNFTWTGASKYNLNGRESIINPGTAMASHKDDKDKFFPMSGVMIFGKESAGASNTALDNVMITDEEEIKATNPVATERFGTVAVNLQNSSTDPATGDVHVMGALPGMVWQDRDVYLQGPIWAKIPHTDGHFHPSPLMGGFGLKHPPPQILIKNTPVPANPPAEFSATKFASFITQYSTGQVSVEIEWELQKENSKRWNPEVQYTSNYAKSANVDFTVDNNGLYTVPRPIGTRYLTRPL

SEQ ID NO: 1595 - protein, 736 aa, synthetic construct
  REGION 1..736: note = Description of Artificial Sequence: Synthetic polypeptide
MAADGYLPDWLEDNLSEGIREWWALKPGAPKPKANQQKQDDGRGLVLPGYKYLGPFNGLDKGEPVNAADAAALEHDKAYDQQLKAGDNPYLRYNHADAEFQERLQEDTSFGGNLGRAVFQAKKRLLEPLGLVEEGAKTAPGKKRPVEQSPQEPDSSSGIGKTGEQPAKKRLNFGQTGDSESVPDPQPLGEPPATPAAVGPTTMASGGGAPMADNNEGADGVGSASGNWHCDSTWLGDRVITTSTRTWALPTYNNHLYKQISSASTGASNDNHYFGYSTPWGYFDFNRFHCHFSPRDWQRLINNNWGFRPKRLNFKLFNIQVKEVTDNNGVKTIANNLTSTIQVFTDSEYQLPYVLGSAHQGCLPPFPADVFMIPQYGYLTLNNGSQAVGRSSFYCLEYFPSQMLRTGNNFPFSYTFEDVPFHSSYAHSQSLDRLMNPLIDQYLYYLSRTQTTGGTANTQTLGFSQGGPNTMANQAKNWLPGPCYRQQRVSTTTGQNNNSNFAWTAGTKYHLNGRNSLANPGIAMATHKDDKERFFPSNGILIFGKQNAARDNADYSDVMLTSEEEIKTTNPVATEEYGIVADNLQQQNTAPQIGTVNSQGALPGMVWQNRDVYLQGPIWAKIPHTDGNFHPSPLMGGFGLKHPPPQILIKNTPVPADPPTTFNQSKLNSFITQYSTGQVSVEIEWELQKENSKRWNPEIQYTSNYYKSTSVDFAVNTEGVYSEPHPIGTRYLTRPL

SEQ ID NO: 1596 - protein, 736 aa, synthetic construct
  REGION 1..736: note = Description of Artificial Sequence: Synthetic polypeptide
MAADGYLPDWLEDNLSEGIREWWALKPGAPKPKANQQKQDDGRGLVLPGYKYLGPFNGLDKGEPVNAADAAALEHDKAYDQQLKAGDNPYLRYNHADAEFQERLQEDTSFGGNLGRAVFQAKKRVLEPLGLVEEGAKTAPGKKRPVEQSPQEPDSSSGIGKTGQQPAKKRLNFGQTGDSESVPDPQPLGEPPATPAAVGPTTMASGGGAPMADNNEGADGVGSSSGNWHCDSQWLGDRVITTSTRTWALPTYNNHLYKQISSASTGASNDNHYFGYSTPWGYFDFNRFHCHFSPRDWQRLINNNWGFRPKRLNFKLFNIQVKEVTDNNGVKTIANNLTSTVQVFTDSEYQLPYVLGSAHQDCLPPFPADVFMIPQYGYLTLNNGSQAVGRSSFYCLEYFPSQMLRTGNNFTFSYTFEDVPFHSSYAHSQSLDRLMNPLIDQYLYYLSRTQTTGGTANTQTLGFSQGGPNTMANQAKNWLPGPCYRQQRVSTTTGQNNNSNFAWTAGTKYHLNGRNSLANPGIAMATHKDDKERFFPSNGILIFGKQNAARDNADYSDVMLTSEEEIKTTNPVATEEYGIVADNLQQQNTAPQIGTVNSQGALPGMVWQNRDVYLQGPIWAKIPHTDGNFHPSPLMGGFGLKHPPPQILIKNTPVPADPPTTFNQSKLNSFITQYSTGQVSVEIEWELQKENSKRWNPEIQYTSNYYKSTSVDFAVNTEGVYSEPHPIGTRYLTRPL

SEQ ID NO: 1597 - protein, 735 aa, synthetic construct
  REGION 1..735: note = Description of Artificial Sequence: Synthetic polypeptide
MAADGYLPDWLEDNLSEGIREWWDLKPGAPKPKANQQKQDDGRGLVLPGYKYLGPFNGLDKGEPVNAADAAALEHDKAYDQQLKAGDNPYLRYNHADAEFQERLQEDTSFGGNLGRAVFQAKKRVLEPLGLVEEGAKTAPGKKRPVEQSPQEPDSSSGIGKTGQQPAKKRLNFGQTGDSESVPDPQPLGEPPATPAAVGPTTMASGGGAPMADNNEGADGVGNASGNWHCDSTWLGDVITTSTRTWALPTYNNHLYKQISSASTGASNDNHYFGYSTPWGYFDFNRFHCHFSPRDWQRLINNNWGFRPKRLNFKLFNIQVKEVTQNEGTKTIANNLTSTIQVFTDSEYQLPYVLGSAHQGCLPPFPADVFMIPQYGYLTLNNGSQAVGRSSFYCLEYFPSQMLRTGNNFQFTYTFEDVPFHSSYAHSQSLDRLMNPLIDQYLYYLSRTQTTGGTANTQTLGFSQGGPNTMANQAKNWLPGPCYRQQRVSTTTGQNNNSNFAWTAGTKYHLNGRNSLANPGIAMATHKDDKERFFPSNGILIFGKQNAARDNADYSDVILTSEEEIKTTNPVATEEYGIVADNLQQQNTAPQIGTVNSQGALPGMVWQNRDVYLQGPIWAKIPHTDGNFHPSPLMGGFGLKHPPPQILIKNTPVPADPPTTFNQSKLNSFITQYSTGQVSVEIEWELQKENSKRWNPEIQYTSNYYKSTSVDFAVNTEGVYSEPHPIGTRYLTRPL

SEQ ID NO: 1598 - protein, 736 aa, synthetic construct
  REGION 1..736: note = Description of Artificial Sequence: Synthetic polypeptide
MAADGYLPDWLEDTLSEGIRQWWKLKPGPPPPKPAERHKDDSRGLVLPGYKYLGPFNGLDKGEPVNEADAAALEHDKAYDRQLDSGDNPYLKYNHADAEFQERLKEDTSFGGNLGRAVFQAKKRVLEPFGLVEEGAKTAPGKKRPVEQSPQEPDSSSGIGKTGQQPAKKRLNFGQTGDSESVPDPQPLGEPPATPAAVGPTTMASGGGAPMADNNEGADGVGNASGNWHCDSTWLGDRVITTSTRTWALPTYNNHLYKQISSTSTGASNDNHYFGYSTPWGYFDFNRFHCHFSPRDWQRLINNNWGFRPKRLNFKLFNIQVKEVTDNNGVKTIANNLTSTVQVFTDSEYQLPYVLGSAHQGCLPPFPADVFMIPQYGYLTLNNGSQAVGRSSFYCLEYFPSQMLRTGNNFTFSYTFEDVPFHSSYAHSQSLDRLMNPLIDQYLYYLSRTQTTGGTANTQTLGFSQGGPNTMANQAKNWLPGPCYRQQRVSTTTGQNNNSNFAWTAGTKYHLNGRNSLANPGIAMATHKDDKERFFPSNGILIFGKQNAARDNADYSDVMLTSEEEIKTTNPVATEEYGIVADNLQQQNTAPQIGTVNSQGALPGMVWQNRDVYLQGPIWAKIPHTDGNFHPSPLMGGFGLKHPPPQILIKNTPVPADPPTTFNQSKLNSFITQYSTGQVSVEIEWELQKENSKRWNPEIQYTSNYYKSTSVDFAVNTEGVYSEPHPIGTRYLTRPL

SEQ ID NO: 1599 - protein, 735 aa, synthetic construct
  REGION 1..735: note = Description of Artificial Sequence: Synthetic polypeptide
MAADGYLPDWLEDNLSEGIREWWDLKPGAPKPKANQQKQDDGRGLVLPGYKYLGPFNGLDKGEPVNAADAAALEHDKAYDRQLDSGDNPYLRYNHADAEFQERLKEDTSFGGNLGRAVFQAKKRVLEPFGLVEEGAKTAPGKKRPVEQSPQEPDSSSGIGKTGQQPAKKRLNFGQTGDSESVPDPQPLGEPPATPAAVGPTTMASGGGAPMADNNEGADGVGNASGNWHCDSTWLGDRVITTSTRTWALPTYNNHLYKQISSASTGASNDNHYFGYSTPWGYFDFNRFHCHFSPRDWQRLINNNWGFRPKRLNFKLFNIQVKEVTQNEGTKTIANNLTSTIQVFTDSEYQLPYVLGSAHQGCLPPFPADVFMIPQYGYLTLNNGSQAVGRSSFYCLEYFPSQMLRTGNNFQFTYTFEDVPFHSSYAHSQSLDRLMNPLIDQYLYYLSRTQTTGGTANTQTLGFSQGGPNTMANQAKNWLPGPCYRQQRVSTTTGQNNNSNFAWTAGTKYHLNGRNSLANPGIAMATHKDDRSVFFQYRDPDFGKQNAARDNADYSDVMLTSEEEIKTTNPVATEEYGIVADNLQQQNTAPQIGTVNSQGALPGMVWQNRDVYLQGPIWAKIPHTDGNFHPSPLMGGFGLKHPPPQILIKNTPVPADPPTTFNQSKLNSFITQYSTGQVSVEIEWELQKENSKRWNPEIQYTSNYYKSTSVDFAVNTEGVYSEPHPIGTRYLTRPL

SEQ ID NO: 1600 - protein, 736 aa, synthetic construct
  REGION 1..736: note = Description of Artificial Sequence: Synthetic polypeptide
MAADGYLPDWLEDNLSEGIREWWALKPGAPKPKANQQKQDDGRGLVLPGYKYLGPFNGLDKGEPVNAADAAALEHDKAYDQQLKAGDNPYLKYNHADAEFQERLQGDTSFGGNLGRAVFQAKKRVLEPLGLVEEAAKTAPGKKRPVEQSPQEPDSSAGIGKSGAQPAKKRLNFGQTGDTESVPDPQPLGEPPAAPSGVGPNTMAAGGGAPMADNNEGADGVGSSSGNWHCDSQWLGDRVITTSTRTWALPTYNNHLYKQISSASTGASNDNHYFGYSTPWGYFDFNRFHCHFSPRDWQRLINNNWGFRPKRLNFKLFNIQVKEVTDNNGVKTIANNLTSTVQVFTDSDYQLPYVLGSAHEGCLPPFPADVFMIPQYGYLTLNNGSQAVGRSSFYCLEYFPSQMLRTGNNFQFTYTFEDVPFHSSYAHSQSLDRLMNPLIDQYLYYLSRTQTTGGTANTQTLGFSQGGPNTMANQAKNWLPGPCYRQQRVSTTTGQNNNSNFAWTAGTKYHLNGRNSLANPGIAMATHKDDKERFFPSNGILIFGKQNAARDNADYSDVMLTSEEEIKTTNPVATEEYGIVADNLQQQNTAPQIGTVNSQGALPGMVWQNRDVYLQGPIWAKIPHTDGNFHPSPLMGGFGLKHPPPQILIKNTPVPADPPTTFNQSKLNSFITQYSTGQVSVEIEWELQKENSKRWNPEIQYTSNYYKSTSVDFAVNTEGVYSEPHPIGTRYLTRPL

SEQ ID NO: 1601 - protein, 736 aa, synthetic construct
  REGION 1..736: note = Description of Artificial Sequence: Synthetic polypeptide
MAADGYLPDWLEDTLSEGIRQWWKLKPGPPPPKPAERHKDDSRGLVLPGYKYLGPFNGLDKGEPVNEADAAALEHDKAYDRQLDSGDNPYLKYNHADAEFQERLKEDTSFGGNLGRAVFQAKKRVLEPFGLVEEAAKTAPGKKRPVEQSPQEPDSSSGIGKTGQQPAKKRLNFGQTGDSESVPDPQPLGEPPATPAAVGPTTMASGGGAPMADNNEGADGVGNASGNWHCDSTWLGDRVITTSTRTWALPTYNNHLYKQISSASTGASNDNHYFGYSTPWGYFDFNRFHCHFSPRDWQRLINNNWGFRPKRLNFKLFNIQVKEVTDNNGVKTIANNLTSTVQVFTDSDYQLPYVLGSAHEGCLPPFPADVFMIPQYGYLTLNNGSQAVGRSSFYCLEYFPSQMLRTGNNFTFSYTFEDVPFHSSYAHSQSLDRLMNPLIDQYLYYLSRTQTTGGTANTQTLGFSQGGPNTMANQAKNWLPGPCYRQQRVSTTTGQNNNSNFAWTAGTKYHLNGRNSLANPGIAMATHKDDKERFFPSNGILIFGKQNAARDNADYSDVMLTSEEEIKTTNPVATEEYGIVADNLQQQNTAPQIGTVNSQGALPGMVWQNRDVYLQGPIWAKIPHTDGNFHPSPLMGGFGLKHPPPQILIKNTPVPADPPTTFNQSKLNSFITQYSTGQVSVEIEWELQKENSKRWNPEIQYTSNYYKSTSVDFAVNTEGVYSEPHPIGTRYLTRPL

SEQ ID NO: 1602 - protein, 736 aa, synthetic construct
  REGION 1..736: note = Description of Artificial Sequence: Synthetic polypeptide
MAADGYLPDWLEDNLSEGIREWWALKPGAPKPKANQQKQDDGRGLVLPGYKYLGPFNGLDKGEPVNAADAAALEHDKAYDQQLKAGDNPYLRYNHADAEFQERLQEDTSFGGNLGRAVFQAKKRVLEPLGLVEEGAKTAPGKKRPVEQSPQEPDSSSGIGKTGQQPAKKRLNFGQTGDSESVPDPQPLGEPPATPAAVGPTTMASGGGAPMADNNEGADGVGSSSGNWHCDSTWLGDRVITTSTRTWALPTYNNHLYKQISSASTGASNDNHYFGYSTPWGYFDFNRFHCHFSPRDWQRLINNNWGFRPKRLNFKLFNIQVKEVTDNNGVKTIANNLTSTVQVFTDSEYQLPYVLGSAHQGCLPPFPADVFMIPQYGYLTLNNGSQAVGRSSFYCLEYFPSQMLRTGNNFTFSYTFEDVPFHSSYAHSQSLDRLMNPLIDQYLYYLSRTQTTGGTANTQTLGFSQGGPNTMANQAKNWLPGPCYRQQRVSTTTGQNNNSNFAWTAGTKYHLNGRNSLANPGIAMATHKDDKERFFPSNGILIFGKQNAARDNADYSDVMLTSEEEIKTTNPVATEEYGIVADNLQQQNTAPQIGTVNSQGALPGMVWQNRDVYLQGPIWAKIPHTDGNFHPSPLMGGFGLKHPPPQILIKNTPVPADPPTTFNQSKLNSFITQYSTGQVSVEIEWELQKENSKRWNPEIQYTSNYYKSTSVDFAVNTEGVYSEPHPIGTRYLTRPL

SEQ ID NO: 1603 - protein, 737 aa, synthetic construct
  REGION 1..737: note = Description of Artificial Sequence: Synthetic polypeptide
MAADGYLPDWLEDNLSEGIREWWALKPGAPKPKANQQKQDDGRGLVLPGYKYLGPFNGLDKGEPVNAADAAALEHDKAYDQQLKAGDNPYLRYNHADAEFQERLQEDTSFGGNLGRAVFQAKKRVLEPLGLVEEGAKTAPGKKRPVEQSPQEPDSSSGIGKTGQQPAKKRLNFGQTGDTESVPDPQPIGEPPAAPSGVGSLTMASGGGAPVADNNEGADGVGSSSGNWHCDSQWLGDRVITTSTRTWALPTYNNHLYKQISNSTSGGSSNDNAYFGYSTPWGYFDFNRFHCHFSPRDWQRLINNNWGFRPKRLNFKLFNIQVKEVTQNEGTKTIANNLTSTIQVFTDSEYQLPYVLGSAHQGCLPPFPADVFMIPQYGYLTLNNGSQAVGRSSFYCLEYFPSQMLRTGNNFQFTYTFEDVPFHSSYAHSQSLDRLMNPLIDQYLYYLSRTQTTGGTANTQTLGFSQGGPNTMANQAKNWLPGPCYRQQRVSTTTGQNNNSNFAWTAGTKYHLNGRNSLANPGIAMATHKDDKERFFPSNGILIFGKQNAARDNADYSDVMLTSEEEIKTTNPVATEEYGIVADNLQQQNTAPQIGTVNSQGALPGMVWQNRDVYLQGPIWAKIPHTDGNFHPSPLMGGFGLKHPPPQILIKNTPVPADPPTTFNQSKLNSFITQYSTGQVSVEIEWELQKENSKRWNPEIQYTSNYYKSTSVDFAVNTEGVYSEPHPIGTRYLTRPL

SEQ ID NO: 1604 - protein, 736 aa, synthetic construct
  REGION 1..736: note = Description of Artificial Sequence: Synthetic polypeptide
MAADGYLPDWLEDNLSEGIREWWALKPGAPKPKANQQKQDDGRGLVLPGYKYLGPFNGLDKGEPVNAADAAALEHDKAYDQQLKAGDNPYLKYNHADAEFQERLQGDTSFGGNLGRAVFQAKKRVLEPLGLVEEAAKTAPGKKRPVEQSPQEPDSSAGIGKSGAQPAKKRLNFGQTGDTESVPDPQPLGEPPAAPSGVGPNTMAAGGGAPMADNNEGADGVGSSSGNWHCDSQWLGDRVITTSTRTWALPTYNNHLYKQISSASTGASNDNHYFGYSTPWGYFDFNRFHCHFSPRDWQRLINNNWGFRPKRLNFKLFNIQVKEVTDNNGVKTIANNLTSTVQVFTDSEYQLPYVLGSAHQGCLPPFPADVFMIPQYGYLTLNNGSQAVGRSSFYCLEYFPSQMLRTGNNFTFSYTFEDVPFHSSYAHSQSLDRLMNPLIDQYLYYLSRTQTTGGTANTQTLGFSQGGPNTMANQAKNWLPGPCYRQQRVSTTTGQNNNSNFAWTAGTKYHLNGRNSLANPGIAMATHKDDKERFFPSNGILIFDKQNAARDNADYSDVMLTSEEEIKTTNPVATEEYGIVADNLQQQNTAPQIGTVNSQGALPGMVWQNRDVYLQGPIWAKIPHTDGNFHPSPLMGGFGLKHPPPQILIKNTPVPADPPTTFNQSKLNSFITQYSTGQVSVEIEWELQKENSKRWNPEIQYTSNYYKSTSVDFAVNTEGVYSEPHPIGTRYLTRPL

SEQ ID NO: 1605 - protein, 736 aa, synthetic construct
  REGION 1..736: note = Description of Artificial Sequence: Synthetic polypeptide
MAADGYLPDWLEDTLSEGIRQWWKLKPGPPPPKPAERHKDDSRGLVLPGYKYLGPFNGLDKGEPVNEADAAALEHDKAYDRQLDSGDNPYLKYNHADAEFQERLKEDTSFGGNLGRAVFQAKKRVLEPLGLVEEPVKTAPGKKRPVEHSPVEPDSSSGTGKAGQQPARKRLNFGQTGDSESVPDPQPLGEPPATPAAVGPNTMATGSGAPMADNNEGADGVGNSSGNWHCDSTWMGDRVITTSTRTWALPTYNNHLYKQISSASTGASNDNHYFGYSTPWGYFDFNRFHCHFSPRDWQRLINNNWGFRPKRLNFKLFNIQVKEVTDNNGVKTIANNLTSTIQVFTDSEYQLPYVLGSAHQGCLPPFPADVFMIPQYGYLTLNNGSQAVGRSSFYCLEYFPSQMLRTGNNFTFSYTFEDVPFHSSYAHSQSLDRLMNPLIDQYLYYLSRTQTTGGKANTQTLGFSQGGPNTMANQAKNWLPGPCYRQQRVSTTTGQNNNSNFAWTAGTKYHLNGRNSLANPGIAMATHKDDKERFFPSNGILIFGKQNAARDNADYSDVMLTSEEEIKTTNPVATEEYGIVADNLQQQNTAPQIGTVNSQGALPGMVWQNRDVYLQGPIWAKIPHTDGNFHPSPLMGGFGLKHPPPQILIKNTPVPADPPTTFNQSKLNSFITQYSTGQVSVEIEWELQKENSKRWNPEIQYTSNYYKSTSVDFAVNTEGVYSEPHPIGTRYLTRPL

SEQ ID NO: 1606 - protein, 736 aa, synthetic construct
  REGION 1..736: note = Description of Artificial Sequence: Synthetic polypeptide
MAADGYLPDWLEDNLSEGIREWWALKPGAPKPKANQQKQDDGRGLVLPGYKYLGPFNGLDKGEPVNAADAAALEHDKAYDQQLKAGDNPYLRYNHADAEFQERLQEDTSFGGNLGRAVFQAKKRVLEPFGLVEEGAKTAPGKKRPVEQSPQEPDSSSGIGKTGQQPAKKRLNFGQTGDSESVPDPQPLGEPPATPAAVGPTTMASGGGAPMADNNEGADGVGNASGNWHCDSTWLGDRVITTSTRTWALPTYNNHLYKQISSASTGASNDNHYFGYSTPWGYFDFNRFHCHFSPRDWQRLINNNWGFRPKRLNFKLFNIQVKEVTDNNGVKTIANNLTSTVQVFTDSEYQLPYVLGSAHQGCLPPFPADVFMIPQYGYLTLNNGSQAVGRSSFYCLEYFPSQMLRTGNNFTFSYTFEDVPFHSSYAHSQSLDRLMNPLIDQYLYYLSRTQTTGGTGNTQTLGFSQGGPNTMANQAKNWLPGPCYRQQRVSTTTGQNNNSNFAWTAGTKYHLNGRNSLANPGIAMATHKDDKERFFPSNGILIFGKQNAARDNADYSDVMLTSEEEIKTTNPVATEEYGIVADNLQQQNTAPQIGTVNSQGALPGMVWQNRDVYLQGPIWAKIPHTDGNFHPSPLMGGFGLKHPPPQILIKNTPVPADPPTTFNQSKLNSFITQYSTGQVSVEIEWELQKENSKRWNPEIQYTSNYYKSTSVDFAVNTEGVYSEPHPIGTRYLTRPL

SEQ ID NO: 1607 - protein, 736 aa, synthetic construct
  REGION 1..736: note = Description of Artificial Sequence: Synthetic polypeptide
MAADGYLPDWLEDNLSEGIREWWDLKPGAPKPKANQQKQDDGRGLVLPGYKYLGPFNGLDKGEPVNAADAAALEHDKAYDQQLKAGDNPYLRYNHADAEFQERLQEDTSFGGNLGRAVFQAKKRVLEPLGLVEEGAKTAPGKKRPVEQSPQEPDSSSGIGKTGQQPAKKRLNFGQTGDSESVPDPQPLGEPPATPAAVGPTTMASGGGAPMADNNEGADGVGSSSGNWHCDSTWLGDRVITTSTRTWALPTYNNHLYKQISSASTGASNDNHYFGYSTPWGYFDFNRFHCHFSPRDWQRLINNNWGFRPKRLNFKLFNIQVKEVTQNEGTKTIANNLTSTIQVFTDSEYQLPYVLGSAHQGCLPPFPADVFMIPQYGYLTLNNGSQAVGRSSFYCLEYFPSQMLRTGNNFTFSYTFEDVPFHSSYAHSQSLDRLMNPLIDQYLYYLSRTQTTGGTANTQTLGFSQGGPNTMANQAKNWLPGPCYRQQRVSTTTGQNNNSNFAWTAGTKYHLNGRNSLANPGIAMATHKDDKERFFPSNGILIFGKQNAARDNADYSDVMLTSEEEIKTTNPVATEEYGIVADNLQQQNTAPQIGTVNSQGALPGMVWQNRDVYLQGPIWAKIPHTDGNFHPSPLMGGFGLKHPPPQILIKNTPVPADPPTTFNQSKLNSFITQYSTGQVSVEIEWELQKENSKRWNPEIQYTSNYYKSTSVDFAVNTEGVYSEPHPIGTRYLTRPL

SEQ ID NO: 1608 - protein, 736 aa, synthetic construct
  REGION 1..736: note = Description of Artificial Sequence: Synthetic polypeptide
MAADGYLPDWLEDNLSEGIREWWALKPGAPKPKANQQKQDDGRGLVLPGYKYLGPFNGLDKGEPVNAADAAALEHDKAYDQQLKAGDNPYLRYNHADAEFQERLQEDTSFGGNLGRAVFQAKKRVLEPLGLVEEGAKTAPGKKRPVEQSPQEPDSSSGIGKTGQQPAKKRLNFGQTGDSESVPDPQPLGEPPATPAAVGPTTMAAGGGAPMADNNEGADGVGSSSGNWHCDSTWMGDRVITTSTRTWALPTYNNHLYKQISSASTGASNDNHYFGYSTPWGYFDFNRFHCHFSPRDWQRLINNNWGFRPKRLSFKLFNIQVKEVTQNEGTKTIANNLTSTIQVFTDSEYQLPYVLGSAHQGCLPPFPADVFMIPQYGYLTLNNGSQAVGRSSFYCLEYFPSQMLRTGNNFTFSYTFEDVPFHSSYAHSQSLDRLMNPLIDQYLYYLSRTQTTGGTANTQTLGFSQGGPNTMANQAKNWLQGPCYRQQRVSTTTGQNNNSNFAWTAGTKYHLNGRNSLANPGIAMATHKDDKERFFPSNGILIFGKQNAARDNADYSDVMLTSEEEIKTTNPVATEEYGIVADNLQQQNTAPQIGTVNSQGALPGMVWQNLDVYLQGPIWAKIPHTDGNFHPSPLMGGFGLKHPPPQILIKNTPVPADPPTTFNQSKLNSFITQYSTGQVSVEIEWELQKENSKRWNPEIQYTSNYYKSTSVDFAVNTEGVYSEPHPIGTRYLTRPL

SEQ ID NO: 1609 - protein, 737 aa, synthetic construct
  REGION 1..737: note = Description of Artificial Sequence: Synthetic polypeptide
MAADGYLPDWLEDNLSEGIREWWALKPGAPKPKANQQKQDDGRGLVLPGYKYLGPFNGLDKGEPVNAADAAALEHDKAYDQQLKAGDNPYLRYNHADAEFQERLQEDTSFGGNLGRAVFQAKKRVLEPLGLVEEGAKTAPGKKRPVEPSPQRSPDSSSGIGKTGQQPAKKRLNFGQTGDSESVPDPQPLGEPPATPAAVGPTTMASGGGAPMADNNEGADGVGNASGNWHCDSQWLGDRVITTSTRTWALPTYNNHLYKQISSASTGASNDNHYFGYSTPWGYFDFNRFHCHFSPRDWQRLINNNWGFRPKRLNFKLFNIQVKEVTDNNGVKTIANNLTSTVQVFTDSDYQLPYVLGSAHEGCLPPFPADVFMIPQYGYLTLNNGSQAVGRSSFYCLEYFPSQMLRTGNNFQFTYTFEDVPFHSSYAHSQSLDRLMNPLIDQYLYYLSRTQTTGGTANTQTLGFSQGGPNTMANQAKNWVPGPCYRQQRVSTATGQNNNSNFAWTAGTKYHLKGRNSLANPGIAMATHKDDKERFFPSNGILIFGKQNAARDNADYSDVMLTSEEEIKTTNPVATEEYGIVADNLQQQNTAPQIGTVNSQGALPGMVWQNRDVYLQGPIWAKIPHTDGNFHPSPLMGGFGLKHPPPQILIKNTPVPADPPTTFNQSKLNSFITQYSTGQVSVEIEWELQKENSKRWNPEIQYTSNYYKSTSVDFAVNTEGVYSEPHPIGTRYLTRPL

SEQ ID NO: 1610 - protein, 737 aa, synthetic construct
  REGION 1..737: note = Description of Artificial Sequence: Synthetic polypeptide
  VARIANT 226: note = Xaa can be any naturally occurring amino acid
  VARIANT 233: note = Xaa can be any naturally occurring amino acid
  VARIANT 239: note = Xaa can be any naturally occurring amino acid
  VARIANT 250: note = Xaa can be any naturally occurring amino acid
  VARIANT 253: note = Xaa can be any naturally occurring amino acid
  VARIANT 255: note = Xaa can be any naturally occurring amino acid
MAADGYLPDWLEDTLSEGIRQWWKLKPGPPPPKPAERHKDDSRGLVLPGYKYLGPFNGLDKGEPVNEADAAALEHDKAYDRQLDSGDNPYLKYNHADAEFQERLKEDTSFGGNLGRAVFQAKKRVLEPLGLVEEGAKTAPGKKRPVEQSPQEPDSSSGIGKTGQQPAKKRLNFGQTGDSESVPDPQPLGEPPATPSGVGPNTMAAGGGAPMADNNEGADGVGSSSXNWHCDSXWLGDRXITTSTRTWALXTYXNXLYKQISNSTSGGATNDNTYFGYSTPWGYFDFNRFHCHFSPRDWQRLINNNWGFRPKRLNFKLFNIQVKEVTQNEGTKTIANNLTSTIQVFTDSEYQLPYVLGSAHQGCLPPFPADVFMIPQYGYLTLNNGSQAVGRSSFYCLEYFPSQMLRTGNNFQFTYTFEDVPFHSSYAHSQSLDRLMNPLIDQYLYYLSRTQTTGGTANTQTLGFSQGGPNTMANQAKNWLPGPCYRQQRVSTTTGQNNNSNFAWTAGTKYHLNGRNSLANPGIAMATHKDDKERFFPSNGILIFGKQNAARDNADYSDVMLTSEEEIKTTNPVATEEYGIVADNLQQQNTAPQIGTVNSQGALPGMVWQNRDVYLQGPIWAKIPHTDGNFHPSPLMGGFGLKHPPPQILIKNTPVPADPPTTFSQAKLASFITQYSTGQVSVEIEWELQKENSKRWNPEVQYTSNYAKSANVDFTVDNNGLYTEPRPIGTRYLTRPL

SEQ ID NO: 1611 - protein, 737 aa, synthetic construct
  REGION 1..737: note = Description of Artificial Sequence: Synthetic polypeptide
MAADGYLPDWLEDNLSEGIREWWDLKPGAPKPKANQQKQDDGRGLVLPGYKYLGPFNGLDKGEPVNAADAAALEHDKAYDQQLKAGDNPYLRYNHADAEFQERLQEDTSFGGNLGRAVFQAKKRVLEPLGLVEEGAKTAPGKKRPVEPSPQRSPDSSTGIGKKGQQPAKKRLNFGQTGDSESVPDPQPIGEPPAGPSGVGSLTMASGGGAPVADNNEGADGVGSSSGNWHCDSQWLGDRVITTSTRTWALPTYNNHLYKQISSASTGASNDNHYFGYSTPWGYFDFNRFHCHFSPRDWQRLINNNWGFRPKRLNFKLFNIQVKEVTDNDGVKTIANNLTSTIQVFTDSEYQLPYVLGSAHQGCLPPFPADVFMIPQYGYLTLNNGSQAVGRSSFYCLEYFPSQMLRTGNNFTFSYTFEDVPFHSSYAHSQSLDRLMNPLIDQYLYYLSRTQTTGGTANTQTLGFSQGGPNTMANHAKNWLPGPCYRQQRVSTTTGQNNNSNFAWTAGTKYHLNGRNSLANPGIAMATHKDDKERFFPSNGILIFGKQNAARDNADYSDVMLTSEEEIKTTNPVATEEYGIVADNLQQQNTAPQIGTVNSQGALPGMVWQNRDVYLQGPIWAKIPHTDGNFHPSPLMGGFGLKHPPPQILIKNTPVPADPPTTFNQSKLNSFITQYSTGQVSVEIEWELQKENSKRWNPEIQYTSNYYKSTSVDFAVNTEGVYSEPHPIGTRYLTRPL

SEQ ID NO: 1612 - protein, 736 aa, synthetic construct
  REGION 1..736: note = Description of Artificial Sequence: Synthetic polypeptide
MAADGYLPDWLEDTLSEGIRQWWKLKPGPPPPKPAERHKDDSRGLVLPGYKYLGPFNGLDKGEPVNEADAAALEHDKAYDRQLDSGDNPYLKYNHADAEFQERLKEDTSFGGNLGRAVFQAKKRVLEPLGLVEEPVKTAPGKKRPVEHSPVEPDSSSGTGKAGQQPAKKRLNFGQTGDSESVPDPQPLGEPPATPAAVGPTTMASGGGAPMADNNEGADGVGNASGNWHCDSTWLGDRVITTSTRTWALPTYNNHLYKQISSASTGASNDNHYFGYSTPWGYFDFNRFHCHFSPRDWQRLINNNWGFRPKRLNFKLFNIQVKEVTQNEGTKTIANNLTSTIQVFTDSEYQLPYVLGSAHQGCLPPFPADVFMIPQYGYLTLNNGSQAVGRSSFYCLEYFPSQMLRTGNNFQFTYTFEDVPFHSSYAHSQSLDRLMNPLIDQYLYYLSRTQTTGGTANTQTLGFSQGGPNTMANQAKNWLPGPCYRQQRVSTTTGQNNNSNFAWTAGTKYHLNGRNSLANPGIAMATHKDDKERFFPSNGILIFGKQNAARDNADYSDVMLTSEEEIKTTNPVATEEYGIVADNLQQQNTAPQIGTVNSQGALPGMVWQNRDVYLQGPIWAKIPHTDGNFHPSPLMGGFGLKHPPPQILIKNTPVPADPPTTFNQSKLNSFITQYSTGQVSVEIEWELQKENSKRWNPEIQYTSNYYKSTSVDFAVNTEGVYSEPHPIGTRYLTRPL

SEQ ID NO: 1613 - protein, 736 aa, synthetic construct
  REGION 1..736: note = Description of Artificial Sequence: Synthetic polypeptide
MAADGYLPDWLEDNLSEGIREWWALKPGAPKPKANQQKQDDGRGLVLPGYKYLGPFNGLDKGEPVNAADAAALEHDKAYDQQLQAGDNPYLRYNHADAEFQERLQGDTSFGGNLGRAVFQAKKRVLEPLGLVEEGAKTAPGKKRPVEQSPQEPDSSSGIGKTGQQPAKKRLNFGQTGDSESVPDPQPLGEPPATPAAVGPTTMASGGGAPMADNNEGADGVGNASGNWHCDSTWLGDRVITTSTRTWALPTYNNHLYKQISSASTGASNDNHYFGYSTPWGYFDFNRFHCHFSPRDWQRLINNNWGFRPKRLNFKLFNIQVKEVTDNNGVKTIANNLTSTIQVFTDSEYQLPYVLGSAHQGCLPPFPADVFMIPQYGYLTLNNGSQAVGRSSFYCLEYFPSQMLRTGNNFQFTYTFEDVPFHSSYAHSQSLDRLMNPLIDQYLYYLSRTQTTGGTANTQTLGFSQGGPNTMANQAKNWLPGPCYRQQRVSTTTGQNNNSNFAWTAGTKYHLNGRNSLANPGIAMATHKDDKERFFPSNGILIFGKQNAARDNADYSDVMLTSEEEIKTTNPVATEEYGIVADNLQQQNTAPQIGTVNSQGALPGMVWQNRDVYLQGPIWAKIPHTDGNFHPSPLMGGFGLKHPPPQILIKNTPVPADPPTTFNQSKLNSFITQYSTGQVSVEIEWELQKENSKRWNPEIQYTSNYYKSTSVDFAVNTEGVYSEPHPIGTRYLTRPL

SEQ ID NO: 1614 - protein, 738 aa, synthetic construct
  REGION 1..738: note = Description of Artificial Sequence: Synthetic polypeptide
MAADGYLPDWLEDTLSEGIRQWWKLKPGPPPPKPAERHKDDSRGLVLPGYKYLGPFNGLDKGEPVNAADAAALEHDKAYDQQLKAGDNPYLRYNHADAEFQERLKEDTSFGGNLGRAVFQAKKRVLEPLGLVEEGAKTAPGKKRPVEPSPQRSPDSSTGIGKKGQQPARKRLNFGQTGDSESVPDPQPLGEPPAAPSGVGPNTMAAGGGAPMADNNEGADGVGSSSGNWHCDSQWLGDRVITTSTRTWALPTYNNHLYKQISNSTSGGSSNDNAYFGYSTPWGYFDFNRFHCHFSPRDWQRLINNNWGFRPKRLNFKLFNIQVKEVTDNNGVKTIANNLTSTVQVFTDSEYQLPYVLGSAHQGCLPPFPADVFMIPQYGYLTLNNGSQAVGRSSFYCLEYFPSQMLRTGNNFTFSYTFEDVPFHSSYAHSQSLDRLMNPLIDQYLYYLSRTQTTGGTANTQTLGFSQGGPNTMANQAKNWLPGPCYRQQRVSTTTGQNNNSNFAWTAGTKYHLNGRNSLANPGIAMATHKDDKERFFPSNGILIFGKQNAARDNADYSDVMLTSEEEIKTTNPVATEEYGIVADNLQQQNTAPQIGTVNSQGALPGMVWQNRDVYLQGPIWAKIPHTDGHFHPSPLMGGFGLKHPPPQILIKNTPVPANPPTTFNQSKLNSFITQYSTGQVSVEIEWELQKENSKRWNPEVQYTSNYAKSANVDFTVDNNGLYTEPRPIGTRYLTRPL

SEQ ID NO: 1615 - protein, 738 aa, synthetic construct; identical to SEQ ID NO: 1614
  REGION 1..738: note = Description of Artificial Sequence: Synthetic polypeptide

SEQ ID NO: 1616 - protein, 736 aa, synthetic construct
  REGION 1..736: note = Description of Artificial Sequence: Synthetic polypeptide
MAADGYLPDWLEDNLSEGIREWWALKPGAPKPKANQQKQDDGRGLVLPGYKYLGPFNGLDKGEPVNAADAAALEHDKAYDQQLKAGDNPYLRYNHADAEFQERLQEDTSFGGNLGRAVFQAKKRLLEPLGLVEEGAKTAPGKKRPVEQSPQEPDSSSGIGKTGQQPAKKRLNFGQTGDSESVPDPQPLGEPPATPAAVGPTTMASGGGAPMADNNEGADGVGNSSGNWHCDSTWMGDRVITTSTRTWALPTYNNHLYKQISSASTGASNDNHYFGYSTPWGYFDFNRFHCHFSPRDWQRLINNNWGFRPKRLNFKLFNIQVKEVTQNEGTKTIANNLTSTIQVFTDSEYQLPYVLGSAHQGCLPPFPADVFIIPQYGYLTLNNGSQAVGRSSFYCLEYFPSQMLRTGNNFTFSYTFEDVPFHSSYAHSQSLDRLMNPLIDQYLYYLSRTQTTGGTANTQTLGFSQGGPNTMANQAKNWLPGPCYRQQRVSTTTGQNNNSNFAWTAGTKYHLNGRNSLANPGIAMATHKDDKERFFPSNGILIFGKQNAARDNADYSDVMLTSEEEIKTTNPVATEEYGIVADNLQQQNTAPQIGTVNSQGALPGMVWQNRDVYLQGPIWAKIPHTDGNFHPSPLMGGFGLKHPPPQILIKNTPVPADPPTTFNQSKLNSFITQYSTGQVSVEIEWELQKENSKRWNPEIQYTSNYYKSTSVDFAVNTEGVYSEPHPIGTRYLTRPL

SEQ ID NO: 1617 - protein, 736 aa, synthetic construct
  REGION 1..736: note = Description of Artificial Sequence: Synthetic polypeptide
MAADGYLPDWLEDNLSEGIREWWALKPGAPKPKANQQKQDDGRGLVLPGYKYLGPFNGLDKGEPVNAADAAALEHDKAYDQQLKAGDNPYLRYNHADAEFQERLQEDTSFGGNLGRAVFQAKKRVLEPFGLVEEAAKTAPGKKRPVEQSPQEPDSSSGIGKTGQQPAKKRLNFGQTGDSESVPDPQPLGEPPATPAAVGPTTMASGGGAPMADNNEGADGVGNASGNWHCDSTWLGDRVITTSTRTWALPTYNNHLYKQISSASTGASNDNHYFGYSTPWGYFDFNRFHCHFSPRDWQRLINNNWGFRPKRLNFKLFNIQVKEVTQNEGTKTIANNLTSTIQVFTDSEYQLPYVLGSAHQGCLPPFPADVFMIPQYGYLTLNNGSQAVGRSSFYCLEYFPSQMLRTGNNFTFSYTFEDVPFHSSYAHSQSLDRLMNPLIDQYLYYLSRTQTTGGTANTQTLGFSQGGPNTMANHAKNWLPGPCYRQQRVSTTTGQNNNSNFAWTAGTKYHLNGRNSLANPGIAMATHKDDKERFFPSNGILIFGKQNAARDNADYSDVMLTSEEEIKTTNPVATEEYGIVADNLQQQNTAPQIGTVNSQGALPGMVWQNRDVYLQGPIWAKIPHTDGNFHPSPLMGGFGLKHPPPQILIKNTPVPADPPTTFNQSKLNSFITQYSTGQVSVEIEWELQKENSKRWNPEIQYTSNYYKSTSVDFAVNTEGVYSEPHPIGTRYLTRPL

SEQ ID NO: 1618 - protein, 736 aa, synthetic construct
  REGION 1..736: note = Description of Artificial Sequence: Synthetic polypeptide
MAADGYLPDWLEDNLSEGIREWWALKPGAPKPKANQQKQDDGRGLVLPGYKYLGPFNGLDKGEPVNEADAAALEHDKAYDQQLKAGDNPYLRYNHADAEFQERLQEDTSFGGNLGRAVFQAKKRLLEPLGLVEEAAKTAPGKKRPVEQSPQEPDSSAGIGKSGAQPAKKRLNFGQTGDSESVPDPQPLGEPPATPAAVGPTTMASGGGAPMADNNEGADGVGNASGNWHCDSTWLGDRVITTSTRTWALPTYNNHLYKQISSASTGASNDNHYFGYSTPWGYFDFNRFHCHFSPRDWQRLINNNWGFRPKRLNFKLFNIQVKEVTDNDGVKTIANNLTSTIQVFTDSEYQLPYVLGSAHQGCLPPFPADVFMIPQYGYLTLNNGSQAVGRSSFYCLEYFPSQMLRTGNNFQFTYTFEDVPFHSSYAHSQSLDRLMNPLIDQYLYYLSRTQTTGGTANTQTLGFSQGGPNTMANQAKNWLPGPCYRQQRVSTTTGQNNNSNFAWTAGTKYHLNGRNSLANPGIAMATHKDDKERFFPSNGILIFGKQNAARDNADYSDVMLTSEEEIKTTNPVATEEYGIVADNLQQQNTAPQIGTVNSQGALPGMVWQNRDVYLQGPIWAKIPHTDGNFHPSPLMGGFGLKHPPPQILIKNTPVPADPPTTFNQSKLNSFITQYSTGQVSVEIEWELQKENSKRWNPEIQYTSNYYKSTSVDFAVNTEGVYSEPHPIGTRYLTRPL

SEQ ID NO: 1619 - protein, 736 aa, synthetic construct
  REGION 1..736: note = Description of Artificial Sequence: Synthetic polypeptide
MAADGYLPDWLEDNLSEGIREWWALKPGAPKPKANQQKQDDGRGLVLPGYKYLGPFNGLDKGEPVNAADAAALEHDKAYDQQLKAGDNPYLRYNHADAEFQERLQEDTSFGGNLGRAVFQAKKRVLEPLGLVEEGAKTAPGKKRPVEQSPQEPDSSAGIGKTGAQPAKKRLNFGQTGDSESVPDPQPLGEPPATPAAVGPTTMASGGGAPMADNNEGADGVGSASGNWHCDSTWLGDRVITTSTRTWALPTYNNHLYKQISSASTGASNDNHYFGYSTPWGYFDFNRFHCHFSPRDWQRLINNNWGFRPKRLNFKLFNIQVKEVTDNNGVKTIANNLTSTIQVFTDSEYQLPYVLGSAHQGCLPPFPADVFMIPQYGYLTLNNGSQAVGRSSFYCLEYFPSQMLRTGNNFTFSYTFEDVPFHSSYAHSQSLDRLMNPLIDQYLYYLSRTQTTGGTANTQTLGFSQGGPNTMANQAKNWLPGPCYRQQRVSTTTGQNNNSNFAWTAGTKYHLNGRNSLANPGIAMATHKDDKERFFPSNGILIFGKQNAARDNADYSDVMLTSEEEIKTTNPVATEEYGIVADNLQQQNTAPQIGTVNSQGALPGMVWQNRDVYLQGPIWAKIPHTDGNFHPSPLMGGFGLKHPPPQILIKNTPVPADPPTTFNQSKLNSFITQYSTGQVSVEIEWELQKENSKRWNPEIQYTSNYYKSTSVDFAVNTEGVYSEPHPIGTRYLTRPL

SEQ ID NO: 1620 - protein, 736 aa, synthetic construct
  REGION 1..736: note = Description of Artificial Sequence: Synthetic polypeptide
MAADGYLPDWLEDNLSEGIREWWDLKPGAPKPKANQQKQDDGRGLVLPGYKYLGPFNGLDKGEPVNAADAAALEHDKAYDQQLKAGDNPYLRYNHADAEFQERLQEDTSFGGNLGRAVFQAKKRLLEPLGLVEEAAKTAPGKKRPVEQSPQEPDSSAGIGKSGAQPAKKRLNFGQTGDTESVPDPQPIGEPPAAPSGVGPNTMAAGGGAPMADNNEGADGVGSSSGNWHCDSQWLGDRVITTSTRTWALPTYNNHLYKQISSASTGASNDNHYFGYSTPWGYFDFNRFHCHFSPRDWQRLINNNWGFRPKRLNFKLFNIQVKEVTQNEGTKTIANNLTSTIQVFTDSEYQLPYVLGSAHQGCLPPFPADVFMIPQYGYLTLNNGSQAVGRSSFYCLEYFPSQMLRTGNNFQFTYTFEDVPFHSSYAHSQSLDRLMNPLIDQYLYYLSRTQTTGGTANTQTLGFSQGGPNTMANHAKNWLPGPCYRQQRVSTTTGQNNNSNFAWTAGTKYHLNGRNSLANPGIAMATHKDDKERFFPSNGILIFGKQNAARDNADYSDVMLTSEEEIKTTNPVATEEYGIVADNLQQQNTAPQIGTVNSQGALPGMVWQNRDVYLQGPIWAKIPHTDGNFHPSPLMGGFGLKHPPPQILIKNTPVPADPPTTFNQSKLNSFITQYSTGQVSVEIEWELQKENSKRWNPEIQYTSNYYKSTSVDFAVNTEGVYSEPHPIGTRYLTRPL

SEQ ID NO: 1621 - protein, 737 aa, synthetic construct; identical to SEQ ID NO: 1603
  REGION 1..737: note = Description of Artificial Sequence: Synthetic polypeptide

SEQ ID NO: 1622 - protein, 737 aa, synthetic construct
  REGION 1..737: note = Description of Artificial Sequence: Synthetic polypeptide
MAADGYLPDWLEDNLSEGIREWWALKPGAPKPKANQQKQDDGRGLVLPGYKYLGPFNGLDKGEPVNAADAAALEHDKAYDQQLKAGDNPYLRYNHADAEFQERLKEDTSFGGNLGRAVFQAKKRVLEPFGLVEEGAKTAPGKKRPVEQSPQEPDSSSGIGKTGQQPAKKRLNFGQTGDSESVPDPQPLGEPPAAPSGVGPNTMAAGGGAPMADNNEGADGVGSSSGNWHCDSQWLGNRVITTSTRTWALPTYNNHLYKQISNSTSGGSSNDNAYFGYSTPWGYFDFNRFHCHFSPRDWQRLINNNWGFRPKRLNFKLFNIQVKEVTDNNGVKTIANNLTSTVQVFTDSEYQLPYVLGSAHQGCLPPFPADVFMIPQYGYLTLNNGSQAVGRSSFYCLEYFPSQMLRTGNNFQFTYTFEDVPFHSSYAHSQSLDRLMNPLIDQYLYYLSRTQTTGGTANTQTLGFSQGGPNTMANQAKNWLPGPCYRQQRVSTTTGQNNNSNFAWTAGTKYHLNGRNSLANPGIAMATHKDDKERFFPSNGILIFGKQNAARDNADYSDVMLTSEEEIKTTNPVATEEYGIVADNLQQQNTAPQIGTVNSQGALPGMVWQNRDVYLQGPIWAKIPHTDGNFHPSPLMGGFGLKHPPPQILIKNTPVPADPPTTFNQSKLNSFITQYSTGQVSVEIEWELQKENSKRWNPEIQYTSNYYKSTSVDFAVNTEGVYSEPHPIGTRYLTRPL

SEQ ID NO: 1623 - protein, 736 aa, synthetic construct
  REGION 1..736: note = Description of Artificial Sequence: Synthetic polypeptide
MAADGYLPDWLEDNLSEGIREWWDLKPGAPKPKANQQKQDDGRGLVLPGYKYLGPFNGLDRGEPVNAADAAALEHDKAYDQQLKAGDNPYLRYNHADAEFQERLQEDTSFGGNLGRAVFQAKKRVLEPLGLVEEGAKTAPGKKRPVEQSPQEPDSSSGIGKTGQQPAKKRLNFGQTGDSESVPDPQPLGEPPATPAAVGPTTMASGGGAPMADNNEGADGVGNASGNWHCDSTWLGDRVITTSTRTWALPTYNNHLYKQISSASTGASNDNHYFGYSTPWGYFDFNRFHCHFSPRDWQRLINNNWGFRPKRLNFKLFNIQVKEVTDNNGVKTIANNLTSTIQVFTDSEYQLPYVLGSAHQGCLPPFPADVFMIPQYGYLTLNNGSQAVGRSSFYCLEYFPSQMLRTGNNFQFTYTFEDVPFHSSYAHSQSLDRLMNPLIDQYLYYLSRTQTTGGTANTQTLGFSQGGPNTMANQAKNWLPGPCYRQQRVSTTTGQNNNSNFAWTAGTKYHLNGRNSLANPGIAMATHKDDKERFFPSNGILIFGKQNAARDNADYSDVMLTSEEEIKTTNPVATEEYGIVADNLQQQNTAPQIGTVNSQGALPGMVWQNRDVYLQGPIWAKIPHTDGNFHPSPLMGGFGLKHPPPQILIKNTPVPADPPTTFNQSKLNSFITQYSTGQVSVEIEWELQKENSKRWNPEIQYTSNYYKSTSVDFAVNTEGVYSEPHPIGTRYLTRPL

SEQ ID NO: 1624 - protein, 736 aa, synthetic construct
  REGION 1..736: note = Description of Artificial Sequence: Synthetic polypeptide
MAADGYLPDWLEDNLSEGIREWWDLKPGAPKPKANQQKQDDGRGLVLPGYKYLGPFNGLDKGEPVNAADAAALEHDKAYDQQLKAGDNPYLRYNHADAEFQERLQEDTSFGGNLGRAVFQAKKRVLEPLGLVEEGAKTAPGKKRPVEQSPQEPDSSSGIGKKGQQPARKRLNFGQTGDSESVPDPQPLGEPPAAPSGVGSLTMASGGGAPMADNNEGADGVGNASGNWHCDSTWLGDRVITTSTRTWALPTYNNHLYKQISSASTGASNDNHYFGYSTPWGYFDFNRFHCHFSPRDWQRLINNNWGFRPKRLNFKLFNIQVKEVTQNEGTKTIANNLTSTVQVFTDSDYQLPYVLGSAHQGCLPPFPADVFMIPQYGYLTLNNGSQAVGRSSFYCLEYFPSQMLRTGNNFQFTYTFEDVPFHSSYAHSQSLDRLMNPLIDQYLYYLSRTQTTGGTANTQTLGFSQGGPNTMANQAKNWLPGPCYRQQRVSTTTGQNNNSNFAWTAGTKYHLNGRNSLSNPGIAMATHKDDKERFFPSNGILIFGKQNAARDNADYSDVMLTSEEEIKTTNPVATEEYGIVADNLQQQNTAPQIGTVNSQGALPGMVWQNRDMYLQGPIWAKIPHTDGNFHPSPLMGGFGLKHPPPQILIKNTPVPADPPTTFNQSKLNSFITQYSTGQVSVEIEWELQKENSKRWNPEIQYTSNYYKSTSVDFAVNTEGVYSEPHPIGTRYLTRPL

SEQ ID NO: 1625 - protein, 736 aa, synthetic construct
  REGION 1..736: note = Description of Artificial Sequence: Synthetic polynucleotide
MAADGYLPDWLEDNLSEGIREWWALKPGAPKPKANQQKQDDGRGLVLPGYKYLGPFNGLDKGEPVNAADAAALEHDKAYDQQLKAGDNPYLRYNHADAEFQERLQEDTSFGGNLGRAVFQAKKRVLEPFGLVEEGAKTAPGKKRPVEQSPQEPDSSSGIGKTGQQPAKKRLNFGQTGGSESVPDPQPLGEPPATPAAVGPTTMAAGGGAPMADNNEGADGVGSSSGNWHCDSTWLGDRVITTSTRTWALPTYNNHLYKQISSASTGASNDNHYFGYSTPWGYFDFNRFHCHFSPRDWQRLINNNWGFRPKRLNFKLFNIQVKEVTDNNGVKTIANNLTSTVQVFTDSEYQLPYVLGSAHQGCLPPFPADVFMIPQYGYLTLNNGSQAVGRSSFYCLEYFPSQMLRTGNNFTFSYTFEEVPFHSSYAHSQSLDRLMNPLIDQYLYYLSRTQTTGGTANTQTLGFSQGGPNTMANQAKNWLPGPCYRQQRVSTTTGQNNNSNFAWTAGTKYHLNGRNSLANPGIAMASHKDDKERFFPSNGILIFGKQNAARDNADYSDVMLTSEEEIKTTNPVATEEYGIVADNLQQQNTAPQIGTVNSQGALPGMVWQNRDVYLQGPIWAKIPHTDGNFHPSPLMGGFGLKHPPPQILIKNTPVPADPPTTFNQSKLNSFITQYSTGQVSVEIEWELQKENSKRWNPEIQYTSNYYKSTSVDFAVNTEGVYSEPHPIGTRYLTRPL

SEQ ID NO: 1626 - DNA, 2211 bp, synthetic construct
  misc_feature 1..2211: note = Description of Artificial Sequence: Synthetic polynucleotide
  source 1..2211: mol_type = other DNA
atggctgccgatggttatcttccagattggctcgaggacaacctctctgagggcattcgcgagtggtgggacttgaaacctgcatccccgaaacccaaagccaaccagcaaaagcaggacgacggccggggtctggtgcttcctggctacaagtacctcggacccttcaacggactcgacaagggggagcccgtcaacgcggcggacgcagcggccctcgagcacgacaaggcctacgaccagcagctcaaagcgggtgacaatccgtacctgcggtataaccacgccgacgccgagtttcaggagcgtctgcaagaagatacgtcttttgggggcaacctcgggcgagcagtcttccaggccaaaaagaggcttcttgaacctcttggtctggttgaggaagcggctaagacggctcctggaaagaagaggcctgtagagcagtctcctcaggaaccggactcctccgcgggtattggcaaatcgggtgcacagcccgccaaaaagagactcaatttcggtcagactggcggcacagagtcagttccagaccctcaacctctcggagaacctccagcagcgccctctggtgtgggacctaatacaatggctgcaggcggtggcgcaccaatggcagacaataacgaaggcgccgacggagtgggtagttcctcgggaaattggcattgcgattccacatggctgggcgacagagtcatcaccaccagcaccagaacctgggccctgcccacttacaacaaccatctctacaagcaaatctccagtgcttcaacgggggccagcaacgacaaccactacttcggctacagcaccccctgggggtattttgatttcaacagattccactgccacttctcaccacgtgactggcagcgactcatcaacaacaactggggattccggcccaagagactcagcttcaagctcttcaacatccaggtcaaggaggtcacgcagaatgaaggcaccaagaccatcgccaataacctcaccagcaccatccaggtgtttacggactcggagtaccagctgccgtacgttctcggctctgcccaccagggctgcctgcctccgttcccggcggacgtgttcatgattccccagtacggatacctaacactcaacaacggtagtcaggccgtgggacgctcctccttctactgcctggaatactttccttcgcagatgctgagaaccggcaacaacttccagtttacttacaccttcgaggacgtgcctttccacagcagctacgcccacagccagagcttggaccggctgatgaatcctctgattgaccagtacctgtactacttgtctcggactcaaacaacaggaggcacggcaaatacgcagactctgggcttcagccaaggtgggcctaatacaatggccaatcaggcaaagaactggctgccaggaccctgttaccgccaacaacgcgtctcaacgacaaccgggcaaaacaacaatagcaactttgcctggactgctgggaccaaataccatctgaatggaagaaattcattggctaatcctggcatcgctatggcaacacacaaagacgacaaggagcgtttttttcccagtaacgggatcctgatttttggcaaacaaaatgctgccagagacaatgcggattacagcgatgtcatgctcaccagcgaggaagaaatcaaaaccactaaccctgtggctacagaggaatacggtatcgtggcagataacttgcagcagcaaaacacggctcctcaaattggaactgtcaacagccagggggccttacccggtatggtctggcagaaccgggacgtgtacctgcagggtcccatctgggccaagattcctcacacggacggcaacttccacccgtctccgctgatgggcggctttggcctgaaacatcctccgcctcagatcctgatcaagaacacgcctgtacctgcggatcctccgaccaccttcaaccagtcaaagctgaactctttcatcacgcaatacagcaccggacaggtcagcgtggaaattgaatgggagctgcagaaggaaaacagcaagcgctggaaccccgagatccagtacacctccaactactacaaatctacaagtgtggactttgctgttaatacagaaggcgtgtactctgaaccccaccccattggcacccgttacctcacccgtcccctgtaa

SEQ ID NO: 1627 - DNA, 2211 bp, synthetic construct
  misc_feature 1..2211: note = Description of Artificial Sequence: Synthetic polynucleotide
  source 1..2211: mol_type = other DNA
atggctgccgatggttatcttccagattggctcgaggacaacctctctgagggcattcgcgagtggtgggacttgaaacctggagccccgaaacccaaagccaaccagcaaaagcaggacgacggccggggtctggtgcttcctggctacaagtacctcggacccttcaacggactcgacaagggggagcccgtcaacgcggcggacgcagcggccctcgagcacgacaaggcctacgaccagcagctcaaagcgggtgacaatccgtacctgcggtataaccacgccgacgccgagtttcaggagcgtctgcaagaagatacgtcttttgggggcaacctcgggcgagcagtcttccaggccaagaagagggttctcgaaccttttggtctggttgaggaaggcgctaagacggctcctggaaagaaacgtccggtagagcagtcgccacaagagccagactcctcctcgggcattggcaagacaggccagcagcccgctaaaaagagactcaattttggtcagactggcgactcagagtcagtccccgacccacaacctctcggagaacctccagcaacccccgctgctgtgggacctactacaatggcttcaggtggtggcgcaccaatggcagacaataacgaaggcgccgacggagtgggtaatgcctcaggaaattggcattgcgattcccaatggctgggggacagagtcatcaccaccagcacccgaacctgggccctgcccacctacaacaatcacctctacaagcaaatctccagtgcttcaacgggggccagcaacgacaaccactacttcggctacagcaccccctgggggtattttgatttcaacagattccactgccatttctcaccacgtgactggcagcgactcatcaacaacaattggggattccggcccaagagactcaacttcaaactcttcaacatccaagtcaaggaggtcacgcagaatgaaggcaccaagaccatcgccaataacctcaccagcaccatccaggtgtttacggactcggagtaccagctgccgtacgttctcggctccgcccaccagggctgcctgcctccgttcccggcggacgtgttcatgattccccagtacggctacctaacactcaacaacggtagtcaggccgtgggacgctcctccttctactgcctggaatactttccttcgcagatgctgagaaccggcaacaacttccagtttacttacaccttcgaggacgtgcctttccacagcagctacgcccacagccagagcttggaccggctgatgaatcctctgattgaccagtacctgtactacttgtctcggactcaaacaacaggaggcacggcaaatacgcagactctgggcttcagccaaggtgggcctaatacaatggccaatcaggcaaagaactggctgccaggaccctgttaccgccaacaacgcgtctcaacgacaaccgggcaaaacaacaatagcaactttgcctggactgctgggaccaaataccatctgaatggaagaaattcattggctaatcctggcatcgctatggcaacacacaaagacgacaaggagcgtttttttcccagtaacgggatcctgatttttggcaaacaaaatgctgccagagacaatgcggattacagcgatgtcatgctcaccagcgaggaagaaatcaaaaccactaaccctgtggctacagaggaatacggtatcgtggcagataacttgcagcagcaaaacacggctcctcaaattggaactgtcaacagccagggggccttacccggtatggtctggcagaaccgggacgtgtacctgcagggtcccatctgggccaagattcctcacacggacggcaacttccacccgtctccgctgatgggcggctttggcctgaaacatcctccgcctcagatcctgatcaagaacacgcctgtacctgcggatcctccgaccaccttcaaccagtcaaagctgaactctttcatcacgcaatacagcaccggacaggtcagcgtggaaattgaatgggagctgcagaaggaaaacagcaagcgctggaaccccgagatccagtacacctccaactactacaaatctacaagtgtggactttgctgttaatacagaaggcgtgtactctgaaccccaccccattggcacccgttacctcacccgtcccctgtaa

SEQ ID NO: 1628 - DNA, 2211 bp, synthetic construct
  misc_feature 1..2211: note = Description of Artificial Sequence: Synthetic polynucleotide
  source 1..2211: mol_type = other DNA
atggctgccgatggttatcttccagattggctcgaggacaacctctctgagggcattcgcgagtggtgggacttggaacctggagccccgaagcccaaagccaaccagcaaaagcaggacgacggccggggtctggtgcttcctggctacaagtacctcggacccttcaacggactcgacaagggggagcccgtcaacgcggcggacgcagcggccctcgagcacgacaaggcctacgaccagcagctcaaagcgggtgacaatccgtacctgcggtataaccacgccgacgccgagtttcaggagcgtctgcaagaagatacgtcttttgggggcaacctcgggcgagcagtcttccaggccaagaagcgggttctcgaacctctcggtctggttgaggaaggcgctaagacggctcctggaaagaaacgtccggtagagcagtcgccacaagagccagactcctcctcgggcatcggcaagacaggccagcagcccgctaaaaagagactcaattttggtcagactggcgactcagagtcagtccccgatccacaacctctcggagaacctccagcaacccccgctgctgtgggacctactacaatggcttcaggcggtggcgcaccaatggcagacaataacgaaggcgccgacggagtgggtaatgcctcaggaaattggcattgcgattccacatggctgggcgacagagtcatcaccaccagcacccgcacctgggccttgcccacctacaataaccacctctacaagcaaatctccagtgcttcaacaggggccagcaacgacaaccactacttcggctacagcaccccctgggggtattttgacttcaacagattccactgccacttctcaccacgtgactggcagcgactcatcaacaacaactggggattccggcctaagcgactcaacttcaagctcttcaacattcaggtcaaagaggttacggacaacaatggagtcaagaccatcgccaataaccttaccagcacggtccaggtcttcacggactcggagtaccagttgccgtacgtcctcggctctgcgcaccagggctgcctccctccgttcccggcggacgtgttcatgattccgcagtacggctacctaacgctcaacaacggtagtcaggccgtgggacgctcctccttctactgcctggaatactttccttcgcagatgctgagaaccggcaacaacttccagtttacttacaccttcgaggacgtgcctttccacagcagctacgcccacagccagagcttggaccggctgatgaatcctctgattgaccagtacctgtactacttgtctcggactcaaacaacaggaggcacggcaaatacgcagactctgggcttcagccaaggtgggcctaatacaatggccaatcaggcaaagaactggctgccaggaccctgttaccgccaacaacgcgtctcaacgacaaccgggcaaaacaacaatagcaactttgcctggactgctgggaccaaataccatctgaatggaagaaattcattggctaatcctggcatcgctatggcaacacacaaagacgacaaggagcgtttttttcccagtaacgggatcctgatttttggcaaacaaaatgctgccagagacaatgcggattacagcgatgtcatgctcaccagcgaggaagaaatcaaaaccactaaccctgtggctacagaggaatacggtatcgtggcagataacttgcagcagcaaaacacggctcctcaaattggaactgtcaacagccagggggccttacccggtatggtctggcagaaccgggacgtgtacctgcagggtcccatctgggccaagattcctcacacggacggcaacttccacccgtctccgctgatgggcggctttggcctgaaacatcctccgcctcagatcctgatcaagaacacgcctgtacctgcggatcctccgaccaccttcaaccagtcaaagctgaactctttcatcacgcaatacagcaccggacaggtcagcgtggaaattgaatgggagctgcagaaggaaaacagcaagcgctggaaccccgagatccagtacacctccaactactacaaatctacaagtgtggactttgctgttaatacagaaggcgtgtactctgaaccccaccccattggcacccgttacctcacccgtcccctgtaa

SEQ ID NO: 1629 - DNA, 2211 bp, synthetic construct
  misc_feature 1..2211: note = Description of Artificial Sequence: Synthetic polynucleotide
  source 1..2211: mol_type = other DNA
atggctgccgatggttatcttccagattggctcgaggacactctctctgaaggaataagacagtggtggaagctcaaacctggcccaccaccaccaaagcccgcagagcggcataaggacgacagcaggggtcttgtgcttcctgggtacaagtacctcggacccttcaacggactcgacaagggagagccggtcaacgaggcagacgccgcggccctcgagcacgacaaagcctacgaccggcagctcgacagcggagacaacccgtacctcaagtacaaccacgccgacgcggagtttcaggagcgccttaaagaagatacgtcttttgggggcaacctcgggcgagcagtcttccaggccaagaagagggttctcgaaccttttggtctggttgaggaaggtgctaagacggctcctggaaagaaacgtccggtagagcagtcgccacaagagccagactcctcctcgggcattggcaagacaggccagcagcccgctaaaaagagactcaattttggtcagactggcgactcagagtcagtccccgacccacaacctctcggagaacctccagcaacccccgctgctgtgggacctactacaatggcttcaggcggtggcgcaccaatggcagacaataacgaaggcgccgacggagtgggtaatgcctcaggaaattggcattgcgattccacatggctgggcgacagagtcatcaccaccagcacccgaacatgggccttgcccacctataacaaccacctctacaagcaaatctccagtgcttcaacgggggccagcaacgacaaccactacttcggctacagcaccccctgggggtattttgacttcaacagattccactgccacttctcaccacgtgactggcagcgactcatcaacaacaactggggattccggcctaagcgactcaacttcaagctcttcaacattcaggtcaaagaggttacggacaacaatggagtcaagaccatcgccaataaccttaccagcacggtccaggtcttcacggactcagactatcagctcccgtacgtgctcgggtcggctcacgagggctgcctcccgccgttcccagcggacgttttcatgattcctcagtacggctacctaacactcaacaacggtagtcaggccgtgggacgctcctccttctactgcctggaatactttccttcgcagatgctgagaaccggcaacaacttccagtttacttacaccttcgaggacgtgcctttccacagcagctacgcgcacagccagagtctggaccggctgatgaatcctctgattgaccagtacctgtactacttgtctcggactcaaacaacaggaggcacggcaaatacgcagactctgggcttcagccaaggtgggcctaatacaatggccaatcaggcaaagaactggctgccaggaccctgttaccgccaacaacgcgtctcaacgacaaccgggcaaaacaacaatagcaactttgcctggactgctgggaccaaataccatctgaatggaagaaattcattggctaatcctggcatcgctatggcaacacacaaagacgacaaggagcgtttttttcccagtaacgggatcctgattttcggcaaacaaaatgctgccagagacaatgcggattacagcgatgtcatgctcaccagcgaggaagaaatcaaaaccactaaccctgtggctacagaggaatacggtatcgtggcagataacttgcagcagcaaaacacggctcctcaaattggaactgtcaacagccagggggccttacccggtatggtctggcagaaccgggacgtgtacctgcagggtcccatctgggccaagattcctcacacggacggcaacttccacccgtctccgctgatgggcggctttggcctgaaacatcctccgcctcagatcctgatcaagaacacgcctgtacctgcggatcctccgaccaccttcaaccagtcaaagctgaactctttcatcacgcaatacagcaccggacaggtcagcgtggaaattgaatgggagctgcagaaggaaaacagcaagcgctggaaccccgagatccagtacacctccaactactacaaatctacaagtgtggactttgctgttaatacagaaggcgtgtactctgaaccccaccccattggcaccagatacctgactcgtaatctgtaa

SEQ ID NO: 1630 - DNA, 2208 bp, synthetic construct
  misc_feature 1..2208: note = Description of Artificial Sequence: Synthetic polynucleotide
  source 1..2208: mol_type = other DNA
atggctgccgatggttatcttccagattggctcgaggacactctctctgaaggaataagacagtggtggaagctcaaacctggcccaccaccaccaaagcccgcagagcggcataaggacgacagcaggggtcttgtgcttcctgggtacaagtacctcggacccttcaacggactcgacaagggagagccggtcaacgaggcagacgccgcggccctcgagcacgacaaagcctacgaccggcagctcgacagcggagacaacccgtacctcaagtacaaccacgccgacgcggagtttcaggagcgccttaaagaagatacgtcttttgggggcaacctcggacgagcagtcttccaggcgaaaaagagggttcttgaacctctgggcctggttgaggaacctgttaagacggctccgggaaaaaagaggccggtagagcagtcgccacaagagccagactcctcctcgggcatcggcaagaaaggccagcagcccgctaaaaagagactcaattttggtcagactggcgactcagagtcagtccccgacccacaacctctcggagaacctccagcaacccccgctgctgtgggacctactacaatggcttcaggcggtggcgcaccaatggcggacaataacgaaggcgccgatggagtgggtaatgcctcaggaaattggcattgcgattccacatggctgggcgacagagtcatcaccaccagcacccgaacatgggccttgcccacctataacaaccacctctacaagcaaatctccagtgcttcaacgggggccagcaacgacaaccactacttcggctacagcaccccctgggggtattttgacttcaacagattccactgccacttctcaccacgtgactggcagcgactcatcaacaacaactggggattccggcctaagcgactcaacttcaagctcttcaacattcaggtcaaagaggttacggacaacaatggagtcaagaccatcgccaataaccttaccagcacggtccaggtcttcacggactcagactatcagctcccgtacgttctcggctctgcccaccagggctgcctgcctccgttcccggcggacgtgttcatgattccccagtacggctacctaacactcaacaacggtagtcaggccgtgggacgctcctccttctactgcctggaatactttccttcgcagatgctgagaaccggcaacaacttccagtttacttacaccttcgaggacgtgcctttccacagcagctacgcccacagccagagcttggaccggctgatgaatcctctgattgaccagtacctgtactacttgtctcggactcaaacaacaggaggcacggcaaatacgcagactctgggcttcagccaaggtgggcctaatacaatggccaatcaggcaaagaactggctgccaggaccctgttaccgccaacaacgcgtctcaacgacaaccgggcaaaacaacaatagcaactttgcctggactgctgggaccaaataccatctgaatggaagaaattcattggctaatcctggcatcgctatggcaacacacaaagacgacaaggagcgtttttttcccagtaacgggatcctgatttttggcaaacaaaatgctgccagagacaatgcggattacagcgatgtcatgctcaccagcgaggaagaaatcaaaaccactaaccctgtggctacagaggaatacggtatcgtggcagataacttgcagcagcaaaacacggctcctcaaattggaactgtcaacagccagggggccttacccggtatggtctggcagaaccgggacgtgtacctgcagggtcccatctgggccaagattcctcacacggacggcaacttccacccgtctccgctgatgggcggctttggcctgaaacatcctccgcctcagatcctgatcaagaacacgcctgtacctgcggatcctccgaccaccttcaaccagtcaaagctgaactctttcatcacgcaatacagcaccggacaggtcagcgtggaaattgaatgggagctgcagaaggaaaacagcaagcgctggaaccccgagatccagtacacctccaactactacaaatctacaagtgtggactttgctgttaatacagaaggcgtgtactctgaaccccaccccattggcacccgttacctcacccgtcccctg

SEQ ID NO: 1631 - DNA, 2211 bp, synthetic construct
  misc_feature 1..2211: note = Description of Artificial Sequence: Synthetic polynucleotide
  source 1..2211: mol_type = other DNA
atggctgccgatggttatcttccagattggctcgaggacactctctctgaaggaataagacagtggtggaagctcaaacctggcccaccaccaccaaagcccgcagagcggcataaggacgacagcaggggtcttgtgcttcctgggtacaagtacctcggacccttcaacggactcgacaagggagagccggtcaacgaggcagacgccgcggccctcgagcacgacaaagcctacgaccagcagctccaagcgggtgacaatccgtacctgcggtataaccacgccgacgccgagtttcaggagcgtcttcaaggagatacgtcttttgggggcaacctcggacgagcagtcttccaggccaaaaagaggcttcttgaacctcttggtctggttgaggaagcggctaagacggctcctggaaagaagaggcctgtagagcagtctcctcaggaaccggactcctccgcgggtattggcaaatcgggtgcacagcccgctaaaaagagactcaatttcggtcagactggcgacacagagtcagtcccagaccctcaaccaatcggagaacctcccgcagccccctcaggtgtgggatctcttacaatggcttcaggtggtggcgcaccagtggcagacaataacgaaggtgccgatggagtgggtagttcctcgggaaattggcattgcgattcccaatggctgggggacagagtcatcaccaccagcacccgaacatgggccttgcccacctataacaaccacctctacaagcaaatctccagtgcttcaacgggggccagcaacgacaaccactacttcggctacagcaccccctgggggtattttgacttcaaccgcttccactgccacttctcaccacgtgactggcagcgactcatcaacaacaactggggattccggcccaagagactcagcttcaagctcttcaaccatccaggtcaaggaggtcacgcagaatgaaggcaccaagaccatcgccaataacctcaccagcacatccaggtgtttacggactcggagtaccagctgccgtacgttctcggctctgcccaccagggctgcctgcctccgttcccggcggacgtgttcatgattccccagtacggctacctaacactcaacaacggtagtcaggccgtgggacgctcctccttctactgcctggaatactttccttcgcagatgctgagaaccggcaacaacttccagttcacttacaccttcgaggacgtgcctttccacagcagctacgcgcacagccagagcttggaccggctgatgaatcctctgattgaccagtacctgtactacttgtctcggactcaaacaacaggaggcacggcaaatacgcagactctgggcttcagccaaggtgggcctaatacaatggccaatcaggcaaagaactggctgccaggaccctgttaccgccaacaacgcgtctcaacgacaaccgggcaaaacaacaatagcaactttgcctggactgctgggaccaaataccatctgaatggaagaaattcattgggtaatcctggcatcgctatggcaacacacaaagacgacaaggagcgtttttttcccagtaacgggatcctgatttttggcaaacaaaatgctgccagagacaatgcggattacagcgatgtcatgctcaccagcgaggaagaaatcaaaaccactaaccctgtggctacagaggaatacggtatcgtggcagataacttgcagcagcaaaacacggctcctcaaattggaactgtcaacagccagggggccttacccggtatggtctggcagaaccgggacgtgtacctgcagggtcccatctgggccaagattcctcacacggacggcaacttccacccgtctccgctgatgggcggctttggcctgaaacatcctccgcctcagatcctcatcaaaaacacacctgtacctgcggatcctccaacggccttcaaccagtcaaagctgaactctttcatcacgcaatacagcaccggacaggtcagcgtggaaattgaatgggagctgcagaaggaaaacagcaagcgctggaaccccgagatccagtacacctccaactactacaaatctacaagtgtggactttgctgttaatacagaaggcgtgtactctgaaccccaccccattggcacccgttacctcacccgtcccctgtaa

SEQ ID NO: 1632 - DNA, 2214 bp, synthetic construct
  misc_feature 1..2214: note = Description of Artificial Sequence: Synthetic polynucleotide
  source 1..2214: mol_type = other DNA
atggctgccgatggttatcttccagattggctcgaggacaacctctctgagggcattcgcgagtggtgggacttgaaacatggagccccgaaacccaaagccaaccagcaaaagcaggacgacggccggggtctggtgcttcctggctacaagtacctcggacccttcaacggactcgacaagggggagcccgtcaacgcggcggatgcagcggccctcgagcacgacaaggcctacgaccagcagctcaaagcgggtgacaatccgtacctgcggtataaccacgccgacgccgagtttcaggagcgtctgcaagaagatacgtcttttgggggcaacctcgggcgagcagtcttccaggccaagaagagggttctcgaaccttttggtctggttgaggaaggtgctaagacggctcctggaaagaaacgtccggtagagcagtcgccacaagagccagactcctcctcgggcattggcaagacaggccagcagcccgctaaaaagagactcaattttggtcagactggcgactcagagtcagtccccgacccacaacctctcggagaacctccagcaacccccgctgctgtgggacctactacaatggcttcaggcggtggcgcaccaatggcagacaataacgaaggcgccgacggagtgggtaatgcctcaggaaattggcattgcgattccacatggctgggcgacagagtcatcaccaccagcacccgaacatgggccttgcccacctataacaaccacctctacaagcaaatctccaacgggacttcgggaggaagcaccaacgacaacacctacttcggctacagcaccccctgggggtattttgactttaacagattccactgccacttctcaccacgtgactggcagcgactcatcaacaacaactggggattccggcccaagagactcaacttcaaactcttcaacatccaagtcaaggaggtcacgcagaatgaaggcaccaagaccatcgccaataacctcaccagcaccatccaggtgtttacggactcggagtaccagctgccgtacgttctcggctccgcccaccagggctgcctgcctccgttcccggcggacgtgttcatgattccccagtacggctacctaacactcaacaacggtagtcaggccgtgggacgctcctccttctactgcctggaatactttccttcgcagatgctgagaacgggcaacaactttaccttcagctacacctttgaggacgttcctttccacagcagctacgctcacagccagagtctggaccgtctcatgaatcctctgattgaccagtacctgtactacttgtctcggactcaaacaacaggaggcacggcaaatacgcagactctgggcttcagccaaggtgggcctaatacaatggccaatcaggcaaagaactggctgccaggaccctgttaccgccaacaacgcgtctcaacgacaaccgggcaaaacaacaatagcaactttgcctggactgctgggaccaaataccatctgaatggaagaaattcattggctaatcctggcatcgctatggcaacacacaaagacgacaaggagcgtttttttcccagtaacgggatcctgatttttggcaaacaaaatgctgccagagacaatgcggattacagcgatgtcatgctcaccagcgaggaagaaatcaaaaccactaaccctgtggctacagaggaatacggtatcgtggcagataacttgcagcagcaaaacacggctcctcaaattggaactgtcaacagccagggggccttacccggtatggtctggcagaaccgggacgtgtacctgcagggtcccatctgggccaagattcctcacacggacggcaacttccacccgtctccgctgatgggcggctttggcctgaaacatcctccgcctcagatcctgatcaagaacacgcctgtacctgcggatcctccgaccaccttcaaccagtcaaagctgaactctttcatcacgcaatacagcaccggacaggtcagcgtggaaattgaatgggagctgcagaaggaaaacagcaagcgctggaaccccgagatccagtacacctccaactactacaaatctacaagtgtggactttgctgttaatacagaaggcgtgtactctgatccccaccccattggcacccgttacctcacccgtcccctgtaa

SEQ ID NO: 1633 - DNA, 2214 bp, synthetic construct
  misc_feature 1..2214: note = Description of Artificial Sequence: Synthetic polynucleotide
  source 1..2214: mol_type = other DNA
atggctgccgatggttatcttccagattggctcgaggacaacctctctgagggcattcgcgagtggtgggcgctgaaacctggagccccgaagcccaaagccaaccagcaaaagcaggacgacggccggggtctggtgcttcctggctacaagtacctcggacccttcaacggactcgacaaaggagagccggtcaacgaggcggacgcggcagccctcgaacacgacaaggcctacgaccagcagctcaaagcgggtgacaatccgtacctgcggtataaccacgccgacgccgagtttcaggagcgtctgcaagaagatacgtcttttgggggcaacctcgggcgagcagtcttccaggccaagaagcgggttctcgaacctctcggtctggttgaggaaggcgctaagacggctcctggaaagaagagaccggtagagccatcaccccagcgttctccagactcctctacgggcatcggcaagaaaggccagcagcccgccagaaaaagactcaattttggtcagactggcgactcagagtcagttccagaccctcaacctctcggagaacctccagcagcgccctctggtgtgggacctaatacaatggcttcaggcggtggcgcaccaatggcagacaataacgagggcgccgacggagtgggtaattcctcgggaaattggcattgcgattccacatggatgggcgacagagtcatcaccaccagcacccgaacctgggccctgcccacctacaacaaccacctctacaagcaaatctccagtgcttcaacgggggccagcaacgacaaccactacttcggctacagcaccccctgggggtattttgactttaacagattccactgccacttttcaccacgtgactggcagcgactcatcaacaacaactggggattccggcccaagagactcaacttcaagctcttcaacatccaagtcaaggaggtcacgcagaatgaaggcaccaagaccatcgccaataacctcaccagcaccatccaggtgtttacggactcggagtaccagctgccgtacgttctcggctctgcccaccagggctgcctgcctccgttcccggcggacgtgttcatgattccccagtacggctacctaacactcaacaacggtagtcaggccgtgggacgctcctccttctactgcctggaatactttccttcgcagatgctgagaaccggcaacaacttccagtttacttacaccttcgaggacgtgcctttccacagcagctacgcgcacagccagagcttggaccggctgatgaatcctctgattgaccagtacctgtactacttgtctcggactcaaacaacaggaggcacggcaaatacgcagactctgggcttcagccaaggtgggcctaatacaatggccaatcaggcaaagaactggctgccaggaccctgttaccgccaacaacgcgtctcaacgacaaccgggcaaaacaacaatagcaactttgcctggactgctgggaccaaataccatctgaatggaagaaattcattggctaatcctggcatcgctatggcaacacacaaagacgacaaggagcgtttttttcccagtaacgggatcctgatttttggcaaacaaaatgctgccagagacaatgcggattacagcgatgtcatgctcaccagcgaggaagaaatcaaaaccactaaccctgtggctacagaggaatacggtatcgtggcagataacttgcagcagcaaaacacggctcctcaaattggaactgtcaacagccagggggccttacccggtatggtctggcagaaccgggacgtgtacctgcagggtcccatctgggccaagattcctcacacggacggcaacttccacccgtctccgctgatgggcggctttggcctgaaacatcctccgcctcagatcctgatcaagaacacgcctgtacctgcggatcctccgaccaccttcaaccagtcaaagctgaactctttcatcacacaatacagcaccggacaggtcagcgtggaaattgaatgggagctgcagaaggaaaacagcaagcgctggaaccccgagatccagtacacctccaactactacaaatctacaagtgtggactttgctgttaatacagaaggcgtgtactctgaaccccaccccattggcacccgttacctcacccgtcccctgtaa

SEQ ID NO: 1634 - DNA, 2211 bp, synthetic construct
  misc_feature 1..2211: note = Description of Artificial Sequence: Synthetic polynucleotide
  variation 676: note = n is a, c, g, or t
  source 1..2211: mol_type = other DNA
atggctgccgatggttatcttccagattggctcgaggacactctctctgaaggaataagacagtggtggaagctcaaacctggcccaccaccaccaaagcccgcagagcggcataaggacgacagcaggggtcttgtgcttcctgggtacaagtacctcggacccttcaacggactcgacaagggagagccggtcaacgaggcagacgccgcggccctcgagcacgacaaagcctacgaccggcagctcgacagcggagacaacccgtacctcaagtacaaccacgccgacgcggagtttcaggagcgccttaaagaagatacgtcttttgggggcaacctcggacgagcagtcttccaggcgaaaaagagggttcttgaacctctgggcctggttgaggaacctgttaagacggctccgggaaaaaagaggccggtagagcagtcgccacaagagccagactcctcctcgggcatcggcaagaaaggccagcagcccgctaaaaagagactcaattttggtcagactggcgactcagagtcagtccccgacccacaacctctcggagaacctccagcaacccccgctgctgtgggacctactacaatggcttcaggcggtggcgcaccaatggcggacaataacgaaggcgccgatggagtgggtaatgcctcangaaattggcattgcgattccacatggctgggcgacagagtcatcaccaccagcacccgaacatgggccttgccacctataacaaccacctctacaagcaaatctccagtgcttcaacgggggcgcagcaacgacaaccactacttcggctacagcaccccctgggggtattttgacttcaacagattccactgccacttctcaccacgtgactggcagcgactcatcaacaacaactggggattccggcctaagcgactcaacttcaagctcttcaacattcaggtcaaagaggttacggacaacaatggagtcaagaccatcgccaataaccttaccagcacggtccaggtcttcacggactcagactatcagctcccgtacgttctcggctctgcccaccagggctgcctgcctccgttcccggcggacgtgttcatgattccccagtacggctacctaacactcaacaacggtagtcaggccgtgggacgctcctccttctactgcctggaatactttccttcgcagatgctgagaaccggcaacaacttccagtttacttacaccttcgaggacgtgcctttccacagcagctacgcccacagccagagcttggaccggctgatgaatcctctgattgaccagtacctgtactacttgtctcggactcaaacaacaggaggcacggcaaatacgcagactctgggcttcagccaaggtgggcctaatacaatggccaatcaggcaaagaactggctgccaggaccctgttaccgccaacaacgcgtctcaacgacaaccgggcaaaacaacaatagcaactttgcctggactgctgggaccaaataccatctgaatggaagaaattcattggctaatcctggcatcgctatggcaacacacaaagacgacaaggagcgtttttttcccagtaacgggatcctgatttttggcaaacaaaatgctgccagagacaatgcggattacagcgatgtcatgctcaccagcgaggaagaaatcaaaaccactaaccctgtggctacagaggaatacggtatcgtggcagataacttgcagcagcaaaacacggctcctcaaattggaactgtcaacagccagggggccttacccggtatggtttggcagaaccgggacgtgtacctgcagggtcccatctgggccaagattcctcacacggacggcaacttccacccgtctccgctgatgggcggctttggcctgaaacatcctccgcctcagatcctgatcaagaacacgcctgtacctgcggatcctccgaccaccttcaaccagtcaaagctgaactctttcatcacacagtactccacgggacaggtcagcgtggaaattgaatgggagctgcagaaggaaaacagcaagcgctggaacccggagatccagtacacttccaactactacaaatctacaaatgtggactttgctgttaacacagaaggcgtgtactctgaaccccaccccattggcacccgttacctcacccgtcccctgtaa

SEQ ID NO: 1635 - DNA, 2211 bp, synthetic construct
  misc_feature 1..2211: note = Description of Artificial Sequence: Synthetic polynucleotide
  variation 715: note = n is a, c, g, or t
  source 1..2211: mol_type = other DNA
atggctgccgatggttatcttccagattggctcgaggacaacctctctgagggcattcgcgagtggtgggacttgaaacctggagccccgaaacccaaagccaaccagcaaaagcaggacgacggccggggtctggtgcttcctggctacaagtacctcggacccttcaacggactcgacaagggggagcccgtcaacgcggcggatgcagcggccctcgagcacgacaaggcctacgaccagcagctccaagcgggtgacaatccgtacctgcggtataaccacgccgacgccgagtttcaggagcgtcttcaaggagatacgtcttttgggggcaacctcggacgagcagtcttccaggccaagaagcgggttctcgaacctctcggtctggttgaggaagcggctaagacggctcctggaaagaagaggcctgtagagcagtctcctcaggaaccggactcctccgcgggtattggcaaatcgggtgcacagcccgctaaaaagagactcaatttcggtcagactggcgacacagagtcagtcccagaccctcaaccaatcggagaacctcccgcagccccctctggtgtgggacctaatacaatggctgcaggcggtggcgcaccaatggcagacaataacgaaggcgccgatggagtgggtagttcctcgggaaattggcattgcgattccacatggctgggcgacagantcatcaccaccagcacccgaacctgggccctgcccacctataacaaccatctctacaagcaaatctccagtgcttcaacgggggccagcaacgacaaccactacttcggctacagcaccccctgggggtattttgacttcaacagattccactgccacttctcaccacgtgactggcagcgactcatcaacaacaactggggattccggcctaagcgactcaacttcaagctcttcaacattcaggtcaaagaggttacggacaacaatggagtcaagaccatcgccaataaccttaccagcacggtccaggtcttcacggactcggagtaccagttgccgtacgtcctcggctctgcgcaccagggctgcctgcctccgttcccggcggacgtgttcatgattccgcagtacggctacctaacgctcaacaatggcagccaggcagtgggacggtcatccttttactgcctggaatatttcccatcgcagatgctgagaacgggcaacaactttaccttcagctacacttttgaggacgttcctttccacagcagctacgctcacagccagagtctggaccgtctcatgaatcctctgattgaccagtacctgtactacttgtctcggactcaaacaacaggaggcacggcaaatacgcagactctgggcttcagccaaggtgggcctaatacaatggccaatcaggcaaagaactggctgccaggaccctgttaccgccaacaacgcgtctcaacgacaaccggacaaaacaacaatagcaactttgcctggactgctgggaccaaataccatctgaatggaagaaattcattggctaatcctggcatcgctatggcaacacacaaagacgacaaggagcgtttttttcccagtaacgggatcctgatttttggcaaacaaaatgctgccagagacaatgcggattacagcgatgtcatgctcaccagcgaggaagaaatcaaaaccactaaccctgtggctacagaggaatacggtatcgtggcagataactttcagcagcaaaacacggctcctcaaattggaactgtcaacagccagggggccttacccggtatggtctggcagaaccgggacgtgtacctgcagggtcccatctgggccaagattcctcacacggacggcaacttccacccgtctccgctgatgggcggctttggcctgaaacatcctccgcctcagatcctgatcaagaacacgcctgtacctgcggatcctccgaccaccttcaaccagtcaaagctgaactctttcatcacgcaatacagcaccggacaggtcagcgtggaaattgaatgggagctgcagaaggaaaacagcaagcgctggaaccccgagatccagtacacctccaactactacaaatctacaagtgtggactttgctgttaatacagaaggcgtgtactctgaaccccaccccattggcacccgttacctcacccgtcccctgtaa

SEQ ID NO: 1636 - DNA, 2211 bp, synthetic construct
  misc_feature 1..2211: note = Description of Artificial Sequence: Synthetic polynucleotide
  source 1..2211: mol_type = other DNA
atggctgccgatggttatcttccagattggctcgaggacaacctctctgagggcattcgcgagtggtgggcgctgaaacctggagccccgaagcccaaagccaaccagcaaaagcaggacgacggccggggtctggtgcttcctggctacaagtacctcggacccttcaacggactcgacaaaggagagccggtcaacgaggcggacgcggcagccctcgaacacgacaaagcttacgaccagcagctcaaggccggtgacaacccctacctcaagtataaccacgccgacgccgagtttcaggagcgtctgcaagaagatacgtcttttgggggcaacctcgggcgagcagtcttccaggccaaaaagaggcttcttgaacctcttggtctggttgaggaagcggctaagacggctcctggaaagaagaggcctgtagagcagtctcctcaggaaccggactcctccgcgggtattggcaaatcgggtgcacagcccgctaaaaagagactcaatttcggtcagactggcgacacagagtcagtcccagacccacaacctctcggagaacctccagcaacccccgctgctgtgggacctactacaatggcttcaggcggtggcgcaccaatggcggacaataacgaaggcgccgatggagtgggtaatgcctcaggaaattggcattgcgattccacatggctgggcgacagagtcatcaccaccagcacccgaacatgggccttgcccacctataacaaccacctctacaagcaaatctccagtgcttcaacgggggccagcaacgacaaccactacttcggctacagcaccccctgggggtattttgacttcaacagattccactgccacttctcaccacgtgactggcagcgactcatcaacaacaactggggattccggcccaagagactcagcttcaagctcttcaacatccaggtcaaggaggtcacgcagaatgaaggcaccaagaccatcgccaataacctcaccagcaccatccaggtgtttacggactcggagtaccagctgccgtacgttctcggctccgcccaccagggctgcctgcctccgttcccggcggacgtgttcatgattccccagtacggctacctaacactcaacaacggtagtcaggccgtgggacgctcctccttctactgcctggaatactttccttcgcagatgctgagaaccggcaacaacttccagtttacttacaccttcgaggacgtgcctttccacagcagctacgcccacagccagagcttggaccggctgatgaatcctctgattgaccagtacctgtactacttgtctcggactcaaacaacaggaggcacggcaaatacgcagactctgggcttcagccaaggtgggcctaatacaatggccaatcaggcaaagaactggctgccaggaccctgttaccgccaacaacgcgtctcaacgacaaccgggcaaaacaacaatagcaactttgcctggactgctgggaccaaataccatctgaatggaagaaattcattggctaatcctggcatcgctatggcaacacacaaagacgacaaggagcgtttttttcccagtaacgggatcctgatttttggcaaacaaaatgctgccagagacaatgcggattacagcgatgtcatgctcaccagcgaggaagaaatcaaaaccactaaccctgtggctacagaggaatacggtatcgtggcagataacttgcagcagcaaaacacggctcctcaaattggaactgtcaacagccagggggccttacccggtatggtctggcagaaccgggacgtgtacctgcagggtcccatctgggccaagattcctcacacggacggcaacttccacccgtctccgctgatgggcggctttggcctgaaacatcctccgcctcagatcctgatcaagaacacgcctgtacctgcggatcctccgaccaccttcaaccagtcaaagctgaactctttcatcacgcaatacagcaccggacaggtcagcgtggaaattgaatgggagctgcagaaggaaaacagcaagcgctggaaccccgagatccagtacacctccaactactacaaatctacaagtgtggactttgctgttaatacagaaggcgtgtactctgaaccccaccccattggcacccgttacctcacccgtcccctgtaa

SEQ ID NO: 1637 - DNA, 2211 bp, synthetic construct
  misc_feature 1..2211: note = Description of Artificial Sequence: Synthetic polynucleotide
  source 1..2211: mol_type = other DNA
atggctgccgatggttatcttccagattggctcgaggacactctctctgaaggaataagacagtggtggaagctcaaacctggcccaccaccaccaaagcccgcagagcggcataaggacgacagcaggggtcttgtgcttcctgggtacaagtacctcggacccttcaacggactcgacaagggagagccggtcaacgaggcagacgccgcggccctcgagcacgacaaagcctacgaccagcagctccaagcgggtgacaatccgtacctgcggtataaccacgccgacgccgagtttcaggagcgtcttcaaggagatacgtcttttgggggcaacctcggacgagcagtcttccaggccaaaaagaggcttcttgaacctcttggtctggttgaggaagcggctaagacggctcctggaaagaagaggcctgtagagcagtctcctcaggaaccggactcctccgcgggtattggcaaatcgggtgcacagcccgctaaaaagagactcaatttcggtcagactggcgacacagagtcagtcccagaccctcaaccaatcggagaacctcccgcagccccctcaggtgtgggatctcttacaatggcttcaggtggtggcgcaccagtggcagacaataacgaaggtgccgatggagtgggtagttcctcgggaaattggcattgcgattcccaatggctgggggacagagtcatcaccaccagcacccgaacatgggccttgcccacctataacaaccacctctacaagcaaatctccagtgcttcaacgggggccagcaacgacaaccactacttcggctacagcaccccctgggggtattttgacttcaaccgcttccactgccacttctcaccacgtgactggcagcgactcatcaacaacaactggggattccggcccaagagactcagcttcaagctcttcaacatccaggtcaaggaggtcacgcagaatgaaggcaccaagaccatcgccaataacctcaccagcaccatccaggtgtttacggactcggagtaccagctgccgtacgttctcggctctgcccaccagggctgcctgcctccgttcccggcggacgtgttcatgattccccagtacggctacctaacactcaacaacggtagtcaggccgtgggacgctcctccttctactgcctggaatactttccttcgcagatgctgagaaccggcaacaacttccagtttacttacaccttcgaggacgtgcctttccacagcagctacgcccacagccagagcttggaccggctgatgaatcctctgattgaccagtacctgtactacttgtctcggactcaaacaacaggaggcacggcaaatacgcagactctgggcttcagccaaggtgggcctaatacaatggccaatcaggcaaagaactggctgccaggaccctgttaccgccaacaacgcgtctcaacgacaaccgggcaaaacaacaatagcaactttgcctggactgctgggaccaaataccatctgaatggaagaaattcattggctaatcctggcatcgctatggcaacacacaaagacgacaaggagcgtttttttcccagtaacgggatcctgatttttggcaaacaaaatgctgccagagacaatgcggattacagcgatgtcatgctcaccagcgaggaagaaatcaaaaccactaaccctgtggctacagaggaatacggtatcgtggcagataacttgcagcagcaaaacacggctcctcaaattggaactgtcaacagccagggggccttacccggtatggtctggcagaaccgggacgtgtacctgcagggtcccatctgggccaagattcctcacacggacggcaacttccacccgtctccgctgatgggcggctttggcctgaaacatcctccgcctcagatcctgatcaagaacacgcctgtacctgcggatcctccgaccaccttcaaccagtcaaagctgaactctttcatcacgcaatacagcaccggacaggtcagcgtggaaattgaatgggagctgcagaaggaaaacagcaagcgctggaaccccgagatccagtacacctccaactactacaaatctacaagtgtggactttgctgttaatacagaaggcgtgtactctgaaccccaccccattggcacccgttacctcacccgtcccctgtaa

SEQ ID NO: 1638 - DNA, 2217 bp, synthetic construct
  misc_feature 1..2217: note = Description of Artificial Sequence: Synthetic polynucleotide
  source 1..2217: mol_type = other DNA
atggctgccgatggttatcttccagattggctcgaggacaacctctctgagggaataagacagtggtggaagctcaaacctggcccaccaccaccaaagcccgcagagcggcataaggacgacagcaggggtcttgtgcttcctgggtacaagtacctcggacccttcaacggactcgacaagggagagccggtcaacgcggcggacgcagcggccctcgagcacgacaaggcctacgaccagcagctcaaagcgggtgacaatccgtacctgcggtataaccacgccgacgccgagtttcaggagcgtctgcaagaagatacgtcttttgggggcaacctcgggcgagcagtcttccaggccaagaagcgggttctcgaacctctcggtctggttgaggaaggcgctaagacggctcctggaaagaagagaccggtagagccatcaccccagcgttctccagactcctctacgggcatcggcaagaaaggccagcagcccgctaaaaagagactcaattttggtcagactggcgactcagagtcagtccccgacccacaacctctcggagaacctccagcaacccccgctgctgtgggacctactacaatggcttcaggcggtggcgcaccaatggcagacaataacgaaggcgccgacggagtgggtaatgcctcaggaaattggcattgcgattccacatggctgggggacagagtcatcaccaccagcacccgaacctgggccctgcccacctacaacaaccacctctacaagcaaatctccaacgggacttcgggaggaagcaccaacgacaacacctacttcggctgcgtcacgccctgggggtattttgactttaacaaattccactgccacttttcaccggatgactggcaacgactcatcaacaacggctggggattccggactaagcgactcaacttcaagctcttcagcatgaaagtcaaaaagggtacggacaacactggaatcaagaccatcgcgaataaccttaccaacacggtccatgtcttcgcggactcggagtaccagttgccgtacgtcctcggctctgcgcaccagggctgcctccctccgttcccggcggacgtgttcatgattccgcagtacggctacctaacgctcaacaatggcagccaggcagtgggacggtcatccttttactgcctggaatatttcccatcgcagatgctgagaacgggcaacaactttaccttcagctacacctttgaggacgttcctttccacagcagctacgctcacagccagagtctggaccgtctcatgaatcctctgattgaccagtacctgtactacttgtctcggactcaaacaacaggaggcacggcaaatacgcagactctgggcttcagccaaggtgggcctaatacaatggccaatcaggcaaagaactggctgccaggaccctgttaccgccaacaacgcgtctcaacgacaaccgggcaaaacaacaatagcaactttgcctggactgctgggaccaaataccatctgaatggaagaaattcattggctaatcctggcatcgctatggcaacacacaaagacgacaaggagcgtttttttcccagtaacgggatcctgatttttggcaaacaaaatgctgccagagacaatgcggattacagcgatgtcatgctcaccagcgaggaagaaatcaaaaccactaaccctgtggctacagaggaatacggtatcgtggcagataacttgcagcagcaaaacacggctcctcaaattggaactgtcaacagccagggggccttacccggtatggtctggcagaaccgggacgtgtacctgcagggtcccatctgggccaagattcctcacacggacggcaacttccacccgtctccgctgatgggcggctttggcctgaaacatcctccgcctcagatcctgatcaagaacacgcctgtacctgcggatcctccgaccaccttcaaccagtcaaagctgaactctttcatcacgcaatacagcaccggacaggtcagcgtggagatcgagtgggagctgcagaaggaaaacagcaagcgctggaacccggagatccagtacacctccaactactacaaatctacaagtgtggactttgctgttaatacagaaggcgtgtactctgaaccccaccccattggcacccgttacctcacccgtcccctgtaa

SEQ ID NO: 1639 - DNA, 2214 bp, synthetic construct
  misc_feature 1..2214: note = Description of Artificial Sequence: Synthetic polynucleotide
  source 1..2214: mol_type = other DNA
atggctgccgatggttatcttccagattggctcgaggacactctctctgaaggaataagacagtggtggaagctcaaacctggcccaccaccaccaaagcccgcagagcggcataaggacgacagcaggggtcttgtgcttcctgggtacaagtacctcggacccttcaacggactcgacaagggggagcccgtcaacgcggcggacgcagcggccctcgagcacgacaaggcctacgaccagcagctcaaagcgggtgacaatccgtacctgcggtataaccacgccgacgccgagtttcaggagcgtctgcaagaagatacgtcttttgggggcaacctcgggcgagcagtcttccaggccaagaagcgggttctcgaacctctcggtctggttgaggaaggcgctaagacggctcctggaaagaagagaccggtagagccatcaccccagcgttctccagactcctctacgggcatcggcaagaaaggccagcagcccgcgaaaaagagactcaactttgggcagactggcgactcagagtcagtgcccgaccctcaaccaatcggagaaccccccgcaggcccctctggtctgggatctggtacaatggctgcaggcggtggcgctccaatggcagacaataacgaaggcgccgatggagtgggtagttcctcgggaaattggcattgcgattccacatggctgggggacagagtcatcaccaccagcacccgaacctgggccctgcccacctacaacaaccacctctacaaacaaatttccagcgcttcaacgggagcctcgaacgacaatcactactttggctacagcaccccctgggggtattttgacttcaacagattccactgccacttctcaccacgtgactggcagcgactcatcaacaacaactggggattccggcctaagcgactcaacttcaagctcttcaacattcaggtcaaagaggttacggacaacaatggagtcaagaccatcgccaataaccttaccagcacggtccaggtcttcacggactcggagtaccagttgccgtacgtcctcggctctgcgcaccagggctgcctccctccgttcccggcggacgtgttcatgattccgcagtacggctacctaacgctcaacaatggcagccaggcagtgggacggtcatccttttactgcctggaatatttcccatcgcagatgctgagaacgggcaacaactttaccttcagctacacctttgaggacgttcctttccacagcagctacgctcacagccagagtctggaccgtctcatgaatcctctgattgaccagtacctgtactacttgtctcggactcaaacaacaggaggcacggcaaatacgcagactctgggcttcagccaaggtgggcctaatacaatggccaatcaggcaaagaactggctgccaggaccctgttaccgccaacaacgcgtctcaacgacaaccgggcaaaacaacaatagcaactttgcctggactgctgggaccaaataccatctgaatggaagaaattcattggctaatcctggcatcgctatggcaacacacaaagacgacaaggagcgtttttttcccagtaacgggatcctgatttttggcaaacaaaatgctgccagagacaatgcggattacagcgatgtcatgctcaccagcgaggaagaaatcaaaaccactaaccctgtggctacagaggaatacggtatcgtggcagataacctgcagcagcaaaacacggctcctcaaattggaactgtcaacagccagggggccttacccggtatggtctggcagaaccgggacgtgtacctgcagggtcccatctgggccaagattcttcacacggacggcaactttcacccttctccgctgatgggagggtttggaatgaagcacccgcctcctccgatcctgatcaagaacacgcctgtacctgcggatcctccgaccaccttcaaccagtcaaagctgaactctttcatcacgcaatacagcaccggacaggtcagcgtggaaattgaatgggagctgccgaaggaaaacagcaagcgctggaaccccgagatccagtacacctccaactactacaaatctacaagtgtggactttgctgttaatacagaaggtgtgtactatgaaccccaccccattggcacccgttacctcacccctcccctgtaa

SEQ ID NO: 1640 - DNA, 2214 bp, synthetic construct
  misc_feature 1..2214: note = Description of Artificial Sequence: Synthetic polynucleotide
  source 1..2214: mol_type = other DNA
atggctgccgatggttatcttccagattggctcgaggacaacctctctgagggcattcgcgagtggtgggcgctgaaacctggagccccgaagcccaaagccaaccagcaaaagcaggacgacggccggggtctggtgcttcctggctacaagtacctcggacccttcaacggactcgacaagggggagcccgtcaacgcggcggacgcagcggccctcgagcacgacaaggcctacgaccagcagctcaaagcgggtgacaatccgtacctgcggtataaccacgccgacgccgagtttcaggagcgtctgcaagaagatacgtcttttgggggcaacctcgggcgagcagtcttccaggccaagaagcgggttctcgaacctctcggtctggttgaggaaggcgctaagacggctcctggaaagaagagaccggtagagccatcaccccagcgctctccagactcctctacgggcatcggcaagaaaggccaacagcccgccagaaaaagactcaattttggtcagactggcgactcagagtcagttccagaccctcaacctctcggagaacctccagcagcgccctctggtgtggcacctaatacaatggctgcaggcggtggcgcaccaatggcagacaataacgaaggcgccgacggagtgggtaatgcctcaggaaattggcattgcgattccacatggctgggcgacagagtcatcaccaccagcacccgaacatgggccttgcccacctataacaaccacctctacaagcaaatctccagtgcttcaacgggggccagcaacgacaaccactacttcggctacagcaccccctgggggtattttgatttcaacagattccactgccacttttcaccacgtgactggcagcgactcatcacaacaattgggggattccggcctaagcgactcaacttcaagctcttcaacattcaggtcaaagaggttacggacaacaatggagtcaagaccatcgccaataaccttaccagcacggtccaggtcttcacggactcggagtaccagttgccgtacgtcctcggctctgcgcaccagggctgcctccctccgttcccggcggacgtgttcatgattccgcagtacggctacctaacgctcaacaatggcagccaggcagtgggacggtcatccttttactgcctggaatatttcccatcgcagatgctgagaacgggcaacaactttaccttcagctacacctttgaggacgttcctttccacagcagctacgctcacagccagagtctggaccggctgatgaatcctctgattgaccagtacctgtactacttgtctcggactcaaacaacaggaggcacggcaaatacgcagactctgggcttcagccaaggtgggcctaatacaatggccaatcaggcaaagaactggctgccaggaccctgttaccgccaacaacgcgtctcaacgacaaccgggcaaaacaacaatagcaactttgcctggactgctgggaccaaataccatctgaatggaagaaattcattggctaatcctggcatcgctatggcaacacacaaagacgacaaggagcgtttttttcccagtaacgggatcctgatttttggcaaacaaaatgctgccagagacaatgcggattacagcgatgtcatgctcaccagcgaggaagaaatcaaaaccactaaccctgtggctacagaggaatacggtatcgtggcagataacttgcagcagcaaaacacggctcctcaaattggaactgtcaacagccagggggccttacccggtatggtctggcagaaccgggacgtgtacctgcagggtcccatctgggccaagattcctcacacggacggcaacttccacccgtctccgctgatgggcggctttggcctgaaacatcctccgcctcagatcctgatcaagaacacgcctgtacctgcggatcctccgaccaccttcaaccagtcaaagctgaactctttcatcacgcaatacagcaccggacaggtcagcgtggaaattgaatgggagctgcagaaggaaaacagcaagcgctggaaccccgagatccagtacacctccaactactacaaatctacaagtgtggactttgctgttaatacagaaggcgtgtactctgaaccccaccccattggcacccgttacctcacccgtcccctgtaa

SEQ ID NO: 1641 - DNA, 2211 bp, synthetic construct
  misc_feature 1..2211: note = Description of Artificial Sequence: Synthetic polynucleotide
  source 1..2211: mol_type = other DNA
atggctgccgatggttatcttccagattggctcgaggacactctctctgaaggaataagacagtggtggaagctcaaacctggcccaccaccaccaaagcccgcagagcggcataaggacgacggccggggtctggtgcttcctggctacaagtacctcggacccttcaacggactcgacaagggggagcccgtcaacgcggcggacgcagcggccctcgagcacgacaaggcctacgaccagcagctcaaagcgggtgacaatccgtacctgcggtataaccacgccgacgccgagtttcaggagcgtctgcaagaagatacgtcttttgggggcaacctcggacgagcagtcttccaggcgaaaaagagggttcttgaacctctgggcctggttgaggaacctgttaagacggctccgggaaaaaagaggccggtagagcagtcgccacaagagccagactcctcctcgggcatcggcaagaaaggccagcagcccgctaaaaagagactcaattttggtcagactggcgactcagagtcagtccccgacccacaacctctcggagaacctccagcaacccccgctgctgtgggacctactacaatggcttcaggcggtggcgcaccaatggcagacaataacgaaggcgccgacggagtgggtaatgcctcaggaaattggcattgcgattccacatggatgggcgacagagtcatcaccaccagcacccgaacatgggccttgcccacctataacaaccacctctacaagcaaatctccagtgcttcaacgggggccagcaacgacaaccactacttcggctacagcaccccctgggggtattttgactttaacagattccactgccacttttcaccacgtgactggcagcgactcatcaacaacaactggggattccggcctaagcgactcaacttcaagctcttcaacattcaggtcaaggaggtcacgcagaatgaaggcaccaagaccatcgccaataacctcaccagcaccatccaggtgtttacggactcggagtaccagctgccgtacgttctcggctccgcccaccagggctgcctgcctccgttcccggcggacgtgttcatgatcccccagtacggctacctaacactcaacaacggtagtcaggccgtgggacgctcctccttctactgcctggaatactttccttcgcagatgctgagaaccggcaacaacttccagtttacttacaccttcgaggacgtgcctttccacagcagctacgcgcacagccagagcttggaccggctgatgaatcctctgattgaccagtacctgtactacttgtctcggactcaaacaacaggaggcacggcaaatacgcagactctgggcttcagccaaggtgggcctaatacaatggccaatcacgcaaagaactggctgccaggaccctgttaccgccaacaacgcgtctcaacgacaaccgggcaaaacaacaatagcaactttgcctggactgctgggaccaaataccatctgaatggaagaaattcattggctaatcctggcatcgctatggcaacacacaaagacgacaaggagcgtttttttcccagtaacgggatcctgatttttggcaaacaaaatgctgccagagacaatgcggattacagcgatgtcatgctcaccagcgaggaagaaatcaaaaccactaaccctgtggctacagaggaatacggtatcgtggcagataacttgcagcagcaaaacacggctcctcaaattggaactgtcaacagccagggggccttacccggtatggtctggcagaaccgggacgtgtacctgcagggtcccatctgggccaagattcctcacacggacggcaacttccacccgtctccgctgatgggcggcttcggcctgaaacatcctccgcctcagatcctgatcaagaacacgcctgtacctgcggatcctccgaccaccttcaaccagtcaaagctgaactctttcatcacgcaatacagcaccggacaggtcagcgtggaaattgaatgggagctgcagaaggaaaacagcaagcgctggaaccccgagatccagtacacctccaactactacaaatctacaagtgtggactttgctgttaatacagaaggcgtgtactctgaaccccaccccattggcacccgttacctcacccgtcccctgtaa

SEQ ID NO: 1642 - DNA, 2214 bp, synthetic construct
  misc_feature 1..2214: note = Description of Artificial Sequence: Synthetic polynucleotide
  source 1..2214: mol_type = other DNA
atggctgccgatggttatcttccagattggctcgaggacaacctctctcagggcattcgcgagtggtgggacttgaaacctggagccccgaaacccaaagccaaccagcaaaagcaggacgacggccggggtctggtgcttcctggctacaagtacctcggacccttcaacggactcgacaagggggagcccgtcaacgcggcggacgcagcggccctcgagcacgacaaggcctacgaccagcagctcaaagcgggtgacaatccgtacctgcggtataaccacgccgacgccgagtttcaggagcgtctgcaagaagatacgtcttttgggggcaacctcggacgagcagtcttccaggccaagaagcgggttctcgaacctctcggtctggttgaggaaggcgctaagacggctcctggaaagaagagaccggtagagccatcaccccagcgttctccagactcctctacgggcatcggcaagaaaggccaacagcccgccagaaaaagactcaattttggtcagactggcgactcagagtcagttccagaccctcaacctctcggagaacctccagcagcgcccgctgctgtgggacctactacaatggcttcaggcggtggcgcaccaatggcagacaataacgaaggcgccgacggagtgggtagttcctcgggaaattggcattgcgattcccaatggctgggggacagagtcatcaccaccagcacccgaacctgggccctgcccacctacaacaaccacctctacaagcaaatctccagtgcttcaacgggggccagcaacgacaaccactacttcggctacagcaccccctgggggtattttgacttcaacagattccactgccacttttcaccacgtgactggcaaagactcatcaacaacaactggggattccggcccaagagactcagcttcaagctcttcaacatccaggtcaaggaggtcacgcagaatgaaggcaccaagaccatcgccaataacctcaccagcaccatccaggtgtttacggactcggagtaccagctgccgtacgttctcggctctgcccaccagggctgcctgcctccgttcccggcggacgtgttcatgattccccagtacgggtacctgactctgaacaatggcagtcaggccgtgggccgttcctccttctactgcctggagtactttccttctcaaatgctgagaaccggcaacaacttccagtttacttacaccttcgaggacgtgcctttccacagcagctacgcccacagccagagcttggaccggctgatgaatcctctgattgaccagtacctgtactacttgtctcggactcaaacaacaggaggcacgacaaatgcgcagactctgggcttcagccaaggtgggcctaatacaatggccaatcaggcaaagaactggctgccaggaccctgttaccgccaacaacgcgtctcaacgacaaccgggcaaaacaacaatagcaactttgcctggactgctgggaccaaataccatctgaatggaagaaattcattggctaatcctggcatcgctatggcaacacacaaagacgacaaggagcgtttttttcccagtaacgggatcctgatttttggcaaacaaaatgctgccagagacaatgcggattacagcgatgtcatgctcaccagcgaggaagaaatcaaaaccactaaccctgtggctacagaggaatacggtatcgtggcagataacttgcagcagcaaaacacggctcctcaaattggaactgtcaacagccagggggccttacccggtatggtctggcagaaccgggacgtgtacctgcagggtcccatctgggccaagattcctcacacggacggcaacttccacccgtctccgctgatgggcggctttggcctgaaacatcctccgcctcagatcctgatcaagaacacgcctgtacctgcggatcctccgaccaccttcaaccagtcaaagctgaactctttcatcacacagtactccacgggacaggtcagcgtggaaattgaatgggagctgcagaaggaaaacagcaagcgctggaacccggagatccagtacacttccaactactacaaatctacaaatgtggactttgctgttaacacagaaggcgtgtactctgaaccccaccccattggcacccgttacctcacccgtcccctgtaa

SEQ ID NO: 1643 - DNA, 2211 bp, synthetic construct
  misc_feature 1..2211: note = Description of Artificial Sequence: Synthetic polynucleotide
  source 1..2211: mol_type = other DNA
atggctgccgatggttatcttccagattggctcgaggacaacctctctgagggcattcgcgagtggtgggacttgaaacctggagccccgaaacccaaagccaaccagcaaaagcaggacgacggccggggtctggtgcttcctggctacaagtacctcggacccttcaacggactcgacaagggggagcccgtcaacgcggcggacgcagcggccctcgagcacgacaaggcctacgaccagcagctcaaagcgggtgacaatccgtacctgcggtataaccacgccgacgccgagtttcaggagcgtctgcaagaagatacgtcttttgggggcaacctcgggcgagcagtcttccaggccaagaagagggttctcgaaccttttggtctggttgaggaaggcgctaagacggctcctggaaagaaacgtccggtagagcagtcgccacaagagccagactcctcctcgggcatcggcaagacaggccagcagcccgctaaaaagagactcaatttcggtcagactggcgacacagagtcagtcccagaccctcaaccaatcggagaacctcccgcagccccctcaggtgtgggacctaatacaatggctgcaggcggtggcgcaccaatggcagacaataacgaaggcgccgacggagtgggtagttcctcgggaaattggcattgcgattccacatggatgggtgacagagtcatcaccaccagcacccgaacctgggccctgcccacctacaataaccacctctacaagcaaatctccagtgcttcaacgggggccagcaacgacaaccactacttcggctacagcaccccctgggggtattttgacttcaacagattccactgccacttctcaccacgtgactggcagcgactcatcaacaacaactggggattccggcctaagcgactcaacttcaagctcttcaacattcaggtcaaggaggtcacgcagaatgaaggcaccaagaccatcgccaataacctcaccagcaccatccaggtgtttacggactcggagtaccagctgccgtacgttctcggctctgcccaccagggctgcctgcctccgttcccggcggacgtgttcatgattccccagtacggctacctaacactcaacaacggtagtcaggccgtgggacgctcctccttctactgcctggaatactttccttcgcagatgctgagaaccggcaacaacttccagtttacttacaccttcgaggacgtgcctttccacagcagctacgcccacagccagagcttggaccggctgatgaatcctctgattgaccagtacctgtactacttgtctcggactcaaacaacaggaggcacggcaaatacgcagactctgggcttcagccaaggtgggcctaatacaatggccaatcaggcaaagaactggctgccaggaccctgttaccgccaacaacgcgtctcaacgacaaccgggcaaaacaacaatagcaactttgcctggactgctgggaccaaataccatctgaatggaagaaattcattggctaatcctggcatcgctatggcaacacacaaagacgacaaggagcgtttttttcccagtaacgggatcctgatttttggcaaacaaaatgctgccagagacaatgcggattacagcgatgtcatgctcaccagcgaggaagaaatcaaaaccactaaccctgtggctacagaggaatacggtatcgtggcagataacttgcagcagcaaaacacggctcctcaaattggaactgtcaacagccagggggccttacccggtatggtctggcagaaccgggacgtgtacctgcagggtcccatctgggccaagattcctcacacggacggcaacttccacccgtctccgctgatgggcggctttggcctgaaacatcctccgcctcagatcctgatcaagaacacgcctgtacctgcggatcctccgaccaccttcaaccagtcaaagctgaactctttcatcacacagtactccacgggacaggtcagcgtggaaattgaatgggagctgcagaaggaaaacagcaagcgctggaacccggagatccagtacacttccaactactacaaatctacaaatgtggactttgctgttaacacagaaggcgtgtactctgaaccccaccccattggcacccgttacttcacccgtcccctgtaa

SEQ ID NO: 1644 - DNA, 2211 bp, synthetic construct
  misc_feature 1..2211: note = Description of Artificial Sequence: Synthetic polynucleotide
  source 1..2211: mol_type = other DNA
atggctgccgatggttatcttccagattggctcgaggacaacctctctgagggcattcgcgagtggtgggacttgaaacctggagccccgaaacccaaagccaaccagcaaaagcaggacgacggccggggtctggtgcttcctggctacaagtacctcggacccttcaacggactcgacaagggggagcccgtcaacgcggcggacgcagcggccctcgagcacgacaaggcctacgaccagcagctcaaagcgggtgacaatccgtacctgcggtataaccacgccgacgccgagtttcaggagcgtctgcaagaagatacgtcttttgggggcaacctcgggcgagcagtcttccaggccaagaagcgggttctcgaacctctcggtctggttgaggaaggcgctaagacggctcctggaaagaaacgtccggtagagcagtcgccacaagagccagactcctcctcgggcatcggcaagacaggccagcagcccgctaaaaaaagactcaattttggtcagactggcgactcagagtcagttccagaccctcaacctctcggagaacctccagcaacccccgctgctgtgggacctactacaatggcttcaggtggtggcgcaccaatggcagacaataacgagggcgccgacggagtgggtaattcctcgggaaattggcattgcgattccacatggatgggcgacagagtcatcaccaccagcacccgaacctgggccctgcccacctacaacaatcacctctacaagcaaatctccagtgcttcaacgggggccagcaacgacaaccactacttcggctacagcaccccctgggggtattttgacttcaacagattccactgccacttctcaccacgtgactggcagcgactcatcaacaacaactggggattccggcctaagcgactcaacttcaagctcttcaacattcaggtcaaagaggttacggacaacaatggagtcaagaccatcgccaataaccttaccagcacggtccaggtcttcacggactcggagtaccagttgccgtacgtcctcggctctgcgcaccagggctgcctccctccgttcccggcggacgtgttcatgattccgcagtacggctacctaacgctcaacaacggtagtcaggccgtgggacgctcctccttctactgcctggaatactttccttcgcagatgctgagaaccggcaacaacttccagtttacttacaccttcgaggacgtgcctttccacagcagctacgcccacagccagagcttggaccggctgatgaatcctctgattgaccagtacctgtactacttgtctcggactcaaacaacaggaggcacggcaaatacgcagactctgggcttcagccaaggtgggcctaatacaatggccaatcaggcaaagaactggctgccaggaccctgttaccgccaacaacgcgtctcgacgacaaccgggcaaaacaacaatagcaactttgcctggactgctgggaccaaataccatctgaatggaagaaattcattggctaatcctggcatcgctatggcaacacacaaagacgacaaggagcgtttttttcccagtaacgggatcctgatttttggcaaacaaaatgctgccagagacaatgcggattacagcgatgtcatgctcaccagcgaggaagaaatcaaaaccactaaccctgtggctacagaggaatacggtatcgtggcagataacttgcagcagcaaaacacggctcctcaaattggaactgtcaacagccagggggccttacccggtatggtttggcagaaccgggacgtgtacctgcagggtcccatctgggccaagattcctcacacggacggcaacttccacccgtctccgctgatgggcggctttggcctgaaacatcctccgcctcagatcctgatcaagaacacgcctgtacctgcggatcctccgaccaccttcaaccagtcaaagctgaactctttcatcacacagtactccacgggacaggtcagcgtggaaattgaatgggagctgcagaaggaaaacagcaagcgctggaacccggagatccagtacacttccaactactacaaatctacaaatgtggactttgctgttaacacagaaggcgtgtactctgaaccccaccccattggcacccgttacctcacccgtcccctgtaa

SEQ ID NO: 1645 - DNA, 2211 bp, synthetic construct
  misc_feature 1..2211: note = Description of Artificial Sequence: Synthetic polynucleotide
  source 1..2211: mol_type = other DNA
atggctgccgatggttatcttccagattggctcgaggacaacctctctgagggcattcgcgagtggtgggacttgaaacctggagccccgaagcccaaagccaaccagcaaaagcaggacgacggccggggtctggtgcttcctggctacaagtacctcggacccttcaacggactcgacaagggggagcccgtcaacgcggcggacgcagcggccctcgagcacgacaaggcctacgaccagcagctcaaagcgggtgacaatccgtacctgcggtataaccacgccgacgccgagtttcaggagcgtctgcaagaagatacgtcttttgggggcaacctcgggcgagcagtcttccaggccaagaagcgggttctcgaacctctcggtctggttgaggaaggcgctaagacggctcctggaaagaaacgtccggtagagcagtcaccacaagagccagactcctcctcgggcatcggcaagacaggccagcagcccgctaaaaagagactcaattttggtcagactggcgactcagagtcagtccccgacccacaacctctcggagaacctccagcaacccccgctgctgtgggacctactacaatggcttcaggcggtggcgcaccaatggcggacaataacgaaggcgccgatggagtgggtaatgcctcaggaaattggcattgcgattccacatggctgggcgacagagtcatcaccaccagcacccgaacatgggccttgcccacctataacaaccacctctacaagcaaatctccagtgcttcaacgggggccagcaacgacaaccactacttcggctacagcaccccctgggggtattttgactttaacagattccactgccacttctcaccacgtgactggcagcgactcatcaacaacaactggggattccggcccaagagactcaacttcaagctcttcaacatccaggtcaaggaggtcacgcagaatgaaggcaccaagaccatcgccaataacctcaccagcaccatccaggtgtttacggactcggagtaccagctgccgtacgttctcggctctgcccaccagggctgcctgcctccgttcccggcggacgtgttcatgattccccagtacggctacctgactctgaacaatggcagtcaggccgtgggccgttcctccttctactgcctagagtactttccttctcaaatgctgagaacgggcaacaactttgagttcagctaccagtttgaggacgtgccttttcacagcagctacgcgcacagccaaagcctggaccggctgatgaatcctctgattgaccagtacctgtactacttgtctcggactcaaacaacaggaggcacggcaaatacgcagactctgggcttcagccaaggtgggcctaatacaatggccaatcaggcaaagaactggctgccaggaccctgttaccgccaacaacgcgtctcaacgacaaccgggcaaaacaacaatagcaactttgcctggactgctgggaccaaataccatatgaatggaagaaattcattggttaatcctggcatcgctatggcaacacacaaagacgacaaggagcgtttttttcccagtaacgggatcctgatttttggcaaacaaaatgttgccagagacaatgcggattacagcgatgtcatgctcaccagcgaggaagaaatcaaaaccactaaccctgtggctacagaggaatacggtattgtggcagataacttgcagcagcaaaacacggctcctcaaattggaactgtcaacagccagggggccttacccggtatggtctggcagaaccgggacgtgtacctgcagggtcccatctgggccaagattcctcacacggacggcaacttccacccgtcgccgctgatgggcggctttggcctgaaacatcctccgcctcagatcctgatcaagaacacgcctgtacctgcggatcctccgaccaccttcaaccagtcaaagctgaactctttcatcacgcaatacagcaccggacaggtcagcgtggaaattgaatgggagctgcagaaggaaaacagcaagcgctggaaccccgagatccagtacacctccaactactacaaatctacaagtgtggactttgctgttaatacagaaggcgtgtactctgaaccccaccccattggcacccgttacctcacccgtcccctgtaa

SEQ ID NO: 1646 - protein, 736 aa, synthetic construct
  REGION 1..736: note = Description of Artificial Sequence: Synthetic polypeptide
MAADGYLPDWLEDTLSEGIRQWWKLKPGPPPPKPAERHKDDSRGLVLPGYKYLGPFNGLDKGEPVNEADAAALEHDKAYDRQLDSGDNPYLKYNHADAEFQERLKEDTSFGGNLGRAVFQAKKRVLEPLGLVEEPVKTAPGKKRPVEQSPQEPDSSSGIGKKGQQPAKKRLNFGQTGDSESVPDPQPLGEPPATPAAVGPTTMASGGGAPMADNNEGADGVGNASGNWHCDSTWMGDRVITTSTRTWALPTYNNHLYKQISSASTGASNDNHYFGYSTPWGYFDFNRFHCHFSPRDWQRLINNNWGFRPKRLNFRLFNIQVKEVTDNNGVKTIANNLTSTVQVFTDSEYQLPYVLGSAHQGCLPPFPADVFMIPQYGYLTLNNGSQAVGRSSFYCLEYFPSQMLRTGNNFTFSYTFEEVPFHSSYAHSQSLDRLMNPLIDQYLYYLSRTQTTGGTANTQTLGFSQGGPNTMANQAKNWLPGPCYRQQRVSTTTGQNNNSNFAWTAGTKYHLNGRNSLANPGIAMATHKDDKERFFPSNGILIFGKQNAARDNADYSDVMLTSEEEIKTTNPVATEEYGIVADNLQQQNTAPQIGTVNSQGALPGMVWQNRDVYLQGPIWAKIPHTDGNFHPSPLMGGFGLKHPPPQILIKNTPVPADPPTTFNQSKLNSFITQYSTGQVSVEIEWELQKENSKRWNPEIQYTSNYYKSTSVDFAVNTEGVYSEPHPIGTRYLTRPL

SEQ ID NO: 1647 - protein, 736 aa, synthetic construct
  REGION 1..736: note = Description of Artificial Sequence: Synthetic polypeptide
MAADGYLPDWLEDNLSEGIREWWDLKPASPKPKANQQKQDDGRGLVLPGYKYLGPFNGLDKGEPVNAADAAALEHDKAYDQQLKAGDNPYLRYNHADAEFQERLQEDTSFGGNLGRAVFQAKKRLLEPLGLVEEAAKTAPGKKRPVEQSPQEPDSSAGIGKSGAQPAKKRLNFGQTGGTESVPDPQPLGEPPAAPSGVGPNTMAAGGGAPMADNNEGADGVGSSSGNWHCDSTWLGDRVITTSTRTWALPTYNNHLYKQISSASTGASNDNHYFGYSTPWGYFDFNRFHCHFSPRDWQRLINNNWGFRPKRLSFKLFNIQVKEVTQNEGTKTIANNLTSTIQVFTDSEYQLPYVLGSAHQGCLPPFPADVFMIPQYGYLTLNNGSQAVGRSSFYCLEYFPSQMLRTGNNFQFTYTFEDVPFHSSYAHSQSLDRLMNPLIDQYLYYLSRTQTTGGTANTQTLGFSQGGPNTMANQAKNWLPGPCYRQQRVSTTTGQNNNSNFAWTAGTKYHLNGRNSLANPGIAMATHKDDKERFFPSNGILIFGKQNAARDNADYSDVMLTSEEEIKTTNPVATEEYGIVADNLQQQNTAPQIGTVNSQGALPGMVWQNRDVYLQGPIWAKIPHTDGNFHPSPLMGGFGLKHPPPQILIKNTPVPADPPTTFNQSKLNSFITQYSTGQVSVEIEWELQKENSKRWNPEIQYTSNYYKSTSVDFAVNTEGVYSEPHPIGTRYLTRPL

SEQ ID NO: 1648 - protein, 736 aa, synthetic construct; identical to SEQ ID NO: 1587
  REGION 1..736: note = Description of Artificial Sequence: Synthetic polypeptide

SEQ ID NO: 1649 - protein, 736 aa, synthetic construct
  REGION 1..736: note = Description of Artificial Sequence: Synthetic polypeptide
MAADGYLPDWLEDNLSEGIREWWDLEPGAPKPKANQQKQDDGRGLVLPGYKYLGPFNGLDKGEPVNAADAAALEHDKAYDQQLKAGDNPYLRYNHADAEFQERLQEDTSFGGNLGRAVFQAKKRVLEPLGLVEEGAKTAPGKKRPVEQSPQEPDSSSGIGKTGQQPAKKRLNFGQTGDSESVPDPQPLGEPPATPAAVGPTTMASGGGAPMADNNEGADGVGNASGNWHCDSTWLGDRVITTSTRTWALPTYNNHLYKQISSASTGASNDNHYFGYSTPWGYFDFNRFHCHFSPRDWQRLINNNWGFRPKRLNFKLFNIQVKEVTDNNGVKTIANNLTSTVQVFTDSEYQLPYVLGSAHQGCLPPFPADVFMIPQYGYLTLNNGSQAVGRSSFYCLEYFPSQMLRTGNNFQFTYTFEDVPFHSSYAHSQSLDRLMNPLIDQYLYYLSRTQTTGGTANTQTLGFSQGGPNTMANQAKNWLPGPCYRQQRVSTTTGQNNNSNFAWTAGTKYHLNGRNSLANPGIAMATHKDDKERFFPSNGILIFGKQNAARDNADYSDVMLTSEEEIKTTNPVATEEYGIVADNLQQQNTAPQIGTVNSQGALPGMVWQNRDVYLQGPIWAKIPHTDGNFHPSPLMGGFGLKHPPPQILIKNTPVPADPPTTFNQSKLNSFITQYSTGQVSVEIEWELQKENSKRWNPEIQYTSNYYKSTSVDFAVNTEGVYSEPHPIGTRYLTRPL

SEQ ID NO: 1650 - protein, 736 aa, synthetic construct; identical to SEQ ID NO: 1587
  REGION 1..736: note = Description of Artificial Sequence: Synthetic polypeptide

SEQ ID NO: 1651 - protein, 736 aa, synthetic construct
  REGION 1..736: note = Description of Artificial Sequence: Synthetic polypeptide
MAADGYLPDWLEDTLSEGIRQWWKLKPGPPPPKPAERHKDDSRGLVLPGYKYLGPFNGLDKGEPVNEADAAALEHDKAYDRQLDSGDNPYLKYNHADAEFQERLKEDTSFGGNLGRAVFQAKKRVLEPLGLVEEPVKTAPGKKRPVEQSPQEPDSSSGIGKKGQQPAKKRLNFGQTGDSESVPDPQPLGEPPATPAAVGPTTMASGGGAPMADNNEGADGVGNASGNWHCDSTWLGDRVITTSTRTWALPTYNNHLYKQISSASTGASNDNHYFGYSTPWGYFDFNRFHCHFSPRDWQRLINNNWGFRPKRLNFKLFNIQVKEVTDNNGVKTIANNLTSTVQVFTDSDYQLPYVLGSAHQGCLPPFPADVFMIPQYGYLTLNNGSQAVGRSSFYCLEYFPSQMLRTGNNFQFTYTFEDVPFHSSYAHSQSLDRLMNPLIDQYLYYLSRTQTTGGTANTQTLGFSQGGPNTMANQAKNWLPGPCYRQQRVSTTTGQNNNSNFAWTAGTKYHLNGRNSLANPGIAMATHKDDKERFFPSNGILIFGKQNAARDNADYSDVMLTSEEEIKTTNPVATEEYGIVADNLQQQNTAPQIGTVNSQGALPGMVWQNRDVYLQGPIWAKIPHTDGNFHPSPLMGGFGLKHPPPQILIKNTPVPADPPTTFNQSKLNSFITQYSTGQVSVEIEWELQKENSKRWNPEIQYTSNYYKSTSVDFAVNTEGVYSEPHPIGTRYLTRPL

SEQ ID NO: 1652 - protein, 734 aa, synthetic construct
  REGION 1..734: note = Description of Artificial Sequence: Synthetic polypeptide
MAADGYLPDWLEDTLSEGIRQWWKLKPGPPPPKPAERHKDDSRGLVLPGYKYLGPFNGLDKGEPVNEADAAALEHDKAYDQQLQAGDNPYLRYNHADAEFQERLQGDTSFGGNLGRAVFQAKKRLLEPLGLVEEAAKTAPGKKRPVEQSPQEPDSSAGIGKSGAQPAKKRLNFGQTGDTESVPDPQPIGEPPAAPSGVGSLTMASGGGAPVADNNEGADGVGSSSGNWHCDSQWLGDRVITTSTRTWALPTYNNHLYKQISSASTGASNDNHYFGYSTPWGYFDFNRFHCHFSPRDWQRLINNNWGFRPKRLSFKLFNHPGQGGHAERHQDHRQPHQHIQVFTDSEYQLPYVLGSAHQGCLPPFPADVFMIPQYGYLTLNNGSQAVGRSSFYCLEYFPSQMLRTGNNFQFTYTFEDVPFHSSYAHSQSLDRLMNPLIDQYLYYLSRTQTTGGTANTQTLGFSQGGPNTMANQAKNWLPGPCYRQQRVSTTTGQNNNSNFAWTAGTKYHLNGRNSLGNPGIAMATHKDDKERFFPSNGILIFGKQNAARDNADYSDVMLTSEEEIKTTNPVATEEYGIVADNLQQQNTAPQIGTVNSQGALPGMVWQNRDVYLQGPIWAKIPHTDGNFHPSPLMGGFGLKHPPPQILIKNTPVPADPPTAFNQSKLNSFITQYSTGQVSVEIEWELQKENSKRWNPEIQYTSNYYKSTSVDFAVNTEGVYSEPHPIGTRYLTRPL

SEQ ID NO: 1653 - protein, 737 aa, synthetic construct
  REGION 1..737: note = Description of Artificial Sequence: Synthetic polypeptide
MAADGYLPDWLEDNLSEGIREWWDLKHGAPKPKANQQKQDDGRGLVLPGYKYLGPFNGLDKGEPVNAADAAALEHDKAYDQQLKAGDNPYLRYNHADAEFQERLQEDTSFGGNLGRAVFQAKKRVLEPFGLVEEGAKTAPGKKRPVEQSPQEPDSSSGIGKTGQQPAKKRLNFGQTGDSESVPDPQPLGEPPATPAAVGPTTMASGGGAPMADNNEGADGVGNASGNWHCDSTWLGDRVITTSTRTWALPTYNNHLYKQISNGTSGGSTNDNTYFGYSTPWGYFDFNRFHCHFSPRDWQRLINNNWGFRPKRLNFKLFNIQVKEVTQNEGTKTIANNLTSTIQVFTDSEYQLPYVLGSAHQGCLPPFPADVFMIPQYGYLTLNNGSQAVGRSSFYCLEYFPSQMLRTGNNFTFSYTFEDVPFHSSYAHSQSLDRLMNPLIDQYLYYLSRTQTTGGTANTQTLGFSQGGPNTMANQAKNWLPGPCYRQQRVSTTTGQNNNSNFAWTAGTKYHLNGRNSLANPGIAMATHKDDKERFFPSNGILIFGKQNAARDNADYSDVMLTSEEEIKTTNPVATEEYGIVADNLQQQNTAPQIGTVNSQGALPGMVWQNRDVYLQGPIWAKIPHTDGNFHPSPLMGGFGLKHPPPQILIKNTPVPADPPTTFNQSKLNSFITQYSTGQVSVEIEWELQKENSKRWNPEIQYTSNYYKSTSVDFAVNTEGVYSDPHPIGTRYLTRPL

SEQ ID NO: 1654 - protein, 737 aa, synthetic construct
  REGION 1..737: note = Description of Artificial Sequence: Synthetic polypeptide
MAADGYLPDWLEDNLSEGIREWWALKPGAPKPKANQQKQDDGRGLVLPGYKYLGPFNGLDKGEPVNEADAAALEHDKAYDQQLKAGDNPYLRYNHADAEFQERLQEDTSFGGNLGRAVFQAKKRVLEPLGLVEEGAKTAPGKKRPVEPSPQRSPDSSTGIGKKGQQPARKRLNFGQTGDSESVPDPQPLGEPPAAPSGVGPNTMASGGGAPMADNNEGADGVGNSSGNWHCDSTWMGDRVITTSTRTWALPTYNNHLYKQISSASTGASNDNHYFGYSTPWGYFDFNRFHCHFSPRDWQRLINNNWGFRPKRLNFKLFNIQVKEVTQNEGTKTIANNLTSTIQVFTDSEYQLPYVLGSAHQGCLPPFPADVFMIPQYGYLTLNNGSQAVGRSSFYCLEYFPSQMLRTGNNFQFTYTFEDVPFHSSYAHSQSLDRLMNPLIDQYLYYLSRTQTTGGTANTQTLGFSQGGPNTMANQAKNWLPGPCYRQQRVSTTTGQNNNSNFAWTAGTKYHLNGRNSLANPGIAMATHKDDKERFFPSNGILIFGKQNAARDNADYSDVMLTSEEEIKTTNPVATEEYGIVADNLQQQNTAPQIGTVNSQGALPGMVWQNRDVYLQGPIWAKIPHTDGNFHPSPLMGGFGLKHPPPQILIKNTPVPADPPTTFNQSKLNSFITQYSTGQVSVEIEWELQKENSKRWNPEIQYTSNYYKSTSVDFAVNTEGVYSEPHPIGTRYLTRPL

SEQ ID NO: 1655 - protein, 736 aa, synthetic construct
  REGION 1..736: note = Description of Artificial Sequence: Synthetic polypeptide
  VARIANT 226: note = Xaa can be any naturally occurring amino acid
MAADGYLPDWLEDTLSEGIRQWWKLKPGPPPPKPAERHKDDSRGLVLPGYKYLGPFNGLDKGEPVNEADAAALEHDKAYDRQLDSGDNPYLKYNHADAEFQERLKEDTSFGGNLGRAVFQAKKRVLEPLGLVEEPVKTAPGKKRPVEQSPQEPDSSSGIGKKGQQPAKKRLNFGQTGDSESVPDPQPLGEPPATPAAVGPTTMASGGGAPMADNNEGADGVGNASXNWHCDSTWLGDRVITTSTRTWALPPITTTSTSKSPVLQRGRSNDNHYFGYSTPWGYFDFNRFHCHFSPRDWQRLINNNWGFRPKRLNFKLFNIQVKEVTDNNGVKTIANNLTSTVQVFTDSDYQLPYVLGSAHQGCLPPFPADVFMIPQYGYLTLNNGSQAVGRSSFYCLEYFPSQMLRTGNNFQFTYTFEDVPFHSSYAHSQSLDRLMNPLIDQYLYYLSRTQTTGGTANTQTLGFSQGGPNTMANQAKNWLPGPCYRQQRVSTTTGQNNNSNFAWTAGTKYHLNGRNSLANPGIAMATHKDDKERFFPSNGILIFGKQNAARDNADYSDVMLTSEEEIKTTNPVATEEYGIVADNLQQQNTAPQIGTVNSQGALPGMVWQNRDVYLQGPIWAKIPHTDGNFHPSPLMGGFGLKHPPPQILIKNTPVPADPPTTFNQSKLNSFITQYSTGQVSVEIEWELQKENSKRWNPEIQYTSNYYKSTNVDFAVNTEGVYSEPHPIGTRYLTRPL

SEQ ID NO: 1656 - protein, 736 aa, synthetic construct
  REGION 1..736: note = Description of Artificial Sequence: Synthetic polypeptide
  VARIANT 239: note = Xaa can be any naturally occurring amino acid
MAADGYLPDWLEDNLSEGIREWWDLKPGAPKPKANQQKQDDGRGLVLPGYKYLGPFNGLDKGEPVNAADAAALEHDKAYDQQLQAGDNPYLRYNHADAEFQERLQGDTSFGGNLGRAVFQAKKRVLEPLGLVEEAAKTAPGKKRPVEQSPQEPDSSAGIGKSGAQPAKKRLNFGQTGDTESVPDPQPIGEPPAAPSGVGPNTMAAGGGAPMADNNEGADGVGSSSGNWHCDSTWLGDRXITTSTRTWALPTYNNHLYKQISSASTGASNDNHYFGYSTPWGYFDFNRFHCHFSPRDWQRLINNNWGFRPKRLNFKLFNIQVKEVTDNNGVKTIANNLTSTVQVFTDSEYQLPYVLGSAHQGCLPPFPADVFMIPQYGYLTLNNGSQAVGRSSFYCLEYFPSQMLRTGNNFTFSYTFEDVPFHSSYAHSQSLDRLMNPLIDQYLYYLSRTQTTGGTANTQTLGFSQGGPNTMANQAKNWLPGPCYRQQRVSTTTGQNNNSNFAWTAGTKYHLNGRNSLANPGIAMATHKDDKERFFPSNGILIFGKQNAARDNADYSDVMLTSEEEIKTTNPVATEEYGIVADNFQQQNTAPQIGTVNSQGALPGMVWQNRDVYLQGPIWAKIPHTDGNFHPSPLMGGFGLKHPPPQILIKNTPVPADPPTTFNQSKLNSFITQYSTGQVSVEIEWELQKENSKRWNPEIQYTSNYYKSTSVDFAVNTEGVYSEPHPIGTRYLTRPL

SEQ ID NO: 1657 - protein, 736 aa, synthetic construct
  REGION 1..736: note = Description of Artificial Sequence: Synthetic polypeptide
MAADGYLPDWLEDNLSEGIREWWALKPGAPKPKANQQKQDDGRGLVLPGYKYLGPFNGLDKGEPVNEADAAALEHDKAYDQQLKAGDNPYLKYNHADAEFQERLQEDTSFGGNLGRAVFQAKKRLLEPLGLVEEAAKTAPGKKRPVEQSPQEPDSSAGIGKSGAQPAKKRLNFGQTGDTESVPDPQPLGEPPATPAAVGPTTMASGGGAPMADNNEGADGVGNASGNWHCDSTWLGDRVITTSTRTWALPTYNNHLYKQISSASTGASNDNHYFGYSTPWGYFDFNRFHCHFSPRDWQRLINNNWGFRPKRLSFKLFNIQVKEVTQNEGTKTIANNLTSTIQVFTDSEYQLPYVLGSAHQGCLPPFPADVFMIPQYGYLTLNNGSQAVGRSSFYCLEYFPSQMLRTGNNFQFTYTFEDVPFHSSYAHSQSLDRLMNPLIDQYLYYLSRTQTTGGTANTQTLGFSQGGPNTMANQAKNWLPGPCYRQQRVSTTTGQNNNSNFAWTAGTKYHLNGRNSLANPGIAMATHKDDKERFFPSNGILIFGKQNAARDNADYSDVMLTSEEEIKTTNPVATEEYGIVADNLQQQNTAPQIGTVNSQGALPGMVWQNRDVYLQGPIWAKIPHTDGNFHPSPLMGGFGLKHPPPQILIKNTPVPADPPTTFNQSKLNSFITQYSTGQVSVEIEWELQKENSKRWNPEIQYTSNYYKSTSVDFAVNTEGVYSEPHPIGTRYLTRPL

SEQ ID NO: 1658 - protein, 736 aa, synthetic construct
  REGION 1..736: note = Description of Artificial Sequence: Synthetic polypeptide
MAADGYLPDWLEDTLSEGIRQWWKLKPGPPPPKPAERHKDDSRGLVLPGYKYLGPFNGLDKGEPVNEADAAALEHDKAYDQQLQAGDNPYLRYNHADAEFQERLQGDTSFGGNLGRAVFQAKKRLLEPLGLVEEAAKTAPGKKRPVEQSPQEPDSSAGIGKSGAQPAKKRLNFGQTGDTESVPDPQPIGEPPAAPSGVGSLTMASGGGAPVADNNEGADGVGSSSGNWHCDSQWLGDRVITTSTRTWALPTYNNHLYKQISSASTGASNDNHYFGYSTPWGYFDFNRFHCHFSPRDWQRLINNNWGFRPKRLSFKLFNIQVKEVTQNEGTKTIANNLTSTIQVFTDSEYQLPYVLGSAHQGCLPPFPADVFMIPQYGYLTLNNGSQAVGRSSFYCLEYFPSQMLRTGNNFQFTYTFEDVPFHSSYAHSQSLDRLMNPLIDQYLYYLSRTQTTGGTANTQTLGFSQGGPNTMANQAKNWLPGPCYRQQRVSTTTGQNNNSNFAWTAGTKYHLNGRNSLANPGIAMATHKDDKERFFPSNGILIFGKQNAARDNADYSDVMLTSEEEIKTTNPVATEEYGIVADNLQQQNTAPQIGTVNSQGALPGMVWQNRDVYLQGPIWAKIPHTDGNFHPSPLMGGFGLKHPPPQILIKNTPVPADPPTTFNQSKLNSFITQYSTGQVSVEIEWELQKENSKRWNPEIQYTSNYYKSTSVDFAVNTEGVYSEPHPIGTRYLTRPL

SEQ ID NO: 1659 - protein, 738 aa, synthetic construct
  REGION 1..738: note = Description of Artificial Sequence: Synthetic polypeptide
MAADGYLPDWLEDNLSEGIRQWWKLKPGPPPPKPAERHKDDSRGLVLPGYKYLGPFNGLDKGEPVNAADAAALEHDKAYDQQLKAGDNPYLRYNHADAEFQERLQEDTSFGGNLGRAVFQAKKRVLEPLGLVEEGAKTAPGKKRPVEPSPQRSPDSSTGIGKKGQQPAKKRLNFGQTGDSESVPDPQPLGEPPATPAAVGPTTMASGGGAPMADNNEGADGVGNASGNWHCDSTWLGDRVITTSTRTWALPTYNNHLYKQISNGTSGGSTNDNTYFGCVTPWGYFDFNKFHCHFSPDDWQRLINNGWGFRTKRLNFKLFSMKVKKGTDNTGIKTIANNLTNTVHVFADSEYQLPYVLGSAHQGCLPPFPADVFMIPQYGYLTLNNGSQAVGRSSFYCLEYFPSQMLRTGNNFTFSYTFEDVPFHSSYAHSQSLDRLMNPLIDQYLYYLSRTQTTGGTANTQTLGFSQGGPNTMANQAKNWLPGPCYRQQRVSTTTGQNNNSNFAWTAGTKYHLNGRNSLANPGIAMATHKDDKERFFPSNGILIFGKQNAARDNADYSDVMLTSEEEIKTTNPVATEEYGIVADNLQQQNTAPQIGTVNSQGALPGMVWQNRDVYLQGPIWAKIPHTDGNFHPSPLMGGFGLKHPPPQILIKNTPVPADPPTTFNQSKLNSFITQYSTGQVSVEIEWELQKENSKRWNPEIQYTSNYYKSTSVDFAVNTEGVYSEPHPIGTRYLTRPL

SEQ ID NO: 1660 - protein, 737 aa, synthetic construct
  REGION 1..737: note = Description of Artificial Sequence: Synthetic polypeptide
MAADGYLPDWLEDTLSEGIRQWWKLKPGPPPPKPAERHKDDSRGLVLPGYKYLGPFNGLDKGEPVNAADAAALEHDKAYDQQLKAGDNPYLRYNHADAEFQERLQEDTSFGGNLGRAVFQAKKRVLEPLGLVEEGAKTAPGKKRPVEPSPQRSPDSSTGIGKKGQQPAKKRLNFGQTGDSESVPDPQPIGEPPAGPSGLGSGTMAAGGGAPMADNNEGADGVGSSSGNWHCDSTWLGDRVITTSTRTWALPTYNNHLYKQISSASTGASNDNHYFGYSTPWGYFDFNRFHCHFSPRDWQRLINNNWGFRPKRLNFKLFNIQVKEVTDNNGVKTIANNLTSTVQVFTDSEYQLPYVLGSAHQGCLPPFPADVFMIPQYGYLTLNNGSQAVGRSSFYCLEYFPSQMLRTGNNFTFSYTFEDVPFHSSYAHSQSLDRLMNPLIDQYLYYLSRTQTTGGTANTQTLGFSQGGPNTMANQAKNWLPGPCYRQQRVSTTTGQNNNSNFAWTAGTKYHLNGRNSLANPGIAMATHKDDKERFFPSNGILIFGKQNAARDNADYSDVMLTSEEEIKTTNPVATEEYGIVADNLQQQNTAPQIGTVNSQGALPGMVWQNRDVYLQGPIWAKILHTDGNFHPSPLMGGFGMKHPPPPILIKNTPVPADPPTTFNQSKLNSFITQYSTGQVSVEIEWELPKENSKRWNPEIQYTSNYYKSTSVDFAVNTEGVYYEPHPIGTRYLTPPL

SEQ ID NO: 1661 - protein, 737 aa, synthetic construct
  REGION 1..737: note = Description of Artificial Sequence: Synthetic polypeptide
MAADGYLPDWLEDNLSEGIREWWALKPGAPKPKANQQKQDDGRGLVLPGYKYLGPFNGLDKGEPVNAADAAALEHDKAYDQQLKAGDNPYLRYNHADAEFQERLQEDTSFGGNLGRAVFQAKKRVLEPLGLVEEGAKTAPGKKRPVEPSPQRSPDSSTGIGKKGQQPARKRLNFGQTGDSESVPDPQPLGEPPAAPSGVAPNTMAAGGGAPMADNNEGADGVGNASGNWHCDSTWLGDRVITTSTRTWALPTYNNHLYKQISSASTGASNDNHYFGYSTPWGYFDFNRFHCHFSPRDWQRLITTIGGFRPKRLNFKLFNIQVKEVTDNNGVKTIANNLTSTVQVFTDSEYQLPYVLGSAHQGCLPPFPADVFMIPQYGYLTLNNGSQAVGRSSFYCLEYFPSQMLRTGNNFTFSYTFEDVPFHSSYAHSQSLDRLMNPLIDQYLYYLSRTQTTGGTANTQTLGFSQGGPNTMANQAKNWLPGPCYRQQRVSTTTGQNNNSNFAWTAGTKYHLNGRNSLANPGIAMATHKDDKERFFPSNGILIFGKQNAARDNADYSDVMLTSEEEIKTTNPVATEEYGIVADNLQQQNTAPQIGTVNSQGALPGMVWQNRDVYLQGPIWAKIPHTDGNFHPSPLMGGFGLKHPPPQILIKNTPVPADPPTTFNQSKLNSFITQYSTGQVSVEIEWELQKENSKRWNPEIQYTSNYYKSTSVDFAVNTEGVYSEPHPIGTRYLTRPL

SEQ ID NO: 1662 - protein, 736 aa, synthetic construct
  REGION 1..736: note = Description of Artificial Sequence: Synthetic polypeptide
MAADGYLPDWLEDTLSEGIRQWWKLKPGPPPPKPAERHKDDGRGLVLPGYKYLGPFNGLDKGEPVNAADAAALEHDKAYDQQLKAGDNPYLRYNHADAEFQERLQEDTSFGGNLGRAVFQAKKRVLEPLGLVEEPVKTAPGKKRPVEQSPQEPDSSSGIGKKGQQPAKKRLNFGQTGDSESVPDPQPLGEPPATPAAVGPTTMASGGGAPMADNNEGADGVGNASGNWHCDSTWMGDRVITTSTRTWALPTYNNHLYKQISSASTGASNDNHYFGYSTPWGYFDFNRFHCHFSPRDWQRLINNNWGFRPKRLNFKLFNIQVKEVTQNEGTKTIANNLTSTIQVFTDSEYQLPYVLGSAHQGCLPPFPADVFMIPQYGYLTLNNGSQAVGRSSFYCLEYFPSQMLRTGNNFQFTYTFEDVPFHSSYAHSQSLDRLMNPLIDQYLYYLSRTQTTGGTANTQTLGFSQGGPNTMANHAKNWLPGPCYRQQRVSTTTGQNNNSNFAWTAGTKYHLNGRNSLANPGIAMATHKDDKERFFPSNGILIFGKQNAARDNADYSDVMLTSEEEIKTTNPVATEEYGIVADNLQQQNTAPQIGTVNSQGALPGMVWQNRDVYLQGPIWAKIPHTDGNFHPSPLMGGFGLKHPPPQILIKNTPVPADPPTTFNQSKLNSFITQYSTGQVSVEIEWELQKENSKRWNPEIQYTSNYYKSTSVDFAVNTEGVYSEPHPIGTRYLTRPL

SEQ ID NO: 1663 - protein, 737 aa, synthetic construct
  REGION 1..737: note = Description of Artificial Sequence: Synthetic polypeptide
MAADGYLPDWLEDNLSQGIREWWDLKPGAPKPKANQQKQDDGRGLVLPGYKYLGPFNGLDKGEPVNAADAAALEHDKAYDQQLKAGDNPYLRYNHADAEFQERLQEDTSFGGNLGRAVFQAKKRVLEPLGLVEEGAKTAPGKKRPVEPSPQRSPDSSTGIGKKGQQPARKRLNFGQTGDSESVPDPQPLGEPPAAPAAVGPTTMASGGGAPMADNNEGADGVGSSSGNWHCDSQWLGDRVITTSTRTWALPTYNNHLYKQISSASTGASNDNHYFGYSTPWGYFDFNRFHCHFSPRDWQRLINNNWGFRPKRLSFKLFNIQVKEVTQNEGTKTIANNLTSTIQVFTDSEYQLPYVLGSAHQGCLPPFPADVFMIPQYGYLTLNNGSQAVGRSSFYCLEYFPSQMLRTGNNFQFTYTFEDVPFHSSYAHSQSLDRLMNPLIDQYLYYLSRTQTTGGTTNAQTLGFSQGGPNTMANQAKNWLPGPCYRQQRVSTTTGQNNNSNFAWTAGTKYHLNGRNSLANPGIAMATHKDDKERFFPSNGILIFGKQNAARDNADYSDVMLTSEEEIKTTNPVATEEYGIVADNLQQQNTAPQIGTVNSQGALPGMVWQNRDVYLQGPIWAKIPHTDGNFHPSPLMGGFGLKHPPPQILIKNTPVPADPPTTFNQSKLNSFITQYSTGQVSVEIEWELQKENSKRWNPEIQYTSNYYKSTNVDFAVNTEGVYSEPHPIGTRYLTRPL

SEQ ID NO: 1664 - protein, 736 aa, synthetic construct
  REGION 1..736: note = Description of Artificial Sequence: Synthetic polypeptide
MAADGYLPDWLEDNLSEGIREWWDLKPGAPKPKANQQKQDDGRGLVLPGYKYLGPFNGLDKGEPVNAADAAALEHDKAYDQQLKAGDNPYLRYNHADAEFQERLQEDTSFGGNLGRAVFQAKKRVLEPFGLVEEGAKTAPGKKRPVEQSPQEPDSSSGIGKTGQQPAKKRLNFGQTGDTESVPDPQPIGEPPAAPSGVGPNTMAAGGGAPMADNNEGADGVGSSSGNWHCDSTWMGDRVITTSTRTWALPTYNNHLYKQISSASTGASNDNHYFGYSTPWGYFDFNRFHCHFSPRDWQRLINNNWGFRPKRLNFKLFNIQVKEVTQNEGTKTIANNLTSTIQVFTDSEYQLPYVLGSAHQGCLPPFPADVFMIPQYGYLTLNNGSQAVGRSSFYCLEYFPSQMLRTGNNFQFTYTFEDVPFHSSYAHSQSLDRLMNPLIDQYLYYLSRTQTTGGTANTQTLGFSQGGPNTMANQAKNWLPGPCYRQQRVSTTTGQNNNSNFAWTAGTKYHLNGRNSLANPGIAMATHKDDKERFFPSNGILIFGKQNAARDNADYSDVMLTSEEEIKTTNPVATEEYGIVADNLQQQNTAPQIGTVNSQGALPGMVWQNRDVYLQGPIWAKIPHTDGNFHPSPLMGGFGLKHPPPQILIKNTPVPADPPTTFNQSKLNSFITQYSTGQVSVEIEWELQKENSKRWNPEIQYTSNYYKSTNVDFAVNTEGVYSEPHPIGTRYFTRPL

SEQ ID NO: 1665 - protein, 736 aa, synthetic construct
  REGION 1..736: note = Description of Artificial Sequence: Synthetic polypeptide
MAADGYLPDWLEDNLSEGIREWWDLKPGAPKPKANQQKQDDGRGLVLPGYKYLGPFNGLDKGEPVNAADAAALEHDKAYDQQLKAGDNPYLRYNHADAEFQERLQEDTSFGGNLGRAVFQAKKRVLEPLGLVEEGAKTAPGKKRPVEQSPQEPDSSSGIGKTGQQPAKKRLNFGQTGDSESVPDPQPLGEPPATPAAVGPTTMASGGGAPMADNNEGADGVGNSSGNWHCDSTWMGDRVITTSTRTWALPTYNNHLYKQISSASTGASNDNHYFGYSTPWGYFDFNRFHCHFSPRDWQRLINNNWGFRPKRLNFKLFNIQVKEVTDNNGVKTIANNLTSTVQVFTDSEYQLPYVLGSAHQGCLPPFPADVFMIPQYGYLTLNNGSQAVGRSSFYCLEYFPSQMLRTGNNFQFTYTFEDVPFHSSYAHSQSLDRLMNPLIDQYLYYLSRTQTTGGTANTQTLGFSQGGPNTMANQAKNWLPGPCYRQQRVSTTTGQNNNSNFAWTAGTKYHLNGRNSLANPGIAMATHKDDKERFFPSNGILIFGKQNAARDNADYSDVMLTSEEEIKTTNPVATEEYGIVADNLQQQNTAPQIGTVNSQGALPGMVWQNRDVYLQGPIWAKIPHTDGNFHPSPLMGGFGLKHPPPQILIKNTPVPADPPTTFNQSKLNSFITQYSTGQVSVEIEWELQKENSKRWNPEIQYTSNYYKSTNVDFAVNTEGVYSEPHPIGTRYLTRPL

SEQ ID NO: 1666 - protein, 736 aa, synthetic construct
  REGION 1..736: note = Description of Artificial Sequence: Synthetic polypeptide
MAADGYLPDWLEDNLSEGIREWWDLKPGAPKPKANQQKQDDGRGLVLPGYKYLGPFNGLDKGEPVNAADAAALEHDKAYDQQLKAGDNPYLRYNHADAEFQERLQEDTSFGGNLGRAVFQAKKRVLEPLGLVEEGAKTAPGKKRPVEQSPQEPDSSSGIGKTGQQPAKKRLNFGQTGDSESVPDPQPLGEPPATPAAVGPTTMASGGGAPMADNNEGADGVGNASGNWHCDSTWLGDRVITTSTRTWALPTYNNHLYKQISSASTGASNDNHYFGYSTPWGYFDFNRFHCHFSPRDWQRLINNNWGFRPKRLNFKLFNIQVKEVTQNEGTKTIANNLTSTIQVFTDSEYQLPYVLGSAHQGCLPPFPADVFMIPQYGYLTLNNGSQAVGRSSFYCLEYFPSQMLRTGNNFEFSYQFEDVPFHSSYAHSQSLDRLMNPLIDQYLYYLSRTQTTGGTANTQTLGFSQGGPNTMANQAKNWLPGPCYRQQRVSTTTGQNNNSNFAWTAGTKYHMNGRNSLVNPGIAMATHKDDKERFFPSNGILIFGKQNVARDNADYSDVMLTSEEEIKTTNPVATEEYGIVADNLQQQNTAPQIGTVNSQGALPGMVWQNRDVYLQGPIWAKIPHTDGNFHPSPLMGGFGLKHPPPQILIKNTPVPADPPTTFNQSKLNSFITQYSTGQVSVEIEWELQKENSKRWNPEIQYTSNYYKSTSVDFAVNTEGVYSEPHPIGTRYLTRPL

SEQ ID NO: 1667 - DNA, 2217 bp, synthetic construct
  misc_feature 1..2217: note = Description of Artificial Sequence: Synthetic polynucleotide
  source 1..2217: mol_type = other DNA
atggctgccgatggttatcttccagattggctcgaggacaacctctctgagggcattcgcgagtggtgggcgctgaaacctggagccccgaagcccaaagccaaccagcaaaagcaggacgacggccggggtctggtgcttcctggctacaagtacctcggacccttcaacggactcgacaagggggagcccgtcaacgcggcggacgcagcggccctcgagcacgacaaggcctacgaccagcagctgcaggcgggtgacaatccgtacctgcggtataaccacgccgacgccgagtttcaggagcgtctgcaagaagatacgtcttttgggggcaacctcgggcgagcagtcttccaggccaagaagcgggttctcgaacctctcggtctggttgaggaaggcgctaagacggctcctggaaagaagagaccggtagagccatcaccccagcgttctccagactcctctacgggcatcggcaagaaaggccaacagcccgccagaaaaagactcaattttggtcagactggcgactcagagtcagttccagaccctcaacctctcggagaacctccagcagcgccctctggtgtgggacctaatacaatggctgcaggcggtggcgcaccaatggcagacaataacgaaggcgccgacggagtgggtagttcctcgggaaattggcattgcgattccacatggctgggcgacagagtcatcaccaccagcacccgaacctgggccctgcccacctacaacaaccacctctacaagcaaatctccaacgggacatcgggaggagccaccaacgacaacacctacttcggctacagcaccccctgggggtattttgactttaacagattccactgccacttttcaccacgtgactggcagcgactcatcaacaacaactggggattccggcccaagagactcagcttcaagctcttcaacatccaggtcaaggaggtcacgcagaatgaaggcaccaagaccatcgccaataacctcaccagcaccatccaggtgtttacggactcggagtaccagctgccgtacgttctcggctctgcccaccagggctgcctgcctccgttcccggcggacgtgttcatgattccccagtacggctacctaacactcaacaacggtagtcaggccgtgggacgctcctccttctactgcctggaatactttccttcgcagatgctgagaaccggcaacaacttccagtttacttacaccttcgaggacgtgcctttccacagcagctacgcccacagccagagcttggaccggctgatgaatcctctgattgaccagtacctgtactacttgtctcggactcaaacaacaggaggcacggcaaatacgcagactctgggcttcagccaaggtgggcctaatacaatggccaatcaggcaaagaactggctgccaggaccctgttaccgccaacaacgcgtctcaacgacaaccgggcaaaacaacaatagcaactttgcctggactgctgggaccaaataccatctgaatggaagaaattcattggctaatcctggcatcgctatggcaacacacaaagacgacgaggagcgtttttttcccagtaacgggatcctgatttttggcaaacaaaatgctgccagagacaatgcggattacagcgatgtcatgctcaccagcgaggaagaaatcaaaaccactaaccctgtggctacagaggaatacggtatcgtggcagataacttgcagcagcaaaacacggctcctcaaattggaactgtcaacagccagggggccttacccggtatggtttggcagaaccgggacgtgtacctgcagggtcccatctgggccaagattcctcacacggacggcaacttccacccgtctccgctgatgggcggctttggcctgaaacatcctccgcctcagatcctgatcaagaacacgcctgtacctgcggatcctccgaccaccttcaaccagtcaaagctgaactctttcatcacgcaatacagcaccggacaggtcagcgtggaaattgaatgggagctgcagaaggaaaacagcaagcgctggaaccccgagatccagtacacctccaactactacaaatctacaagtgtggactttgctgttaatacagaaggcgtgtactctgaaccccgccccattggcacccgttacctcacccgtaatctgtaa

SEQ ID NO: 1668 - protein, 738 aa, synthetic construct; identical to SEQ ID NO: 105
  REGION 1..738: note = Description of Artificial Sequence: Synthetic polypeptide

SEQ ID NO: 1669 - protein, 735 aa, synthetic construct
  REGION 1..735: note = Description of Artificial Sequence: Synthetic polypeptide
MAADGYLPDWLEDNLSEGVREWWALQPGAPKPKANQQHQDNARGLVLPGYKYLGPGNGLDKGEPVNAADAAALEHDKAYDQQLKAGDNPYLKYNHADAEFQQRLQGDTSFGGNLGRAVFQAKKRVLEPLGLVEQAGETAPGKKRPLIESPQQPDSSTGIGKKGKQPAKKKLVFEDETGAGDGPPEGSTSGAMSDDSEMRAAAGGAAVEGGQGADGVGNASGDWHCDSTWSEGHVTTTSTRTWVLPTYNNHLYKRLGESLQSNTYNGFSTPWGYFDFNRFHCHFSPRDWQRLINNNWGMRPKAMRVKIFNIQVKEVTTSNGETTVANNLTSTVQIFADSSYELPYVMDAGQEGSLPPFPNDVFMVPQYGYCGLVTGNTSQQQTDRNAFYCLEYFPSQMLRTGNNFEITYSFEKVPFHSMYAHSQSLDRLMNPLIDQYLWGLQSTTTGTTLNAGTATTNFTKLRPTNFSNFKKNWLPGPSIKQQGFSKTANQNYKIPATGSDSLIKYETHSTLDGRWSALTPGPPMATAGPADSKFSNSQLIFAGPKQNGNTATVPGTLIFTSEEELAATNATDTDMWGNLPGGDQSNSNLPTVDRLTALGAVPGMVWQNRDIYYQGPIWAKIPHTDGHFHPSPLIGGFGLKHPPPQIFIKNTPVPANPATTFSSTPVNSFITQYSTGQVSVQIDWEIQKERSKRWNPEVQFTSNYGQQNSLLWAPDAAGKYTEPRAIGTRYLTHHL

SEQ ID NO: 1670 - protein, 735 aa, synthetic construct
  REGION 1..735: note = Description of Artificial Sequence: Synthetic polypeptide
MAADGYLPDWLEDNLSEGVREWWALQPGAPKPKANQQHQDNARGLVLPGYKYLGPGNGLDKGEPVNAADAAALEHDKAYDQQLKAGDNPYLKYNHADAEFQQRLQGDTSFGGNLGRAVFQAKKRVLEPLGLVEQAGETAPGKKRPLIESPQQPDSSTGIGKKGKQPAKKKLVFEDETGAGDGPPEGSTSGAMSDDSEMRAAAGGAAVEGGQGADGVGNASGDWHCDSTWSEGHVTTTSTRTWVLPTYNNHLYKRLGESLQSNTYNGFSTPWGYFDFNRFHCHFSPRDWQRLINNNWGMRPKAMRVKIFNIQVKEVTTSNGETTVANNLTSTVQIFADSSYELPYVMDAGQEGSLPPFPNDVFMVPQYGYCGLVTGNTSQQQTDRNAFYCLEYFPSQMLRTGNNFEITYSFEKVPFHSMYAHSQSLDRLMNPLIDQYLWGLQSTTTGTTLNAGTATTNFTKLRPTNFSNFKKNWLPGPSIKQQGFSKTANQNYLIPATGSDSLIRYETHSTLDGRWSALTPGPPMATAGPADSKFSNSQLIFAGPKQNGNTATVPGTLIFTSEEELAATNATDTDMWGNLPFRDLSSSNLPTVDRSTPLGAVPGMVWQNRDIYYQGPIWAKIPHTDGHFHPSPLIGGFGLKHPPPQIFIKNTPVPANPATTFSSTPVNSFITQYSTGQVSVQIDWEIQKERSKRWNPEVQFTSNYGQQNSLLWAPDAAGKYTEPRAIGTRYLTHHL

SEQ ID NO: 1671 - protein, 735 aa, synthetic construct
  REGION 1..735: note = Description of Artificial Sequence: Synthetic polypeptide
MAADGYLPDWLEDNLSEGVREWWALQPGAPKPKANQQHQDNARGLVLPGYKYLGPGNGLDKGEPVNAADAAALEHDKAYDQQLKAGDNPYLKYNHADAEFQQRLQGDTSFGGNLGRAVFQAKKRVLEPLGLVEQAGETAPGKKRPLIESPQQPDSSTGIGKKGKQPAKKKLVFEDETGAGDGPPEGSTSGAMSDDSEMRAAAGGAAVEGGQGADGVGNASGDWHCDSTWSEGHVTTTSTRTWVLPTYNNHLYKRLGESLQSNTYNGFSTPWGYFDFNRFHCHFSPRDWQRLINNNWGMRPKAMRVKIFNIQVKEVTTSNGETTVANNLTSTVQIFADSSYELPYVMDAGQEGSLPPFPNDVFMVPQYGYCGLVTGNTSQQQTDRNAFYCLEYFPSQMLRTGNNFEITYSFEKVPFHSMYAHSQSLDRLMNPLIDQYLWGLQSTTTGTTLNAGTATTNFTKLRPTNFSNFKKNWLPGPSIKQQGFSKTANQNYYIPATGSDSLILYETHSTLDGRWSALTPGPPMATAGPADSKFSNSQLIFAGPKQNGNTATVPGTLIFTSEEELAATNATDTDMWGNLPGGDQSNSNLPTVDRLTALGAVPGMVWQNRDIYYQGPIWAKIPHTDGHFHPSPLIGGFGLKHPPPQIFIKNTPVPANPATTFSSTPVNSFITQYSTGQVSVQIDWEIQKERSKRWNPEVQFTSNYGQQNSLLWAPDAAGKYTEPRAIGTRYLTHHL

SEQ ID NO: 1672 - protein, 735 aa, synthetic construct
  REGION 1..735: note = Description of Artificial Sequence: Synthetic polypeptide
MAADGYLPDWLEDNLSEGVREWWALQPGAPKPKANQQHQDNARGLVLPGYKYLGPGNGLDKGEPVNAADAAALEHDKAYDQQLKAGDNPYLKYNHADAEFQQRLQGDTSFGGNLGRAVFQAKKRVLEPLGLVEQAGETAPGKKRPLIESPQQPDSSTGIGKKGKQPAKKKLVFEDETGAGDGPPEGSTSGAMSDDSEMRAAAGGAAVEGGQGADGVGNASGDWHCDSTWSEGHVTTTSTRTWVLPTYNNHLYKRLGESLQSNTYNGFSTPWGYFDFNRFHCHFSPRDWQRLINNNWGMRPKAMRVKIFNIQVKEVTTSNGETTVANNLTSTVQIFADSSYELPYVMDAGQEGSLPPFPNDVFMVPQYGYCGLVTGNTSQQQTDRNAFYCLEYFPSQMLRTGNNFEITYSFEKVPFHSMYAHSQSLDRLMNPLIDQYLWGLQSTTTGTTLNAGTATTNFTKLRPTNFSNFKKNWLPGPSIKQQGFSKTANQNYGIPATGSDSLIKYETHSTLDGRWSALTPGPPIATAGPADSKFSNSQLIFAGPKQNGNTATVPGTLIFTSEEELAATNATDTDMWGNLPLYDASSSNLPTVDRLTLLGAVPGMVWQNRDIYYQGPIWAKIPHTDGHFHPSPLIGGFGLKHPPPQIFIKNTPVPANPATTFSSTPVNSFITQYSTGQVSVQIDWEIQKERSKRWNPEVQFTSNYGQQNSLLWAPDAAGKYTEPRAIGTRYLTHHL

SEQ ID NO: 1673 - protein, 735 aa, synthetic construct
  REGION 1..735: note = Description of Artificial Sequence: Synthetic polypeptide
MAADGYLPDWLEDNLSEGVREWWALQPGAPKPKANQQHQDNARGLVLPGYKYLGPGNGLDKGEPVNAADAAALEHDKAYDQQLKAGDNPYLKYNHADAEFQQRLQGDTSFGGNLGRAVFQAKKRVLEPLGLVEQAGETAPGKKRPLIESPQQPDSSTGIGKKGKQPAKKKLVFEDETGAGDGPPEGSTSGAMSDDSEMRAAAGGAAVEGGQGADGVGNASGDWHCDSTWSEGHVTTTSTRTWVLPTYNNHLYKRLGESLQSNTYNGFSTPWGYFDFNRFHCHFSPRDWQRLINNNWGMRPKAMRVKIFNIQVKEVTTSNGETTVANNLTSTVQIFADSSYELPYVMDAGQEGSLPPFPNDVFMVPQYGYCGLVTGNTSQQQTDRNAFYCLEYFPSQMLRTGNNFEITYSFEKVPFHSMYAHSQSLDRLMNPLIDQYLWGLQSTTTGTTLNAGTATTNFTKLRPTNFSNFKKNWLPGPSIKQQGFSKTANQNYTIPATGSDSLITYETHSTLDGRWSALTPGPPGATAGPADSKFSNSQLIFAGPKQNGNTATVPGTLIFTSEEELAATNATDTDMWGNLPRVDTSASNLPTVDRYTNLGAVPGMVWQNRDIYYQGPIWAKIPHTDGHFHPSPLIGGFGLKHPPPQIFIKNTPVPANPATTFSSTPVNSFITQYSTGQVSVQIDWEIQKERSKRWNPEVQFTSNYGQQNSLLWAPDAAGKYTEPRAIGTRYLTHHL

SEQ ID NO: 1674 - protein, 735 aa, synthetic construct
  REGION 1..735: note = Description of Artificial Sequence: Synthetic polypeptide
MAADGYLPDWLEDNLSEGVREWWALQPGAPKPKANQQHQDNARGLVLPGYKYLGPGNGLDKGEPVNAADAAALEHDKAYDQQLKAGDNPYLKYNHADAEFQQRLQGDTSFGGNLGRAVFQAKKRVLEPLGLVEQAGETAPGKKRPLIESPQQPDSSTGIGKKGKQPAKKKLVFEDETGAGDGPPEGSTSGAMSDDSEMRAAAGGAAVEGGQGADGVGNASGDWHCDSTWSEGHVTTTSTRTWVLPTYNNHLYKRLGESLQSNTYNGFSTPWGYFDFNRFHCHFSPRDWQRLINNNWGMRPKAMRVKIFNIQVKEVTTSNGETTVANNLTSTVQIFADSSYELPYVMDAGQEGSLPPFPNDVFMVPQYGYCGLVTGNTSQQQTDRNAFYCLEYFPSQMLRTGNNFEITYSFEKVPFHSMYAHSQSLDRLMNPLIDQYLWGLQSTTTGTTLNAGTATTNFTKLRPTNFSNFKKNWLPGPSIKQQGFSKTANQNYSIPATGSDSLIKYETHSTLDGRWSALTPGPPFATAGPADSKFSNSQLIFAGPKQNGNTATVPGTLIFTSEEELAATNATDTDMWGNLPDYDSSLSNLPTVDRDTTLGAVPGMVWQNRDIYYQGPIWAKIPHTDGHFHPSPLIGGFGLKHPPPQIFIKNTPVPANPATTFSSTPVNSFITQYSTGQVSVQIDWEIQKERSKRWNPEVQFTSNYGQQNSLLWAPDAAGKYTEPRAIGTRYLTHHL

SEQ ID NO: 1675 - protein, 735 aa, synthetic construct
  REGION 1..735: note = Description of Artificial Sequence: Synthetic polypeptide
MAADGYLPDWLEDNLSEGVREWWALQPGAPKPKANQQHQDNARGLVLPGYKYLGPGNGLDKGEPVNAADAAALEHDKAYDQQLKAGDNPYLKYNHADAEFQQRLQGDTSFGGNLGRAVFQAKKRVLEPLGLVEQAGETAPGKKRPLIESPQQPDSSTGIGKKGKQPAKKKLVFEDETGAGDGPPEGSTSGAMSDDSEMRAAAGGAAVEGGQGADGVGNASGDWHCDSTWSEGHVTTTSTRTWVLPTYNNHLYKRLGESLQSNTYNGFSTPWGYFDFNRFHCHFSPRDWQRLINNNWGMRPKAMRVKIFNIQVKEVTTSNGETTVANNLTSTVQIFADSSYELPYVMDAGQEGSLPPFPNDVFMVPQYGYCGLVTGNTSQQQTDRNAFYCLEYFPSQMLRTGNNFEITYSFEKVPFHSMYAHSQSLDRLMNPLIDQYLWGLQSTTTGTTLNAGTATTNFTKLRPTNFSNFKKNWLPGPSIKQQGFSKTANQNYSIPATGSDSLIWYETHSTLDGRWSALTPGPPCATAGPADSKFSNSQLIFAGPKQNGNTATVPGTLIFTSEEELAATNATDTDMWGNLPQGDSSLSNLPTVDRMTVLGAVPGMVWQNRDIYYQGPIWAKIPHTDGHFHPSPLIGGFGLKHPPPQIFIKNTPVPANPATTFSSTPVNSFITQYSTGQVSVQIDWEIQKERSKRWNPEVQFTSNYGQQNSLLWAPDAAGKYTEPRAIGTRYLTHHL

SEQ ID NO: 1676 - protein, 735 aa, synthetic construct
  REGION 1..735: note = Description of Artificial Sequence: Synthetic polypeptide
MAADGYLPDWLEDNLSEGVREWWALQPGAPKPKANQQHQDNARGLVLPGYKYLGPGNGLDKGEPVNAADAAALEHDKAYDQQLKAGDNPYLKYNHADAEFQQRLQGDTSFGGNLGRAVFQAKKRVLEPLGLVEQAGETAPGKKRPLIESPQQPDSSTGIGKKGKQPAKKKLVFEDETGAGDGPPEGSTSGAMSDDSEMRAAAGGAAVEGGQGADGVGNASGDWHCDSTWSEGHVTTTSTRTWVLPTYNNHLYKRLGESLQSNTYNGFSTPWGYFDFNRFHCHFSPRDWQRLINNNWGMRPKAMRVKIFNIQVKEVTTSNGETTVANNLTSTVQIFADSSYELPYVMDAGQEGSLPPFPNDVFMVPQYGYCGLVTGNTSQQQTDRNAFYCLEYFPSQMLRTGNNFEITYSFEKVPFHSMYAHSQSLDRLMNPLIDQYLWGLQSTTTGTTLNAGTATTNFTKLRPTNFSNFKKNWLPGPSIKQQGFSKTANQNYCIPATGSDSLIRYETHSTLDGRWSALTPGPPLATAGPADSKFSNSQLIFAGPKQNGNTATVPGTLIFTSEEELAATNATDTDMWGNLPYKDSSRSNLPTVDRETSLGAVPGMVWQNRDIYYQGPIWAKIPHTDGHFHPSPLIGGFGLKHPPPQIFIKNTPVPANPATTFSSTPVNSFITQYSTGQVSVQIDWEIQKERSKRWNPEVQFTSNYGQQNSLLWAPDAAGKYTEPRAIGTRYLTHHL

SEQ ID NO: 1677 - protein, 735 aa, synthetic construct
  REGION 1..735: note = Description of Artificial Sequence: Synthetic polypeptide
MAADGYLPDWLEDNLSEGVREWWALQPGAPKPKANQQHQDNARGLVLPGYKYLGPGNGLDKGEPVNAADAAALEHDKAYDQQLKAGDNPYLKYNHADAEFQQRLQGDTSFGGNLGRAVFQAKKRVLEPLGLVEQAGETAPGKKRPLIESPQQPDSSTGIGKKGKQPAKKKLVFEDETGAGDGPPEGSTSGAMSDDSEMRAAAGGAAVEGGQGADGVGNASGDWHCDSTWSEGHVTTTSTRTWVLPTYNNHLYKRLGESLQSNTYNGFSTPWGYFDFNRFHCHFSPRDWQRLINNNWGMRPKAMRVKIFNIQVKEVTTSNGETTVANNLTSTVQIFADSSYELPYVMDAGQEGSLPPFPNDVFMVPQYGYCGLVTGNTSQQQTDRNAFYCLEYFPSQMLRTGNNFEITYSFEKVPFHSMYAHSQSLDRLMNPLIDQYLWGLQSTTTGTTLNAGTATTNFTKLRPTNFSNFKKNWLPGPSIKQQGFSKTANQNYIIPATGSDSLIYYETHSTLDGRWSALTPGPPRATAGPADSKFSNSQLIFAGPKQNGNTATVPGTLIFTSEEELAATNATDTDMWGNLPWIDNSRSNLPTVDRPTSLGAVPGMVWQNKNIYYQGPIWAKIPHTDGHFHPSPLIGGFGLKHPPPQIFIKNTPVPANPATTFTSTPVNSFITQYSTGQVSVQIDWEIQKERSKRWNPEVQFTSNYGQQNSLLWAPDAAGKYTEPRAIGTRYLTHHL

SEQ ID NO: 1678 - protein, 735 aa, synthetic construct
  REGION 1..735: note = Description of Artificial Sequence: Synthetic polypeptide
MAADGYLPDWLEDNLSEGVREWWALQPGAPKPKANQQHQDNARGLVLPGYKYLGPGNGLDKGEPVNAADAAALEHDKAYDQQLKAGDNPYLKYNHADAEFQQRLQGDTSFGGNLGRAVFQAKKRVLEPLGLVEQAGETAPGKKRPLIESPQQPDSSTGIGKKGKQPAKKKLVFEDETGAGDGPPEGSTSGAMSDDSEMRAAAGGAAVEGGQGADGVGNASGDWHCDSTWSEGHVTTTSTRTWVLPTYNNHLYKRLGESLQSNTYNGFSTPWGYFDFNRFHCHFSPRDWQRLINNNWGMRPKAMRVKIFNIQVKEVTTSNGETTVANNLTSTVQIFADSSYELPYVMDAGQEGSLPPFPNDVFMVPQYGYCGLVTGNTSQQQTDRNAFYCLEYFPSQMLRTGNNFEITYSFEKVPFHSMYAHSQSLDRLMNPLIDQYLWGLQSTTTGTTLNAGTATTNFTKLRPTNFSNFKKNWLPGPSIKQQGFSKTANQNYGIPATGSDSLIIYETHSTLDGRWSALTPGPPRATAGPADSKFSNSQLIFAGPKQNGNTATVPGTLIFTSEEELAATNATDTDMWGNLPGGDQSNSNLPTVDRLTALGAVPGMVWQNRDIYYQGPIWAKIPHTDGHFHPSPLIGGFGLKHPPPQIFIKNTPVPANPATTFSSTPVNSFITQYSTGQVSVQIDWEIQKERSKRWNPEVQFTSNYGQQNSLLWAPDAAGKYTEPRAIGTRYLTHHL

SEQ ID NO: 1679 - protein, 735 aa, synthetic construct
  REGION 1..735: note = Description of Artificial Sequence: Synthetic polypeptide
MAADGYLPDWLEDNLSEGVREWWALQPGAPKPKANQQHQDNARGLVLPGYKYLGPGNGLDKGEPVNAADAAALEHDKAYDQQLKAGDNPYLKYNHADAEFQQRLQGDTSFGGNLGRAVFQAKKRVLEPLGLVEQAGETAPGKKRPLIESPQQPDSSTGIGKKGKQPAKKKLVFEDETGAGDGPPEGSTSGAMSDDSEMRAAAGGAAVEGGQGADGVGNASGDWHCDSTWSEGHVTTTSTRTWVLPTYNNHLYKRLGESLQSNTYNGFSTPWGYFDFNRFHCHFSPRDWQRLINNNWGMRPKAMRVKIFNIQVKEVTTSNGETTVANNLTSTVQIFADSSYELPYVMDAGQEGSLPPFPNDVFMVPQYGYCGLVTGNTSQQQTDRNAFYCLEYFPSQMLRTGNNFEITYSFEKVPFHSMYAHSQSLDRLMNPLIDQYLWGLQSTTTGTTLNAGTATTNFTKLRPTNFSNFKKNWLPGPSIKQQGFSKTANQNYVIPATESDSLIYYETHSTLDGRWSALTPGPPYATAGPADSKFSNSQLIFAGPKQNGNTATVPGTLIFTSEEELAATNATDTDMWGNLPPRDDSTSNLPTVDRKTYLGAVPGMVWQNRDIYYQGPIWAKIPHTDGHFHPSPLIGGFGLKHPPPQIFIKNTPVPANPATTFSSTPVNSFITQYSTGQVSVQIDWEIQKERSKRWNPEVQFTSNYGQQNSLLWAPDAAGKYTEPRAIGTRYLTHHL

SEQ ID NO: 1680 - protein, 735 aa, synthetic construct
  REGION 1..735: note = Description of Artificial Sequence: Synthetic polypeptide
MAADGYLPDWLEDNLSEGVREWWALQPGAPKPKANQQHQDNARGLVLPGYKYLGPGNGLDKGEPVNAADAAALEHDKAYDQQLKAGDNPYLKYNHADAEFQQRLQGDTSFGGNLGRAVFQAKKRVLEPLGLVEQAGETAPGKKRPLIESPQQPDSSTGIGKKGKQPAKKKLVFEDETGAGDGPPEGSTSGAMSDDSEMRAAAGGAAVEGGQGADGVGNASGDWHCDSTWSEGHVTTTSTRTWVLPTYNNHLYKRLGESLQSNTYNGFSTPWGYFDFNRFHCHFSPRDWQRLINNNWGMRPKAMRVKIFNIQVKEVTTSNGETTVANNLTSTVQIFADSSYELPYVMDAGQEGSLPPFPNDVFMVPQYGYCGLVTGNTSQQQTDRNAFYCLEYFPSQMLRTGNNFEITYSFEKVPFHSMYAHSQSLDRLMNPLIDQYLWGLQSTTTGTTLNAGTATTNFTKLRPTNFSNFKKNWLPGPSIKQQGFSKTANQNYYIPATGSDSLIIYETHSTLDGRWSALTPGPPIATAGPADSKFSNSQLIFAGPKQNGNTATVPGTLIFTSEEELAATNSTDTDMWGNLPTDDDSRSNLPTVDRMTLLGAVPGMVWQNRDIYYQGPIWAKIPHTDGHFHPSPLIGGFGLKHPPPQIFIKNTPVPANPATTFSSTPVNSFITQYSTGQVSVQIDWEIQKERSKRWNPEVQFTSNYGQQNSLLWAPDAAGKYTEPRAIGTRYLTHHL

SEQ ID NO: 1681 - protein, 735 aa, synthetic construct
  REGION 1..735: note = Description of Artificial Sequence: Synthetic polypeptide
MAADGYLPDWLEDNLSEGVREWWALQPGAPKPKANQQHQDNARGLVLPGYKYLGPGNGLDKGEPVNAADAAALEHDKAYDQQLKAGDNPYLKYNHADAEFQQRLQGDTSFGGNLGRAVFQAKKRVLEPLGLVEQAGETAPGKKRPLIESPQQPDSSTGIGKKGKQPAKKKLVFEDETGAGDGPPEGSTSGAMSDDSEMRAAAGGAAVEGGQGADGVGNASGDWHCDSTWSEGHVTTTSTRTWVLPTYNNHLYKRLGESLQSNTYNGFSTPWGYFDFNRFHCHFSPRDWQRLINNNWGMRPKAMRVKIFNIQVKEVTTSNGETTVANNLTSTVQIFADSSYELPYVMDAGQEGSLPPFPNDVFMVPQYGYCGLVTGNTSQQQTDRNAFYCLEYFPSQMLRTGNNFEITYSFEKVPFHSMYAHSQSLDRLMNPLIDQYLWGLQSTTTGTTLNAGTATTNFTKLRPTNFSNFKKNWLPGPSIKQQGFSKTANQNYHIPATGSDSLIYYETHSTLDGRWSALTPGPPSATAGPADSKFSNSQLIFAGPKQNGNTATVPGTLIFTSEEELAATNATDTDMWGNLPRRDSSVSNLPTVDRYTDLGAVPGMVWQNRDIYYQGPIWAKIPHTDGHFHPSPLIGGFGLKHPPPQIFIKNTPVPANPATTFSSTPVNSFITQYSTGQVSVQIDWEIQKERSKRWNPEVQFTSNYGQQNSLLWAPDAAGKYTEPRAIGTRYLTHHL

SEQ ID NO: 1682 - protein, 735 aa, synthetic construct
  REGION 1..735: note = Description of Artificial Sequence: Synthetic polypeptide
MAADGYLPDWLEDNLSEGVREWWALQPGAPKPKANQQHQDNARGLVLPGYKYLGPGNGLDKGEPVNAADAAALEHDKAYDQQLKAGDNPYLKYNHADAEFQQRLQGDTSFGGNLGRAVFQAKKRVLEPLGLVEQAGETAPGKKRPLIESPQQPDSSTGIGKKGKQPAKKKLVFEDETGAGDGPPEGSTSGAMSDDSEMRAAAGGAAVEGGQGADGVGNASGDWHCDSTWSEGHVTTTSTRTWVLPTYNNHLYKRLGESLQSNTYNGFSTPWGYFDFNRFHCHFSPRDWQRLINNNWGMRPKAMRVKIFNIQVKEVTTSNGETTVANNLTSTVQIFADSSYELPYVMDAGQEGSLPPFPNDVFMVPQYGYCGLVTGNTSQQQTDRNAFYCLEYFPSQMLRTGNNFEITYSFEKVPFHSMYAHSQSLDRLMNPLIDQYLWGLQSTTTGTTLNAGTATTNFTKLRPTNFSNFKKNWLPGPSIKQQGFSKTANQNYSIPATGSDSLISYETHSTLDGRWSALTPGPPRATAGPADSKFSNSQLIFAGPKQNGNTATVPGTLIFTSEEELAATNATDTDMWGNLPRHDSSLSNLPTVDRNTGLGAVPGMVWQNRDIYYQGPIWAKIPHTDGHFHPSPLIGGFGLKHPPPQIFIKNTPVPANPATTFSSTPVNSFITQYSTGQVSVQIDWEIQKERSKRWNPEVQFTSNYGQQNSLLWAPDAAGKYTEPRAIGTRYLTHHL

SEQ ID NO: 1683 - protein, 735 aa, synthetic construct
  REGION 1..735: note = Description of Artificial Sequence: Synthetic polypeptide
MAADGYLPDWLEDNLSEGVREWWALQPGAPKPKANQQHQDNARGLVLPGYKYLGPGNGLDKGEPVNAADAAALEHDKAYDQQLKAGDNPYLKYNHADAEFQQRLQGDTSFGGNLGRAVFQAKKRVLEPLGLVEQAGETAPGKKRPLIESPQQPDSSTGIGKKGKQPAKKKLVFEDETGAGDGPPEGSTSGAMSDDSEMRAAAGGAAVEGGQGADGVGNASGDWHCDSTWSEGHVTTTSTRTWVLPTYNNHLYKRLGESLQSNTYNGFSTPWGYFDFNRFHCHFSPRDWQRLINNNWGMRPKAMRVKIFNIQVKEVTTSNGETTVANNLTSTVQIFADSSYELPYVMDAGQEGSLPPFPNDVFMVPQYGYCGLVTGNTSQQQTDRNAFYCLEYFPSQMLRTGNNFEITYSFEKVPFHSMYAHSQSLDRLMNPLIDQYLWGLQSTTTGTTLNAGTATTNFTKLRPTNFSNFKKNWLPGPSIKQQGFSKTANQNYFIPATGSDSLIRYETHSTLDGRWSALTPGPPLATAGPADSKFSNSQLIFAGPKQNGNTATVPGTLIFTSEEELAATNATDTDMWGNLPVIDFSKSNLPTVDRLTHLGAVPGMVWQNRDIYYQGPIWAKIPHTDGHFHPSPLIGGFGLKHPPPQIFIKNTPVPANPATTFSSTPVNSFITQYSTGQVSVQIDWEIQKERSKRWNPEVQFTSNYGQQNSLLWAPDAAGKYTEPRAIGTRYLTHHL

SEQ ID NO: 1684 - protein, 735 aa, synthetic construct
  REGION 1..735: note = Description of Artificial Sequence: Synthetic polypeptide
MAADGYLPDWLEDNLSEGVREWWALQPGAPKPKANQQHQDNARGLVLPGYKYLGPGNGLDKGEPVNAADAAALEHDKAYDQQLKAGDNPYLKYNHADAEFQQRLQGDTSFGGNLGRAVFQAKKRVLEPLGLVEQAGETAPGKKRPLIESPQQPDSSTGIGKKGKQPAKKKLVFEDETGAGDGPPEGSTSGAMSDDSEMRAAAGGAAVEGGQGADGVGNASGDWHCDSTWSEGHVTTTSTRTWVLPTYNNHLYKRLGESLQSNTYNGFSTPWGYFDFNRFHCHFSPRDWQRLINNNWGMRPKAMRVKIFNIQVKEVTTSNGETTVANNLTSTVQIFADSSYELPYVMDAGQEGSLPPFPNDVFMVPQYGYCGLVTGNTSQQQTDRNAFYCLEYFPSQMLRTGNNFEITYSFEKVPFHSMYAHSQSLDRLMNPLIDQYLWGLQSTTTGTTLNAGTATTNFTKLRPTNFSNFKKNWLPGPSIKQQGFSKTANQNYKIPATGSDSLIKYETHSTLDGRWSALTPGPPMATAGPADSKFSNSQLIFAGPKQNGNTATVPGTLIFTSEEELAATNATDTDMWGNLPVRDFSLSNLPTVDRTTKLGAVPGMVWQNRDIYYQGPIWAKIPHTDGHFHPSPLIGGFGLKHPPPQIFIKNTPVPANPATTFSSTPVNSFITQYSTGQVSVQIDWEIQKERSKRWNPEVQFTSNYGQQNSLLWAPDAAGKYTEPRAIGTRYLTHHL

SEQ ID NO: 1685 - protein, 735 aa, synthetic construct
  REGION 1..735: note = Description of Artificial Sequence: Synthetic polypeptide
MAADGYLPDWLEDNLSEGVREWWALQPGAPKPKANQQHQDNARGLVLPGYKYLGPGNGLDKGEPVNAADAAALEHDKAYDQQLKAGDNPYLKYNHADAEFQQRLQGDTSFGGNLGRAVFQAKKRVLEPLGLVEQAGETAPGKKRPLIESPQQPDSSTGIGKKGKQPAKKKLVFEDETGAGDGPPEGSTSGAMSDDSEMRAAAGGAAVEGGQGADGVGNASGDWHCDSTWSEGHVTTTSTRTWVLPTYNNHLYKRLGESLQSNTYNGFSTPWGYFDFNRFHCHFSPRDWQRLINNNWGMRPKAMRVKIFNIQVKEVTTSNGETTVANNLTSTVQIFADSSYELPYVMDAGQEGSLPPFPNDVFMVPQYGYCGLVTGNTSQQQTDRNAFYCLEYFPSQMLRTGNNFEITYSFEKVPFHSMYAHSQSLDRLMNPLIDQYLWGLQSTTTGTTLNAGTATTNFTKLRPTNFSNFKKNWLPGPSIKQQGFSKTANQNYFIPATGSDSLIQYETHSTLDGRWSALTPGPPMATAGPADSKFSNSQLIFAGPKQNGNTATVPGTLIFTSEEELAATNATDTDMWGNLPGGDQSNSNLPTVDRLTALGAVPGMVWQNRDIYYQGPIWAKIPHTDGHFHPSPLIGGFGLKHPPPQIFIKNTPVPANPATTFSSTPVNSFITQYSTGQVSVQIDWEIQKERSKRWNPEVQFTSNYGQQNSLLWAPDAAGKYTEPRAIGTRYLTHHL

SEQ ID NO: 1686 - protein, 735 aa, synthetic construct
  REGION 1..735: note = Description of Artificial Sequence: Synthetic polypeptide
MAADGYLPDWLEDNLSEGVREWWALQPGAPKPKANQQHQDNARGLVLPGYKYLGPGNGLDKGEPVNAADAAALEHDKAYDQQLKAGDNPYLKYNHADAEFQQRLQGDTSFGGNLGRAVFQAKKRVLEPLGLVEQAGETAPGKKRPLIESPQQPDSSTGIGKKGKQPAKKKLVFEDETGAGDGPPEGSTSGAMSDDSEMRAAAGGAAVEGGQGADGVGNASGDWHCDSTWSEGHVTTTSTRTWVLPTYNNHLYKRLGESLQSNTYNGFSTPWGYFDFNRFHCHFSPRDWQRLINNNWGMRPKAMRVKIFNIQVKEVTTSNGETTVANNLTSTVQIFADSSYELPYVMDAGQEGSLPPFPNDVFMVPQYGYCGLVTGNTSQQQTDRNAFYCLEYFPSQMLRTGNNFEITYSFEKVPFHSMYAHSQSLDRLMNPLIDQYLWGLQSTTTGTTLNAGTATTNFTKLRPTNFSNFKKNWLPGPSIKQQGFSKTANQNYEMPATGSDSLIIYETHSTLDGRWSALTPGPPFATAGPADSKFSNSQLIFAGPKQNGNTATVPGTLIFTSEEELAATNATDTDVWGNLPSGDHSQSNLPTVDRPTMLGAVPGMVWQNRDIYYQGPIWAKIPHTDGHFHPSPLIGGFGLKHPPPQIFIKNTPVPANPATTFISTPVNSFITQYSTGQVSVHIDWEIQKERSKRWNPEVQFTSDYGQHSSLLWAPDAAGKYTEPTAIGTRYLTHHL

SEQ ID NO: 1687 - protein, 734 aa, synthetic construct
  REGION 1..734: note = Description of Artificial Sequence: Synthetic polypeptide
MAADGYLPDWLEDNLSEGVREWWALQPGAPKPKANQQHQDNARGLVLPGYKYLGPGNGLDKGEPVNAADAAALEHDKAYDQQLKAGDNPYLKYNHADAEFQQRLQGDTSFGGNLGRAVFQAKKRVLEPLGLVEQAGETAPGKKRPLIESPQQPDSSTGIGKKGKQPAKKKLVFEDETGAGDGPPEGSTSGAMSDDSEMRAAAGGAAVEGGQGADGVGNASGDWHCDSTWSEGHVTTTSTRTWVLPTYNNHLYKRLGESLQSNTYNGFSTPWGYFDFNRFHCHFSPRDWQRLINNNWGMRPKAMRVKIFNIQVKEVTTSNGETTVANNLTSTVQIFADSSYELPYVMDAGQEGSLPPFPNDVFMVPQYGYCGLVTGNTSQQQTDRNAFYCLEYFPSQMLRTGNNFEITYSFEKVPFHSMYAHSQSLDRLMNPLIDQYLWGLQSTTTGTTLNAGTATTNFTKLRPTNFSNFKKNWLPGPSIKQQGFSKTANQNDIPATGSDSLIKYETHSTLDGRWSALTPGPPMATAGPADSKFSNSQLIFAGPKQNGNTATVPGTLIFTSEEELAATNATDTDMWGNLPGGDQSNSNLPTVDRLTALGAVPGMVWQNRDIYYQGPIWAKIPHTDGHFHPSPLIGGFGLKHPPPQIFIKNTPVPANPATTFSSTPVNSFITQYSTGQVSVQIDWEIQKERSKRWNPEVQFTSNYGQQNSLLWAPDAAGKYTEPRAIGTRYLTHHL

SEQ ID NO: 1688 - protein, 735 aa, synthetic construct
  REGION 1..735: note = Description of Artificial Sequence: Synthetic polypeptide
MAADGYLPDWLEDNLSEGVREWWALQPGAPKPKANQQHQDNARGLVLPGYKYLGPGNGLDKGEPVNAADAAALEHDKAYDQQLKAGDNPYLKYNHADAEFQQRLQGDTSFGGNLGRAVFQAKKRVLEPLGLVEQAGETAPGKKRPLIESPQQPDSSTGIGKKGKQPAKKKLVFEDETGAGDGPPEGSTSGAMSDDSEMRAAAGGAAVEGGQGADGVGNASGDWHCDSTWSEGHVTTTSTRTWVLPTYNNHLYKRLGESLQSNTYNGFSTPWGYFDFNRFHCHFSPRDWQRLINNNWGMRPKAMRVKIFNIQVKEVTTSNGETTVANNLTSTVQIFADSSYELPYVMDAGQEGSLPPFPNDVFMVPQYGYCGLVTGNTSQQQTDRNAFYCLEYFPSQMLRTGNNFEITYSFEKVPFHSMYAHSQSLDRLMNPLIDQYLWGLQSTTTGTTLNAGTATTNFTKLRPTNFSNFKKNWLPGPSIKQQGFSKTANQNYIIPATGSDSLITYETHSTLDGRWSALTPGPPVATAGPADSKFSNSQLIFAGPKQNGNTATVPGTLIFTSEEELAATNATDTDMWGNLPFNDDSSSNLPTVDRSTFLGAVPGMVWQNRDIYYQGPIWAKIPHTDGHFHPSPLIGGFGLKHPPPQIFIKNTPVPANPATTFSSTPVNSFITQYSTGQVSVQIDWEIQKERSKRWNPEVQFTSNYGQQNSLLWAPDAAGKYTEPRAIGTRYLTHHL

SEQ ID NO: 1689 - protein, 733 aa, synthetic construct
  REGION 1..733: note = Description of Artificial Sequence: Synthetic polypeptide
MAADGYLPDWLEDNLSEGIREWWDLKPGAPKPKANQQKQDDGRGLVLPGYKYLGPFNGLDKGEPVNAADAAALEHDKAYDQQLKAGDNPYLRYNHADAEFQERLQEDTSFGGNLGRAVFQAKKRVLEPLGLVEEGAKTAPGKKRPLESPQEPDSSSGIGKKGKQPARKRLNFEEDTGAGDGPPEGSDTSAMSSDIEMRAAPGGNAVDAGQGSDGVGNASGDWHCDSTWSEGKVTTTSTRTWVLPTYNNHLYLRLGTTSSSNTYNGFSTPWGYFDFNRFHCHFSPRDWQRLINNNWGLRPKAMRVKIFNIQVKEVTTSNGETTVANNLTSTVQIFADSSYELPYVMDAGQEGSLPPFPNDVFMVPQYGYCGIVTGENQNQTDRNAFYCLEYFPSQMLRTGNNFEMAYNFEKVPFHSMYAHSQSLDRLMNPLLDQYLWHLQSTTSGETLNQGNAATTFGKIRSGDFAFYRKNWLPGPCVKQQRFSKTASQNYKIPASGGNALLKYDTHYTLNNRWSNIAPGPPMATAGPSDGDFSNAQLIFPGPSVTGNTTTSANNLLFTSEEEIAATNPRDTDMFGQIADNNQNATTAPITGNVTAMGVLPGMVWQNRDIYYQGPIWAKIPHADGHFHPSPLIGGFGLKHPPPQIFIKNTPVPANPATTFTAARVDSFITQYSTGQVAVQIEWEIEKERSKRWNPEVQFTSNYGNQSSMLWAPDTTGKYTEPRVIGSRYLTNHL

SEQ ID NO: 1690 - protein, 742 aa, synthetic construct; identical to SEQ ID NO: 1501
  REGION 1..742: note = Description of Artificial Sequence: Synthetic polypeptide

SEQ ID NO: 1691 - protein, 733 aa, synthetic construct; identical to SEQ ID NO: 421
  REGION 1..733: note = Description of Artificial Sequence: Synthetic polypeptide

SEQ ID NO: 1692 - protein, 733 aa, synthetic construct; identical to SEQ ID NO: 138
  REGION 1..733: note = Description of Artificial Sequence: Synthetic polypeptide

SEQ ID NO: 1693 - protein, 733 aa, synthetic construct; identical to SEQ ID NO: 425
  REGION 1..733: note = Description of Artificial Sequence: Synthetic polypeptide

SEQ ID NO: 1694 - protein, 735 aa, synthetic construct
  REGION 1..735: note = Description of Artificial Sequence: Synthetic polypeptide
MAADGYLPDWLEDNLSEGVREWWALQPGAPKPKANQQHQDNARGLVLPGYKYLGPGNGLDKGEPVNAADAAALEHDKAYDQQLKAGDNPYLKYNHADAEFQQRLQGDTSFGGNLGRAVFQAKKRVLEPLGLVEQAGETAPGKKRPLIESPQQPDSSTGIGKKGKQPAKKKLVFEDETGAGDGPPEGSTSGAMSDDSEMRAAAGGAAVEGGQGADGVGNASGDWHCDSTWSEGHVTTTSTRTWVLPTYNNHLYKRLGESLQSNTYNGFSTPWGYFDFNRFHCHFSPRDWQRLINNNWGMRPKAMRVKIFNIQVKEVTTSNGETTVANNLTSTVQIFADSSYELPYVMDAGQEGSLPPFPNDVFMVPQYGYCGLVTGNTSQQQTDRNAFYCLEYFPSQMLRTGNNFEITYSFEKVPFHSMYAHSQSLDRLMNPLIDQYLWGLQSTTTGTTLNAGTATTNFTKLRPTNFSNFKKNWLPGPSIKQQGFSKTANQNYEIPATGSDSLIEYETHSTLDGRWSALTPGPPMATAGPADSKFSNSQLIFAGPKQNGNTATVPGTLIFTSEEELAATNATDTDMWGNLPGGDQSSSNLPTVDRLTALGAVPGMVWQNRDIYYQGPIWAKIPHTDGHFHPSPLIGGFGLKHPPPQIFIKNTPVPANPATTFSSTPVNSFITQYSTGQVSVQIDWEIQKERSKRWNPEVQFTSNYGQQNSLLWAPDAAGKYTEPRAIGTRYLTHHL

SEQ ID NO: 1695 - protein, 735 aa, synthetic construct
  REGION 1..735: note = Description of Artificial Sequence: Synthetic polypeptide
MAADGYLPDWLEDNLSEGVREWWALQPGAPKPKANQQHQDNARGLVLPGYKYLGPGNGLDKGEPVNAADAAALEHDKAYDQQLKAGDNPYLKYNHADAEFQQRLQGDTSFGGNLGRAVFQAKKRVLEPLGLVEQAGETAPGKKRPLIESPQQPDSSTGIGKKGKQPAKKKLVFEDETGAGDGPPEGSTSGAMSDDSEMRAAAGGAAVEGGQGADGVGNASGDWHCDSTWSEGHVTTTSTRTWVLPTYNNHLYKRLGESLQSNTYNGFSTPWGYFDFNRFHCHFSPRDWQRLINNNWGMRPKAMRVKIFNIQVKEVTTSNGETTVANNLTSTVQIFADSSYELPYVMDAGQEGSLPPFPNDVFMVPQYGYCGLVTGNTSQQQTDRNAFYCLEYFPSQMLRTGNNFEITYSFEKVPFHSMYAHSQSLDRLMNPLIDQYLWGLQSTTTGTTLNAGTATTNFTKLRPTNFSNFKKNWLPGPSIKQQGFSKTANQNYEIPATGSDSLIEYETHSTLDGRWSALTPGPPMATAGPADSKFSNSQLIFAGPKQNGNTATVPGTLIFTSEEELAATNATDTDMWGNLPGGDQSSSNLPVVRGLRALGAVPGMVWQNRDIYYQGPIWAKIPHTDGHFHPSPLIGGFGLKHPPPQIFIKNTPVPANPATTFSSTPVNSFITQYSTGQVSVQIDWEIQKERSKRWNPEVQFTSNYGQQNSLLWAPDAAGKYTEPRAIGTRYLTHHL

SEQ ID NO: 1696 - protein, 735 aa, synthetic construct
  REGION 1..735: note = Description of Artificial Sequence: Synthetic polypeptide
MAADGYLPDWLEDNLSEGVREWWALQPGAPKPKANQQHQDNARGLVLPGYKYLGPGNGLDKGEPVNAADAAALEHDKAYDQQLKAGDNPYLKYNHADAEFQQRLQGDTSFGGNLGRAVFQAKKRVLEPLGLVEQAGETAPGKKRPLIESPQQPDSSTGIGKKGKQPAKKKLVFEDETGAGDGPPEGSTSGAMSDDSEMRAAAGGAAVEGGQGADGVGNASGDWHCDSTWSEGHVTTTSTRTWVLPTYNNHLYKRLGESLQSNTYNGFSTPWGYFDFNRFHCHFSPRDWQRLINNNWGMRPKAMRVKIFNIQVKEVTTSNGETTVANNLTSTVQIFADSSYELPYVMDAGQEGSLPPFPNDVFMVPQYGYCGLVTGNTSQQQTDRNAFYCLEYFPSQMLRTGNNFEITYSFEKVPFHSMYAHSQSLDRLMNPLIDQYLWGLQSTTTGTTLNAGTATTNFTKLRPTNFSNFKKNWLPGPSIKQQGFSKTANQNYEIPATGSDSLIEYETHSTLDGRWSALTPGPPMATAGPADSKFSNSQLIFAGPKQNGNTATVPGTLIFTSEEELAATNATDTDMWGNLPGGDQSSSNLPVVNRLSALGAVPGMVWQNRDIYYQGPIWAKIPHTDGHFHPSPLIGGFGLKHPPPQIFIKNTPVPANPATTFSSTPVNSFITQYSTGQVSVQIDWEIQKERSKRWNPEVQFTSNYGQQNSLLWAPDAAGKYTEPRAIGTRYLTHHL

SEQ ID NO: 1697 - protein, 735 aa, synthetic construct
  REGION 1..735: note = Description of Artificial Sequence: Synthetic polypeptide
MAADGYLPDWLEDNLSEGVREWWALQPGAPKPKANQQHQDNARGLVLPGYKYLGPGNGLDKGEPVNAADAAALEHDKAYDQQLKAGDNPYLKYNHADAEFQQRLQGDTSFGGNLGRAVFQAKKRVLEPLGLVEQAGETAPGKKRPLIESPQQPDSSTGIGKKGKQPAKKKLVFEDETGAGDGPPEGSTSGAMSDDSEMRAAAGGAAVEGGQGADGVGNASGDWHCDSTWSEGHVTTTSTRTWVLPTYNNHLYKRLGESLQSNTYNGFSTPWGYFDFNRFHCHFSPRDWQRLINNNWGMRPKAMRVKIFNIQVKEVTTSNGETTVANNLTSTVQIFADSSYELPYVMDAGQEGSLPPFPNDVFMVPQYGYCGLVTGNTSQQQTDRNAFYCLEYFPSQMLRTGNNFEITYSFEKVPFHSMYAHSQSLDRLMNPLIDQYLWGLQSTTTGTTLNAGTATTNFTKLRPTNFSNFKKNWLPGPSIKQQGFSKTANQNYEIPATGSDSLIEYETHSTLDGRWSALTPGPPMATAGPADSKFSNSQLIFAGPKQNGNTATVPGTLIFTSEEELAATNATDTDMWGNLPGGDQSSSNLPPVMGLGALGAVPGMVWQNRDIYYQGPIWAKIPHTDGHFHPSPLIGGFGLKHPPPQIFIKNTPVPANPATTFSSTPVNSFITQYSTGQVSVQIDWEIQKERSKRWNPEVQFTSNYGQQNSLLWAPDAAGKYTEPRAIGTRYLTHHL

SEQ ID NO: 1698 - protein, 736 aa, synthetic construct
  REGION 1..736: note = Description of Artificial Sequence: Synthetic polypeptide
MAADGYLPDWLEDNLSEGVREWWALQPGAPKPKANQQHQDNARGLVLPGYKYLGPGNGLDKGEPVNAADAAALEHDKAYDQQLKAGDNPYLKYNHADAEFQQRLQGDTSFGGNLGRAVFQAKKRVLEPLGLVEQAGETAPGKKRPLIESPQQPDSSTGIGKKGKQPAKKKLVFEDETGAGDGPPEGSTSGAMSDDSEMRAAAGGAAVEGGQGADGVGNASGDWHCDSTWSEGHVTTTSTRTWVLPTYNNHLYKRLGESLQSNTYNGFSTPWGYFDFNRFHCHFSPRDWQRLINNNWGMRPKAMRVKIFNIQVKEVTTSNGETTVANNLTSTVQIFADSSYELPYVMDAGQEGSLPPFPNDVFMVPQYGYCGLVTGNTSQQQTDRNAFYCLEYFPSQMLRTGNNFEITYSFEKVPFHSMYAHSQSLDRLMNPLIDQYLWGLQSTTTGTTLNAGTATTNFTKLRPTNFSNFKKNWLPGPSIKQQGFSKTANQNYEIPATGSDSLIEYETHSTLDGRWSALTPGPPMATAGPADSKFSNSQLIFAGPKQNGNTATVPGTLIFTSEEELAATNATDTDMWGNLPGGDQSRVDRLPTVDRLTALGAVPGMVWQNRDIYYQGPIWAKIPHTDGHFHPSPLIGGFGLKHPPPQIFIKNTPVPANPATTFSSTPVNSFITQYSTGQVSVQIDWEIQKERSKRWNPEVQFTSNYGQQNSLLWAPDAAGKYTEPRAIGTRYLTHHL

SEQ ID NO: 1699 - protein, 736 aa, synthetic construct
  REGION 1..736: note = Description of Artificial Sequence: Synthetic polypeptide
MAADGYLPDWLEDNLSEGVREWWALQPGAPKPKANQQHQDNARGLVLPGYKYLGPGNGLDKGEPVNAADAAALEHDKAYDQQLKAGDNPYLKYNHADAEFQQRLQGDTSFGGNLGRAVFQAKKRVLEPLGLVEQAGETAPGKKRPLIESPQQPDSSTGIGKKGKQPAKKKLVFEDETGAGDGPPEGSTSGAMSDDSEMRAAAGGAAVEGGQGADGVGNASGDWHCDSTWSEGHVTTTSTRTWVLPTYNNHLYKRLGESLQSNTYNGFSTPWGYFDFNRFHCHFSPRDWQRLINNNWGMRPKAMRVKIFNIQVKEVTTSNGETTVANNLTSTVQIFADSSYELPYVMDAGQEGSLPPFPNDVFMVPQYGYCGLVTGNTSQQQTDRNAFYCLEYFPSQMLRTGNNFEITYSFEKVPFHSMYAHSQSLDRLMNPLIDQYLWGLQSTTTGTTLNAGTATTNFTKLRPTNFSNFKKNWLPGPSIKQQGFSKTANQNYEIPATGSDSLIEYETHSTLDGRWSALTPGPPMATAGPADSKFSNSQLIFAGPKQNGNTATVPGTLIFTSEEELAATNATDTDMWGNLPGGDQSRALRLPTVDRLTALGAVPGMVWQNRDIYYQGPIWAKIPHTDGHFHPSPLIGGFGLKHPPPQIFIKNTPVPANPATTFSSTPVNSFITQYSTGQVSVQIDWEIQKERSKRWNPEVQFTSNYGQQNSLLWAPDAAGKYTEPRAIGTRYLTHHL

SEQ ID NO: 1700 - DNA, 1172 bp, synthetic construct
  misc_feature 1..1172: note = Description of Artificial Sequence: Synthetic polynucleotide
  source 1..1172: mol_type = other DNA
cttaattaggctgcgcgctcgctcgctcactgaggccgcccgggcaaagcccgggcgtcgggcgacctttggtcgcccggcctcagtgagcgagcgagcgcgcagagagggagtggccaactccatcactaggggttccttgtagttaatgattaacccgccatgctacttatctaccagggtaatggggatcctctagaactatagctagtcgacattgattattgactagttattaatagtaatcaattacggggtcattagttcatagcccatatatggagttccgcgttacataacttacggtaaatggcccgcctggctgaccgcccaacgacccccgcccattgacgtcaataatgacgtatgttcccatagtaacgccaatagggactttccattgacgtcaatgggtggactatttacggtaaactgcccacttggcagtacatcaagtgtatcatatgccaagtacgccccctattgacgtcaatgacggtaaatggcccgcctggcattatgcccagtacatgaccttatgggactttcctacttggcagtacatctacgtattagtcatcgctattaccatgtcgaggccacgttctgcttcactctccccatctcccccccctccccacccccaattttgtatttatttattttttaattattttgtgcagcgatgggggcggggggggggggcgcgcgccaggcggggcggggcggggcgaggggcggggcggggcgaggcggagaggtgcggcggcagccaatcagagcggcgcgctccgaaagtttccttttatggcgaggcggcggcggcggcggccctataaaaagcgaagcgcgcggcgggcgggagcaagctttattgcggtagtttatcacagttaaattgctaacgcagtcagtgcttctgacacaacagtctcgaacttaagctgcagaagttggtcgtgaggcactgggcaggtaagtatcaaggttacaagacaggtttaaggagaccaatagaaactgggcttgtcgagacagagaagactcttgcgtttctgataggcacctattggtcttactgacatccactttgcctttctctccacaggtgtccactcccagttcaattacagctcttaaggctagagtacttaatacgactcsactatagg

SEQ ID NO: 1701 - DNA, 3231 bp, synthetic construct
  misc_feature 1..3231: note = Description of Artificial Sequence: Synthetic polynucleotide
  source 1..3231: mol_type = other DNA
taagaattcacgcgtggtacctctagagtcgacccgggcggcctcgaggacggggtgaactacgcctgaggatccgatctttttccctctgccaaaaattatggggacatcatgaagccccttgagcatctgacttctggctaataaaggaaatttattttcattgcaatagtgtgttggaattttttgtgtctctcactcggaagcaattcgttgatctgaatttcgaccacccataatacccattaccctggtagataagtagcatggcgggttaatcattaactacaaggaacccctagtgatggagttggccactccctctctgcgcgctcgctcgctcactgaggccgggcgaccaaaggtcgcccgacgcccgggctttgcccgggcggcctcagtgagcgagcgagcgcgcagccttaattaacctaattcactggccgtcgttttacaacgtcgtgactgggaaaaccctggcgttacccaacttaatcgccttgcagcacatccccctttcgccagctggcgtaatagcgaagaggcccgcaccgatcgcccttcccaacagttgcgcagcctgaatggcgaatgggacgcgccctgtagcggcgcattaagcgcggcgggtgtggtggttacgcgcagcgtgaccgctacacttgccagcgccctagcgcccgctcctttcgctttcttcccttcctttctcgccacgttcgccggctttccccgtcaagctctaaatcgggggctccctttagggttccgatttagtgctttacggcacctcgaccccaaaaaacttgattagggtgatggttcacgtagtgggccatcgccctgatagacggtttttcgccctttgacgttggagtccacgttctttaatagtggactcttgttccaaactggaacaacactcaaccctatctcggtctattcttttgatttataagggattttgccgatttcggcctattggttaaaaaatgagctgatttaacaaaaatttaacgcgaattttaacaaaatattaacgcttacaatttaggtggcacttttcggggaaatgtgcgcggaacccctatttgtttatttttctaaatacattcaaatatgtatccgctcatgagacaataaccctgataaatgcttcaataatattgaaaaaggaagagtatgagtattcaacatttccgtgtcgcccttattcccttttttgcggcattttgccttcctgtttttgctcacccagaaacgctggtgaaagtaaaagatgctgaagatcagttgggtgcacgagtgggttacatcgaactggatctcaacagcggtaagatccttgagagttttcgccccgaagaacgttttccaatgatgagcacttttaaagttctgctatgtggcgcggtattatcccgtattgacgccgggcaagagcaactcggtcgccgcatacactattctcagaatgacttggttgagtactcaccagtcacagaaaagcatcttacggatggcatgacagtaagagaattatgcagtgctgccataaccatgagtgataacactgcggccaacttacttctgacaacgatcggaggaccgaaggagctaaccgcttttttgcacaacatgggggatcatgtaactcgccttgatcgttgggaaccggagctgaatgaagccataccaaacgacgagcgtgacaccacgatgcctgtagcaatggcaacaacgttgcgcaaactattaactggcgaactacttactctagcttcccggcaacaattaatagactggatggaggcggataaagttgcaggaccacttctgcgctcggcccttccggctggctggtttattgctgataaatctggagccggtgagcgtgggtctcgcggtatcattgcagcactggggccagatggtaagccctcccgtatcgtagttatctacacgacggggagtcaggcaactatggatgaacgaaatagacagatcgctgagataggtgcctcactgattaagcattggtaactgtcagaccaagtttactcatatatactttagattgatttaaaacttcatttttaatttaaaaggatctaggtgaagatcctttttgataatctcatgaccaaaatcccttaacgtgagttttcgttccactgagcgtcagaccccgtagaaaagatcaaaggatcttcttgagatcctttttttctgcgcgtaatctgctgcttgcaaacaaaaaaaccaccgctaccagcggtggtttgtttgccggatcaagagctaccaactctttttccgaaggtaactggcttcagcagagcgcagataccaaatactgttcttctagtgtagccgtagttaggccaccacttcaagaactctgtagcaccgcctacatacctcgctctgctaatcctgttaccagtggctgctgccagtggcgataagtcgtgtcttaccgggttggactcaagacgatagttaccggataaggcgcagcggtcgggctgaacggggggttcgtgcacacagcccagcttggagcgaacgacctacaccgaactgagatacctacagcgtgagctatgagaaagcgccacgcttcccgaagggagaaaggcggacaggtatccggtaagcggcagggtcggaacaggagagcgcacgagggagcttccagggggaaacgcctggtatctttatagtcctgtcgggtttcgccacctctgacttgagcgtcgatttttgtgatgctcgtcaggggggcggagcctatggaaaaacgccagcaacgcggcctttttacggttcctggccttttgctggccttttgctcacatgttctttcctgcgttatcccctgattctgtggataaccgtattaccgcctttgagtgagctgataccgctcgccgcagccgaacgaccgagcgcagcgagtcagtgagcgaggaagcggaagagcgcccaatacgcaaaccgcctctccccgcgcgttggccgattcattaatgcagctggcacgacaggtttcccgactggaaagcgggcagtgagcgcaacgcaattaatgtgagttagctcactcattaggcaccccaggctttacactttatgcttccggctcgtatgttgtgtggaattgtgagcggataacaatttcacacaggaaacagctatgaccatgattacgccagatttaattaaggc

SEQ ID NO: 1702 - protein, 737 aa, synthetic construct
  REGION 1..737: note = Description of Artificial Sequence: Synthetic polypeptide
  VARIANT 264: note = Xaa can be any naturally occurring amino acid
  VARIANT 266: note = Xaa can be any naturally occurring amino acid
  VARIANT 268: note = Xaa can be any naturally occurring amino acid
  VARIANT 448: note = Xaa can be any naturally occurring amino acid
  VARIANT 459..460: note = Xaa can be any naturally occurring amino acid
  VARIANT 467: note = Xaa can be any naturally occurring amino acid
  VARIANT 470..471: note = Xaa can be any naturally occurring amino acid
  VARIANT 474: note = Xaa can be any naturally occurring amino acid
  VARIANT 495: note = Xaa can be any naturally occurring amino acid
  VARIANT 516: note = Xaa can be any naturally occurring amino acid
  VARIANT 533: note = Xaa can be any naturally occurring amino acid
  VARIANT 547: note = Xaa can be any naturally occurring amino acid
  VARIANT 551: note = Xaa can be any naturally occurring amino acid
  VARIANT 555: note = Xaa can be any naturally occurring amino acid
  VARIANT 557: note = Xaa can be any naturally occurring amino acid
  VARIANT 561: note = Xaa can be any naturally occurring amino acid
  VARIANT 563: note = Xaa can be any naturally occurring amino acid
  VARIANT 577: note = Xaa can be any naturally occurring amino acid
  VARIANT 583: note = Xaa can be any naturally occurring amino acid
  VARIANT 593: note = Xaa can be any naturally occurring amino acid
  VARIANT 596: note = Xaa can be any naturally occurring amino acid
  VARIANT 661..662: note = Xaa can be any naturally occurring amino acid
  VARIANT 664..665: note = Xaa can be any naturally occurring amino acid
  VARIANT 710: note = Xaa can be any naturally occurring amino acid
  VARIANT 717..719: note = Xaa can be any naturally occurring amino acid
  VARIANT 723: note = Xaa can be any naturally occurring amino acid
MAADGYLPDWLEDNLSEGIREWWDLKPGAPKPKANQQKQDDGRGLVLPGYKYLGPFNGLDKGEPVNAADAAALEHDKAYDQQLKAGDNPYLRYNHADAEFQERLQEDTSFGGNLGRAVFQAKKRVLEPLGLVEEGAKTAPGKKRPVEPSPQRSPDSSTGIGKKGQQPAKKRLNFGQTGDSESVPDPQPLGEPPAGPSGLGSGTMAAGGGAPMADNNEGADGVGNASGNWHCDSTWLGDRVITTSTRTWALPTYNNHLYKQISSXSXGXTNDNHYFGYSTPWGYFDFNRFHCHFSPRDWQRLINNNWGFRPKRLNFKLFNIQVKEVTTNDGVTTIANNLTSTVQVFSDSEYQLPYVLGSAHQGCLPPFPADVFMIPQYGYLTLNNGSQAVGRSSFYCLEYFPSQMLRTGNNFTFSYTFEDVPFHSSYAHSQSLDRLMNPLIDQYLYYLXRTQSTGGTAGXXELLFSQXGPXXMSXQAKNWLPGPCYRQQRVSKTLXQNNNSNFAWTGATKYHLNGRXSLVNPGVAMATHKDDEXRFFPSSGVLIFGKXGAGXNNTXLXNVMXTXEEEIKTTNPVATEXYGVVAXNLQSSNTAPXTGXVNSQGALPGMVWQNRDVYLQGPIWAKIPHTDGNFHPSPLMGGFGLKHPPPQILIKNTPVPANPPXXFXXAKFASFITQYSTGQVSVEIEWELQKENSKRWNPEIQYTSNYAKSXNVDFAVXXXGVYXEPRPIGTRYLTRNL

SEQ ID NO: 1703 - protein, 737 aa, synthetic construct
  REGION 1..737: note = Description of Artificial Sequence: Synthetic polypeptide
MAADGYLPDWLEDNLSEGIREWWDLKPGAPKPKANQQKQDDGRGLVLPGYKYLGPFNGLDKGEPVNAADAAALEHDKAYDQQLKAGDNPYLRYNHADAEFQERLQEDTSFGGNLGRAVFQAKKRVLEPLGLVEEGAKTAPGKKRPVEPSPQRSPDSSTGIGKKGQQPAKKRLNFGQTGDSESVPDPQPLGEPPAGPSGLGSGTMAAGGGAPMADNNEGADGVGNASGNWHCDSTWLGDRVITTSTRTWALPTYNNHLYKQISSASSGSTNDNHYFGYSTPWGYFDFNRFHCHFSPRDWQRLINNNWGFRPKRLNFKLFNIQVKEVTTNDGVTTIANNLTSTVQVFSDSEYQLPYVLGSAHQGCLPPFPADVFMIPQYGYLTLNNGSQAVGRSSFYCLEYFPSQMLRTGNNFTFSYTFEDVPFHSSYAHSQSLDRLMNPLIDQYLYYLARTQSTGGTAGNRELLFSQGGPSNMSAQAKNWLPGPCYRQQRVSKTLAQNNNSNFAWTGATKYHLNGRDSLVNPGVAMATHKDDEDRFFPSSGVLIFGKEGAGANNTALENVMLTNEEEIKTTNPVATEQYGVVASNLQSSNTAPATGAVNSQGALPGMVWQNRDVYLQGPIWAKIPHTDGNFHPSPLMGGFGLKHPPPQILIKNTPVPANPPATFTPAKFASFITQYSTGQVSVEIEWELQKENSKRWNPEIQYTSNYAKSTNVDFAVNNEGVYSEPRPIGTRYLTRNL

SEQ ID NO: 1704 - protein, 737 aa, synthetic construct
  REGION 1..737: note = Description of Artificial Sequence: Synthetic polypeptide
MAADGYLPDWLEDNLSEGIREWWDLKPGAPKPKANQQKQDDGRGLVLPGYKYLGPFNGLDKGEPVNAADAAALEHDKAYDQQLKAGDNPYLRYNHADAEFQERLQEDTSFGGNLGRAVFQAKKRVLEPLGLVEEGAKTAPGKKRPVEPSPQRSPDSSTGIGKKGQQPAKKRLNFGQTGDSESVPDPQPLGEPPAGPSGLGSGTMAAGGGAPMADNNEGADGVGNASGNWHCDSTWLGDRVITTSTRTWALPTYNNHLYKQISSQSSGSTNDNHYFGYSTPWGYFDFNRFHCHFSPRDWQRLINNNWGFRPKRLNFKLFNIQVKEVTTNDGVTTIANNLTSTVQVFSDSEYQLPYVLGSAHQGCLPPFPADVFMIPQYGYLTLNNGSQAVGRSSFYCLEYFPSQMLRTGNNFTFSYTFEDVPFHSSYAHSQSLDRLMNPLIDQYLYYLSRTQSTGGTAGNRELLFSQGGPANMSAQAKNWLPGPCYRQQRVSKTLSQNNNSNFAWTGATKYHLNGRDSLVNPGVAMATHKDDEERFFPSSGVLIFGKQGAGANNTTLDNVMMTSEEEIKTTNPVATEQYGVVASNLQSSNTAPQTGTVNSQGALPGMVWQNRDVYLQGPIWAKIPHTDGNFHPSPLMGGFGLKHPPPQILIKNTPVPANPPAVFSPAKFASFITQYSTGQVSVEIEWELQKENSKRWNPEIQYTSNYAKSTNVDFAVNSEGVYSEPRPIGTRYLTRNL

SEQ ID NO: 1705 - protein, 737 aa, synthetic construct
  REGION 1..737: note = Description of Artificial Sequence: Synthetic polypeptide
MAADGYLPDWLEDNLSEGIREWWDLKPGAPKPKANQQKQDDGRGLVLPGYKYLGPFNGLDKGEPVNAADAAALEHDKAYDQQLKAGDNPYLRYNHADAEFQERLQEDTSFGGNLGRAVFQAKKRVLEPLGLVEEGAKTAPGKKRPVEPSPQRSPDSSTGIGKKGQQPAKKRLNFGQTGDSESVPDPQPLGEPPAGPSGLGSGTMAAGGGAPMADNNEGADGVGNASGNWHCDSTWLGDRVITTSTRTWALPTYNNHLYKQISSASSGSTNDNHYFGYSTPWGYFDFNRFHCHFSPRDWQRLINNNWGFRPKRLNFKLFNIQVKEVTTNDGVTTIANNLTSTVQVFSDSEYQLPYVLGSAHQGCLPPFPADVFMIPQYGYLTLNNGSQAVGRSSFYCLEYFPSQMLRTGNNFTFSYTFEDVPFHSSYAHSQSLDRLMNPLIDQYLYYLARTQSTGGTAGTRELLFSQGGPSNMSAQAKNWLPGPCYRQQRVSKTLTQNNNSNFAWTGATKYHLNGRDSLVNPGVAMATHKDDEDRFFPSSGVLIFGKQGAGANNTALDNVMITNEEEIKTTNPVATEQYGVVASNLQSSNTAPATGTVNSQGALPGMVWQNRDVYLQGPIWAKIPHTDGNFHPSPLMGGFGLKHPPPQILIKNTPVPANPPTVFSPAKFASFITQYSTGQVSVEIEWELQKENSKRWNPEIQYTSNYAKSTNVDFAVNSEGVYTEPRPIGTRYLTRNL

SEQ ID NO: 1706 - protein, 737 aa, synthetic construct
  REGION 1..737: note = Description of Artificial Sequence: Synthetic polypeptide
  VARIANT 264: note = Xaa can be any naturally occurring amino acid
  VARIANT 448: note = Xaa can be any naturally occurring amino acid
  VARIANT 459: note = Xaa can be any naturally occurring amino acid
  VARIANT 470: note = Xaa can be any naturally occurring amino acid
  VARIANT 495: note = Xaa can be any naturally occurring amino acid
  VARIANT 533: note = Xaa can be any naturally occurring amino acid
  VARIANT 547: note = Xaa can be any naturally occurring amino acid
  VARIANT 555: note = Xaa can be any naturally occurring amino acid
  VARIANT 557: note = Xaa can be any naturally occurring amino acid
  VARIANT 561: note = Xaa can be any naturally occurring amino acid
  VARIANT 563: note = Xaa can be any naturally occurring amino acid
  VARIANT 593: note = Xaa can be any naturally occurring amino acid
  VARIANT 596: note = Xaa can be any naturally occurring amino acid
  VARIANT 661..662: note = Xaa can be any naturally occurring amino acid
  VARIANT 664: note = Xaa can be any naturally occurring amino acid
  VARIANT 718: note = Xaa can be any naturally occurring amino acid
  VARIANT 723: note = Xaa can be any naturally occurring amino acid
MAADGYLPDWLEDNLSEGIREWWDLKPGAPKPKANQQKQDDGRGLVLPGYKYLGPFNGLDKGEPVNAADAAALEHDKAYDQQLKAGDNPYLRYNHADAEFQERLQEDTSFGGNLGRAVFQAKKRVLEPLGLVEEGAKTAPGKKRPVEPSPQRSPDSSTGIGKKGQQPAKKRLNFGQTGDSESVPDPQPLGEPPAGPSGLGSGTMAAGGGAPMADNNEGADGVGNASGNWHCDSTWLGDRVITTSTRTWALPTYNNHLYKQISSXSSGSTNDNHYFGYSTPWGYFDFNRFHCHFSPRDWQRLINNNWGFRPKRLNFKLFNIQVKEVTTNDGVTTIANNLTSTVQVFSDSEYQLPYVLGSAHQGCLPPFPADVFMIPQYGYLTLNNGSQAVGRSSFYCLEYFPSQMLRTGNNFTFSYTFEDVPFHSSYAHSQSLDRLMNPLIDQYLYYLXRTQSTGGTAGXRELLFSQGGPXNMSAQAKNWLPGPCYRQQRVSKTLXQNNNSNFAWTGATKYHLNGRDSLVNPGVAMATHKDDEXRFFPSSGVLIFGKXGAGANNTXLXNVMXTXEEEIKTTNPVATEQYGVVASNLQSSNTAPXTGXVNSQGALPGMVWQNRDVYLQGPIWAKIPHTDGNFHPSPLMGGFGLKHPPPQILIKNTPVPANPPXXFXPAKFASFITQYSTGQVSVEIEWELQKENSKRWNPEIQYTSNYAKSTNVDFAVNXEGVYXEPRPIGTRYLTRNL

SEQ ID NO: 1707 - protein, 737 aa, synthetic construct
  REGION 1..737: note = Description of Artificial Sequence: Synthetic polypeptide
  VARIANT 264: note = Xaa can be any naturally occurring amino acid
  VARIANT 448: note = Xaa can be any naturally occurring amino acid
  VARIANT 470: note = Xaa can be any naturally occurring amino acid
  VARIANT 533: note = Xaa can be any naturally occurring amino acid
  VARIANT 547: note = Xaa can be any naturally occurring amino acid
  VARIANT 555: note = Xaa can be any naturally occurring amino acid
  VARIANT 557: note = Xaa can be any naturally occurring amino acid
  VARIANT 561: note = Xaa can be any naturally occurring amino acid
  VARIANT 563: note = Xaa can be any naturally occurring amino acid
  VARIANT 593: note = Xaa can be any naturally occurring amino acid
  VARIANT 596: note = Xaa can be any naturally occurring amino acid
  VARIANT 662: note = Xaa can be any naturally occurring amino acid
  VARIANT 664: note = Xaa can be any naturally occurring amino acid
  VARIANT 718: note = Xaa can be any naturally occurring amino acid
MAADGYLPDWLEDNLSEGIREWWDLKPGAPKPKANQQKQDDGRGLVLPGYKYLGPFNGLDKGEPVNAADAAALEHDKAYDQQLKAGDNPYLRYNHADAEFQERLQEDTSFGGNLGRAVFQAKKRVLEPLGLVEEGAKTAPGKKRPVEPSPQRSPDSSTGIGKKGQQPAKKRLNFGQTGDSESVPDPQPLGEPPAGPSGLGSGTMAAGGGAPMADNNEGADGVGNASGNWHCDSTWLGDRVITTSTRTWALPTYNNHLYKQISSXSSGSTNDNHYFGYSTPWGYFDFNRFHCHFSPRDWQRLINNNWGFRPKRLNFKLFNIQVKEVTTNDGVTTIANNLTSTVQVFSDSEYQLPYVLGSAHQGCLPPFPADVFMIPQYGYLTLNNGSQAVGRSSFYCLEYFPSQMLRTGNNFTFSYTFEDVPFHSSYAHSQSLDRLMNPLIDQYLYYLXRTQSTGGTAGNRELLFSQGGPXNMSAQAKNWLPGPCYRQQRVSKTLSQNNNSNFAWTGATKYHLNGRDSLVNPGVAMATHKDDEXRFFPSSGVLIFGKXGAGANNTXLXNVMXTXEEEIKTTNPVATEQYGVVASNLQSSNTAPXTGXVNSQGALPGMVWQNRDVYLQGPIWAKIPHTDGNFHPSPLMGGFGLKHPPPQILIKNTPVPANPPAXFXPAKFASFITQYSTGQVSVEIEWELQKENSKRWNPEIQYTSNYAKSTNVDFAVNXEGVYSEPRPIGTRYLTRNL

SEQ ID NO: 1708 - DNA, 2217 bp, synthetic construct
  misc_feature 1..2217: note = Description of Artificial Sequence: Synthetic polynucleotide
  source 1..2217: mol_type = other DNA
atggctgccgatggttatcttccagattggctcgaggacactctctctgaaggaataagacagtggtggaagctcaaacctggcccaccaccaccaaagcccgcagagcggcataaggacgacagcaggggtcttgtgcttcctgggtacaagtacctcggacccttcaacggactcgacaagggagagccggtcaacgaggcagacgccgcggccctcgagcacgacaaagcctacgaccggcagctcgacagcggagacaacccgtacctcaagtacaaccacgccgacgcggagtttcaggagcgccttaaagaagatacgtcttttgggggcaacctcggacgagcagtcttccaggcgaaaaagagggttcttgaacctctgggcctggttgaggaacctgttaagacggctccgggaaagaagagaccggtagagccatcaccccagcgttctccagactcctctacgggcatcggcaagaaaggccaacagcccgccagaaaaagactcaattttggtcagactggcgactcagagtcagttccagaccctcaacctctcggagaacctccagcagcgccctctggtgtgggacctaatacaatggctgcaggcggtggcgcaccaatggcagacaataacgaaggcgccgacggagtgggtagttcctcgggaaattggcattgcgattccacatggctgggcgacagagtcatcaccaccagcacccgaacctgggccctgcccacctacaacaaccacctctacaagcaaatctccaacgggacatcgggaggagccaccaacgacaacacctacttcggctacagcaccccctgggggtattttgactttaacagattccactgccacttttcaccacgtgactggcagcgactcatcaacaacaactggggattccggcccaagagactcagcttcaagctcttcaacatccaggtcaaggaggtcacgcagaatgaaggcaccaagaccatcgccaataacctcaccagcaccatccaggtgtttacggactcggagtaccagctgccgtacgttctcggctctgcccaccagggctgcctgcctccgttcccggcggacgtgttcatgattccccagtacggctacctaacactcaacaacggtagtcaggccgtgggacgctcctccttctactgcctggaatactttccttcgcagatgctgagaaccggcaacaacttccagtttacttacaccttcgaggacgtgcctttccacagcagctacgcccacagccagagcttggaccggctgatgaatcctctgattgaccagtacctgtactacttgtctcggactcaaacaacaggaggcacggcaaatacgcagactctgggcttcagccaaggtgggcctaatacaatggccaatcaggcaaagaactggctgccaggaccctgttaccgccaacaacgcgtctcaacgacaaccgggcaaaacaacaatagcaactttgcctggactgctgggaccaaataccatctgaatggaagaaattcattggctaatcctggcatcgctatggcaacacacaaagacgacgaggagcgtttttttcccagtaacgggatcctgatttttggcaaacaaaatgctgccagagacaatgcggattacagcgatgtcatgctcaccagcgaggaagaaatcaaaaccactaaccctgtggctacagaggaatacggtatcgtggcagataacttgcagcagcaaaacacggctcctcaaattggaactgtcaacagccagggggccttacccggtatggtctggcagaaccgggacgtgtacctgcagggtcccatctgggccaagattcctcacacggacggcaacttccacccgtctccgctgatgggcggctttggcctgaaacatcctccgcctcagatcctgatcaagaacacgcctgtacctgcggatcctccgaccaccttcaaccagtcaaagctgaactctttcatcacgcaatacagcaccggacaggtcagcgtggaaattgaatgggagctgcagaaggaaaacagcaagcgctggaaccccgagatccagtacacctccaactactacaaatctacaagtgtggactttgctgttaatacagaaggcgtgtactctgaaccccgccccattggcacccgttacctcacccgtaatctgtaa

SEQ ID NO: 1709 - protein, 733 aa, synthetic construct; identical to SEQ ID NO: 1494
  REGION 1..733: note = Description of Artificial Sequence: Synthetic polypeptide

SEQ ID NO: 1710 - DNA, 2203 bp, synthetic construct
  misc_feature 1..2203: note = Description of Artificial Sequence: Synthetic polynucleotide
  source 1..2203: mol_type = other DNA
atgtcttttgttgatcaccctccagattggttggaagaagttggtgaaggtcttcgcgagtttttgggccttgaagcgggcccaccgaaaccaaaacccaatcagcagcatcaagatcaagcccgtggtcttgtgctgcctggttataactatctcggacccggaaacggtctcgatcgaggagagcctgtcaacagggcagacgaggtcgcgcgagagcacgacatctcgtacaacgagcagcttgaggcgggagacaacccctacctcaagtacaaccacgcggacgccgagtttcaggagaagctcgccgacgacacatccttcgggggaaacctcggaaaggcagtctttcaggccaagaaaagggttctcgaaccttttggcctggttgaagagggtgctaagacggcccctaccggaaagcggatagacgaccactttccaaaaagaaagaaggctcggaccgaagaggactccaagccttccacctcgtcagacgccgaagctggacccagcggatcccagcagctgcaaatcccagcccaaccagcctcaagtttgggagctgatacaatgtctgcgggaggtggcggcccattgggcgacaataaccaaggtgccgatggagtgggcaatgcctcgggagattggcattgcgattccacgtggatgggggacagagtcgtcaccaagtccacccgaacctgggtgctgcccagctacaacaaccaccagtaccgagagatcaaaagcggctccgtcgacggaagcaacgccaacgcctactttggatacagcaccccctgggggtactttgactttaaccgcttccacagccactggagcccccgagactggcaaagactcatcaacaactactggggcttcagaccccggtccctcagagtcaaaatcttcaacattcaagtcaaagaggtcacggtgcaggactccaccaccaccatcgccaacaacctcacctccaccgtccaagtgtttacggacgacgactaccagctgccctacgtcgtcggcaacgggaccgagggatgcctgccggccttccctccgcaggtctttacgctgccgcagtacggttacgcgacgctgaaccgcgacaacacagaaaatcccaccgagaggagcagcttcttctgcctagagtactttcccagcaagatgctgagaacgggcaacaactttgagtttacctacaactttgaggaggtgcccttccactccagcttcgctcccagtcagaacctgttcaagctggccaacccgctggtggaccagtacttgtaccgcttcgtgagcacaaataacactggcggagtccagttcaacaagaacctggccgggagatacgccaacacctacaaaaactggttcccggggcccatgggccgaacccagggctggaacctgggctccggggtcaaccgcgccagtgtcagcgccttcgccacgaccaataggatggagctcgagggcgcgagttaccaggtgcccccgcagccgaacggcatgaccaacaacctccagggcagcaacacctatgccctggagaacactatgatcttcaacagccagccggcgaacccgggcaccaccgccacgtacctcgagggcaacatgctcatcaccagcgagagcgagacgcagccggtgaaccgcgtggcgtacaacgtcggcgggcaggtggccaccaacaaccagagctccaccactgcccccgcgaccggcacgtacaacctccaggaaatcgtgcccggcagcgtgtggatggagagggacgtgtacctccaaggacccatctgggccaagatcccagagacgggggcgcactttcacccctctccggccatgggcggattcggactcaaacacccaccgcccatgatgctcatcaagaacacgcctgtgcccggaaatatcaccagcttctcggacgtgcccgtcagcagcttcatcacccagtacagcaccgggcaggtcaccgtggagatggagtgggagctcaagaaggaaaactccaagaggtggaacccagagatccagtacacaaacaactacaacgacccccagtttgtggactttgccccggacagcaccggggaatacagaaccaccagacctatcggaacccgataccttacccgacccctttaacccattcatgtcgcataccctcaataaa

SEQ ID NO: 1711 - protein, 724 aa, synthetic construct
  REGION 1..724: note = Description of Artificial Sequence: Synthetic polypeptide
MSFVDHPPDWLEEVGEGLREFLGLEAGPPKPKPNQQHQDQARGLVLPGYNYLGPGNGLDRGEPVNRADEVAREHDISYNEQLEAGDNPYLKYNHADAEFQEKLADDTSFGGNLGKAVFQAKKRVLEPFGLVEEGAKTAPTGKRIDDHFPKRKKARTEEDSKPSTSSDAEAGPSGSQQLQIPAQPASSLGADTMSAGGGGPLGDNNQGADGVGNASGDWHCDSTWMGDRVVTKSTRTWVLPSYNNHQYREIKSGSVDGSNANAYFGYSTPWGYFDFNRFHSHWSPRDWQRLINNYWGFRPRSLRVKIFNIQVKEVTVQDSTTTIANNLTSTVQVFTDDDYQLPYVVGNGTEGCLPAFPPQVFTLPQYGYATLNRDNTENPTERSSFFCLEYFPSKMLRTGNNFEFTYNFEEVPFHSSFAPSQNLFKLANPLVDQYLYRFVSTNNTGGVQFNKNLAGRYANTYKNWFPGPMGRTQGWNLGSGVNRASVSAFATTNRMELEGASYQVPPQPNGMTNNLQGSNTYALENTMIFNSQPANPGTTATYLEGNMLITSESETQPVNRVAYNVGGQVATNNQSSTTAPATGTYNLQEIVPGSVWMERDVYLQGPIWAKIPETGAHFHPSPAMGGFGLKHPPPMMLIKNTPVPGNITSFSDVPVSSFITQYSTGQVTVEMEWELKKENSKRWNPEIQYTNNYNDPQFVDFAPDSTGEYRTTRPIGTRYLTRPL

SEQ ID NO: 1712 - DNA, 2203 bp, synthetic construct
  misc_feature 1..2203: note = Description of Artificial Sequence: Synthetic polynucleotide
  source 1..2203: mol_type = other DNA
atgtcttttgttgatcaccctccagattggttggaagaagttggtgaaggtcttcgcgagtttttgggccttgaagcgggcccaccgaaaccaaaacccaatcagcagcatcaagatcaagcccgtggtcttgtgctgcctggttataactatctcggacccggaaacggtctcgatcgaggagagcctgtcaacagggcagacgaggtcgcgcgagagcacgacatctcgtacaacgagcagcttgaggcgggagacaacccctacctcaagtacaaccacgcggacgccgagtttcaggagaagctcgccgacgacacatccttcgggggaaacctcggaaaggcagtctttcaggccaagaaaagggttctcgaaccttttggcctggttgaagagggtgctaagacggcccctaccggaaagcggatagacgaccactttccaaaaagaaagaaggctcggaccgaagaggactccaagccttccacctcgtcagacgccgaagctggacccagcggatcccagcagctgcaaatcccagcccaaccagcctcaagtttgggagctgatacaatgtctgcgggaggtggcggcccattgggcgacaataaccaaggtgccgatggagtgggcaatgcctcgggagattggcattgcgattccacgtggatgggggacagagtcgtcaccaagtccacccgaacctgggtgctgcccagctacaacaaccaccagtaccgagagatcaaaagcggctccgtcgacggaagcaacgccaacgcctactttggatacagcaccccctgggggtactttgactttaaccgcttccacagccactggagcccccgagactggcaaagactcatcaacaactactggggcttcagaccccggtccctcagagtcaaaatcttcaacattcaagtcaaagaggtcacggtgcaggactccaccaccaccatcgccaacaacctcacctccaccgtccaagtgtttacggacgacgactaccagctgccctacgtcgtcggcaacgggaccgagggatgcctgccggccttccctccgcaggtctttacgctgccgcagtacggttacgcgacgctgaaccgcgacaacacagaaaatcccaccgagaggagcagcttcttctgcctagagtactttcccagcaagatgctgagaacgggcaacaactttgagtttacctacaactttgaggaggtgcccttccactccagcttcgctcccagtcagaacctgttcaagctggccaacccgctggtggaccagtacttgtaccgcttcgtgagcacaaataacactggcggagtccagttcaacaagaacctggccgggagatacgccaacacctacaaaaactggttcccggggcccatgggccgaacccagggctggaacctgggctccggggtcaaccgcgccagtgtcagcgccttcgccacgaccaataggatggagctcgagggcgcgagttaccaggtgcccccgcagccgaacggcatgaccaacaacctccagggcagcaacacctatgccctggagaacactatgatcttcaacagccagccggcgaacccgggcaccaccgccacgtacctcgagggcaacatgctcatcaccagcgagagcgagacgcagccggtgaaccgcgtggcgtacaacgtcggcgggcagatggccaccaacaaccagagctccaccactgcccccgcgaccggcacggtcaacctccaggaaatcgtgcccggcagcgtgtggatggagagggacgtgtacctccaaggacccatctgggccaagatcccagagacgggggcgcactttcacccctctccggccatgggcggattcggactcaaacacccaccgcccatgatgctcatcaagaacacgcctgtgcccggaaatatcaccagcttctcggacgtgcccgtcagcagcttcatcacccagtacagcaccgggcaggtcaccgtggagatggagtgggagctcaagaaggaaaactccaagaggtggaacccagagatccagtacacaaacaactacaacgacccccagtttgtggactttgccccggacagcaccggggaatacagaaccaccagacctatcggaacccgataccttacccgacccctttaacccattcatgtcgcataccctcaataaa

SEQ ID NO: 1713 - protein, 724 aa, synthetic construct
  REGION 1..724: note = Description of Artificial Sequence: Synthetic polypeptide
MSFVDHPPDWLEEVGEGLREFLGLEAGPPKPKPNQQHQDQARGLVLPGYNYLGPGNGLDRGEPVNRADEVAREHDISYNEQLEAGDNPYLKYNHADAEFQEKLADDTSFGGNLGKAVFQAKKRVLEPFGLVEEGAKTAPTGKRIDDHFPKRKKARTEEDSKPSTSSDAEAGPSGSQQLQIPAQPASSLGADTMSAGGGGPLGDNNQGADGVGNASGDWHCDSTWMGDRVVTKSTRTWVLPSYNNHQYREIKSGSVDGSNANAYFGYSTPWGYFDFNRFHSHWSPRDWQRLINNYWGFRPRSLRVKIFNIQVKEVTVQDSTTTIANNLTSTVQVFTDDDYQLPYVVGNGTEGCLPAFPPQVFTLPQYGYATLNRDNTENPTERSSFFCLEYFPSKMLRTGNNFEFTYNFEEVPFHSSFAPSQNLFKLANPLVDQYLYRFVSTNNTGGVQFNKNLAGRYANTYKNWFPGPMGRTQGWNLGSGVNRASVSAFATTNRMELEGASYQVPPQPNGMTNNLQGSNTYALENTMIFNSQPANPGTTATYLEGNMLITSESETQPVNRVAYNVGGQMATNNQSSTTAPATGTVNLQEIVPGSVWMERDVYLQGPIWAKIPETGAHFHPSPAMGGFGLKHPPPMMLIKNTPVPGNITSFSDVPVSSFITQYSTGQVTVEMEWELKKENSKRWNPEIQYTNNYNDPQFVDFAPDSTGEYRTTRPIGTRYLTRPL

SEQ ID NO: 1714 - DNA, 2203 bp, synthetic construct
  misc_feature 1..2203: note = Description of Artificial Sequence: Synthetic polynucleotide
  source 1..2203: mol_type = other DNA
atgtcttttgttgatcaccctccagattggttggaagaagttggtgaaggtcttcgcgagtttttgggccttgaagcgggcccaccgaaaccaaaacccaatcagcagcatcaagatcaagcccgtggtcttgtgctgcctggttataactatctcggacccggaaacggtctcgatcgaggagagcctgtcaacagggcagacgaggtcgcgcgagagcacgacatctcgtacaacgagcagcttgaggcgggagacaacccctacctcaagtacaaccacgcggacgccgagtttcaggagaagctcgccgacgacacatccttcgggggaaacctcggaaaggcagtctttcaggccaagaaaagggttctcgaaccttttggcctggttgaagagggtgctaagacggcccctaccggaaagcggatagacgaccactttccaaaaagaaagaaggctcggaccgaagaggactccaagccttccacctcgtcagacgccgaagctggacccagcggatcccagcagctgcaaatcccagcccaaccagcctcaagtttgggagctgatacaatgtctgcgggaggtggcggcccattgggcgacaataaccaaggtgccgatggagtgggcaatgcctcgggagattggcattgcgattccacgtggatgggggacagagtcgtcaccaagtccacccgaacctgggtgctgcccagctacaacaaccaccagtaccgagagatcaaaagcggctccgtcgacggaagcaacgccaacgcctactttggatacagcaccccctgggggtactttgactttaaccgcttccacagccactggagcccccgagactggcaaagactcatcaacaactactggggcttcagaccccggtccctcagagtcaaaatcttcaacattcaagtcaaagaggtcacggtgcaggactccaccaccaccatcgccaacaacctcacctccaccgtccaagtgtttacggacgacgactaccagctgccctacgtcgtcggcaacgggaccgagggatgcctgccggccttccctccgcaggtctttacgctgccgcagtacggttacgcgacgctgaaccgcgacaacacagaaaatcccaccgagaggagcagcttcttctgcctagagtactttcccagcaagatgctgagaacgggcaacaactttgagtttacctacaactttgaggaggtgcccttccactccagcttcgctcccagtcagaacctgttcaagctggccaacccgctggtggaccagtacttgtaccgcttcgtgagcacaaataacactggcggagtccagttcaacaagaacctggccgggagatacgccaacacctacaaaaactggttcccggggcccatgggccgaacccagggctggaacctgggctccggggtcaaccgcgccagtgtcagcgccttcgccacgaccaataggatggagctcgagggcgcgagttaccaggtgcccccgcagccgaacggcatgaccaacaacctccagggcagcaacacctatgccctggagaacactatgatcttcaacagccagccggcgaacccgggcaccaccgccacgtacctcgagggcaacatgctcatcaccagcgagagcgagacgcagccggtgaaccgcgtggcgtacaacgtcggcgggcagatggccaccaacaaccagagctccaccactgcccccgcgaccggcacgtacaacacccaggaaatcgtgcccggcagcgtgtggatggagagggacgtgtacctccaaggacccatctgggccaagatcccagagacgggggcgcactttcacccctctccggccatgggcggattcggactcaaacacccaccgcccatgatgctcatcaagaacacgcctgtgcccggaaatatcaccagcttctcggacgtgcccgtcagcagcttcatcacccagtacagcaccgggcaggtcaccgtggagatggagtgggagctcaagaaggaaaactccaagaggtggaacccagagatccagtacacaaacaactacaacgacccccagtttgtggactttgccccggacagcaccggggaatacagaaccaccagacctatcggaacccgataccttacccgacccctttaacccattcatgtcgcataccctcaataaa

SEQ ID NO: 1715 - protein, 724 aa, synthetic construct
  REGION 1..724: note = Description of Artificial Sequence: Synthetic polypeptide
MSFVDHPPDWLEEVGEGLREFLGLEAGPPKPKPNQQHQDQARGLVLPGYNYLGPGNGLDRGEPVNRADEVAREHDISYNEQLEAGDNPYLKYNHADAEFQEKLADDTSFGGNLGKAVFQAKKRVLEPFGLVEEGAKTAPTGKRIDDHFPKRKKARTEEDSKPSTSSDAEAGPSGSQQLQIPAQPASSLGADTMSAGGGGPLGDNNQGADGVGNASGDWHCDSTWMGDRVVTKSTRTWVLPSYNNHQYREIKSGSVDGSNANAYFGYSTPWGYFDFNRFHSHWSPRDWQRLINNYWGFRPRSLRVKIFNIQVKEVTVQDSTTTIANNLTSTVQVFTDDDYQLPYVVGNGTEGCLPAFPPQVFTLPQYGYATLNRDNTENPTERSSFFCLEYFPSKMLRTGNNFEFTYNFEEVPFHSSFAPSQNLFKLANPLVDQYLYRFVSTNNTGGVQFNKNLAGRYANTYKNWFPGPMGRTQGWNLGSGVNRASVSAFATTNRMELEGASYQVPPQPNGMTNNLQGSNTYALENTMIFNSQPANPGTTATYLEGNMLITSESETQPVNRVAYNVGGQMATNNQSSTTAPATGTYNTQEIVPGSVWMERDVYLQGPIWAKIPETGAHFHPSPAMGGFGLKHPPPMMLIKNTPVPGNITSFSDVPVSSFITQYSTGQVTVEMEWELKKENSKRWNPEIQYTNNYNDPQFVDFAPDSTGEYRTTRPIGTRYLTRPL

SEQ ID NO: 1716 - DNA, 2203 bp, synthetic construct
  misc_feature 1..2203: note = Description of Artificial Sequence: Synthetic polynucleotide
  source 1..2203: mol_type = other DNA
atgtcttttgttgatcaccctccagattggttggaagaagttggtgaaggtcttcgcgagtttttgggccttgaagcgggcccaccgaaaccaaaacccaatcagcagcatcaagatcaagcccgtggtcttgtgctgcctggttataactatctcggacccggaaacggtctcgatcgaggagagcctgtcaacagggcagacgaggtcgcgcgagagcacgacatctcgtacaacgagcagcttgaggcgggagacaacccctacctcaagtacaaccacgcggacgccgagtttcaggagaagctcgccgacgacacatccttcgggggaaacctcggaaaggcagtctttcaggccaagaaaagggttctcgaaccttttggcctggttgaagagggtgctaagacggcccctaccggaaagcggatagacgaccactttccaaaaagaaagaaggctcggaccgaagaggactccaagccttccacctcgtcagacgccgaagctggacccagcggatcccagcagctgcaaatcccagcccaaccagcctcaagtttgggagctgatacaatgtctgcgggaggtggcggcccattgggcgacaataaccaaggtgccgatggagtgggcaatgcctcgggagattggcattgcgattccacgtggatgggggacagagtcgtcaccaagtccacccgaacctgggtgctgcccagctacaacaaccaccagtaccgagagatcaaaagcggctccgtcgacggaagcaacgccaacgcctactttggatacagcaccccctgggggtactttgactttaaccgcttccacagccactggagcccccgagactggcaaagactcatcaacaactactggggcttcagaccccggtccctcagagtcaaaatcttcaacattcaagtcaaagaggtcacggtgcaggactccaccaccaccatcgccaacaacctcacctccaccgtccaagtgtttacggacgacgactaccagctgccctacgtcgtcggcaacgggaccgagggatgcctgccggccttccctccgcaggtctttacgctgccgcagtacggttacgcgacgctgaaccgcgacaacacagaaaatcccaccgagaggagcagcttcttctgcctagagtactttcccagcaagatgctgagaacgggcaacaactttgagtttacctacaactttgaggaggtgcccttccactccagcttcgctcccagtcagaacctgttcaagctggccaacccgctggtggaccagtacttgtaccgcttcgtgagcacaaataacactggcggagtccagttcaacaagaacctggccgggagatacgccaacacctacaaaaactggttcccggggcccatgggccgaacccagggctggaacctgggctccggggtcaaccgcgccagtgtcagcgccttcgccacgaccaataggatggagctcgagggcgcgagttaccaggtgcccccgcagccgaacggcatgaccaacaacctccagggcagcaacacctatgccctggagaacactatgatcttcaacagccagccggcgaacccgggcaccaccgccacgtacctcgagggcaacatgctcatcaccagcgagagcgagacgcagccggtgaaccgcgtggcgtacaacgtcggcgggcagatggccaccaacaaccagagctccaccactgcccccgcgaccggcacggtcaacacccaggaaatcgtgcccggcagcgtgtggatggagagggacgtgtacctccaaggacccatctgggccaagatcccagagacgggggcgcactttcacccctctccggccatgggcggattcggactcaaacacccaccgcccatgatgctcatcaagaacacgcctgtgcccggaaatatcaccagcttctcggacgtgcccgtcagcagcttcatcacccagtacagcaccgggcaggtcaccgtggagatggagtgggagctcaagaaggaaaactccaagaggtggaacccagagatccagtacacaaacaactacaacgacccccagtttgtggactttgccccggacagcaccggggaatacagaaccaccagacctatcggaacccgataccttacccgacccctttaacccattcatgtcgcataccctcaataaa

SEQ ID NO: 1717 - protein, 724 aa, synthetic construct
  REGION 1..724: note = Description of Artificial Sequence: Synthetic polypeptide
MSFVDHPPDWLEEVGEGLREFLGLEAGPPKPKPNQQHQDQARGLVLPGYNYLGPGNGLDRGEPVNRADEVAREHDISYNEQLEAGDNPYLKYNHADAEFQEKLADDTSFGGNLGKAVFQAKKRVLEPFGLVEEGAKTAPTGKRIDDHFPKRKKARTEEDSKPSTSSDAEAGPSGSQQLQIPAQPASSLGADTMSAGGGGPLGDNNQGADGVGNASGDWHCDSTWMGDRVVTKSTRTWVLPSYNNHQYREIKSGSVDGSNANAYFGYSTPWGYFDFNRFHSHWSPRDWQRLINNYWGFRPRSLRVKIFNIQVKEVTVQDSTTTIANNLTSTVQVFTDDDYQLPYVVGNGTEGCLPAFPPQVFTLPQYGYATLNRDNTENPTERSSFFCLEYFPSKMLRTGNNFEFTYNFEEVPFHSSFAPSQNLFKLANPLVDQYLYRFVSTNNTGGVQFNKNLAGRYANTYKNWFPGPMGRTQGWNLGSGVNRASVSAFATTNRMELEGASYQVPPQPNGMTNNLQGSNTYALENTMIFNSQPANPGTTATYLEGNMLITSESETQPVNRVAYNVGGQMATNNQSSTTAPATGTVNTQEIVPGSVWMERDVYLQGPIWAKIPETGAHFHPSPAMGGFGLKHPPPMMLIKNTPVPGNITSFSDVPVSSFITQYSTGQVTVEMEWELKKENSKRWNPEIQYTNNYNDPQFVDFAPDSTGEYRTTRPIGTRYLTRPL

SEQ ID NO: 1718 - DNA, 2203 bp, synthetic construct
  misc_feature 1..2203: note = Description of Artificial Sequence: Synthetic polynucleotide
  source 1..2203: mol_type = other DNA
atgtcttttgttgatcaccctccagattggttggaagaagttggtgaaggtcttcgcgagtttttgggccttgaagcgggcccaccgaaaccaaaacccaatcagcagcatcaagatcaagcccgtggtcttgtgctgcctggttataactatctcggacccggaaacggtctcgatcgaggagagcctgtcaacagggcagacgaggtcgcgcgagagcacgacatctcgtacaacgagcagcttgaggcgggagacaacccctacctcaagtacaaccacgcggacgccgagtttcaggagaagctcgccgacgacacatccttcgggggaaacctcggaaaggcagtctttcaggccaagaaaagggttctcgaaccttttggcctggttgaagagggtgctaagacggcccctaccggaaagcggatagacgaccactttccaaaaagaaagaaggctcggaccgaagaggactccaagccttccacctcgtcagacgccgaagctggacccagcggatcccagcagctgcaaatcccagcccaaccagcctcaagtttgggagctgatacaatgtctgcgggaggtggcggcccattgggcgacaataaccaaggtgccgatggagtgggcaatgcctcgggagattggcattgcgattccacgtggatgggggacagagtcgtcaccaagtccacccgaacctgggtgctgcccagctacaacaaccaccagtaccgagagatcaaaagcggctccgtcgacggaagcaacgccaacgcctactttggatacagcaccccctgggggtactttgactttaaccgcttccacagccactggagcccccgagactggcaaagactcatcaacaactactggggcttcagaccccggtccctcagagtcaaaatcttcaacattcaagtcaaagaggtcacggtgcaggactccaccaccaccatcgccaacaacctcacctccaccgtccaagtgtttacggacgacgactaccagctgccctacgtcgtcggcaacgggaccgagggatgcctgccggccttccctccgcaggtctttacgctgccgcagtacggttacgcgacgctgaaccgcgacaacacagaaaatcccaccgagaggagcagcttcttctgcctagagtactttcccagcaagatgctgagaacgggcaacaactttgagtttacctacaactttgaggaggtgcccttccactccagcttcgctcccagtcagaacctgttcaagctggccaacccgctggtggaccagtacttgtaccgcttcgtgagcacaaataacactggcggagtccagttcaacaagaacctggccgggagatacgccaacacctacaaaaactggttcccggggcccatgggccgaacccagggctggaacctgggctccggggtcaaccgcgccagtgtcagcgccttcgccacgaccaataggatggagctcgagggcgcgagttaccaggtgcccccgcagccgaacggcatgaccaacaacctccagggcagcaacacctatgccctggagaacactatgatcttcaacagccagccggcgaacccgggcaccaccgccacgtacctcgagggcaacatgctcatcaccagcgagagcgagacgcagccggtgaaccgcgtggcgtacaacgtcggcgggcagatggccaccaacaaccagagctccaccactgcccccgcgaccggcacgtacaacctccaggaaatcgtgcccggcagcgtgtggatggagagggacgtgtacctccaaggacccatctgggccaagatcccagagacgggggcgcactttcacccctctccggccatgggcggattcggactcaaacacccaccgcccatgatgctcatcaagaacacgcctgtgcccggaaatatcaccagcttctcggccgtgcccgtcagcagcttcatcacccagtacagcaccgggcaggtcaccgtggagatggagtgggagctcaagaaggaaaactccaagaggtggaacccagagatccagtacacaaacaactacaacgacccccagtttgtggactttgccccggacagcaccggggaatacagaaccaccagacctatcggaacccgataccttacccgacccctttaacccattcatgtcgcataccctcaataaa

SEQ ID NO: 1719 - protein, 724 aa, synthetic construct
  REGION 1..724: note = Description of Artificial Sequence: Synthetic polypeptide
MSFVDHPPDWLEEVGEGLREFLGLEAGPPKPKPNQQHQDQARGLVLPGYNYLGPGNGLDRGEPVNRADEVAREHDISYNEQLEAGDNPYLKYNHADAEFQEKLADDTSFGGNLGKAVFQAKKRVLEPFGLVEEGAKTAPTGKRIDDHFPKRKKARTEEDSKPSTSSDAEAGPSGSQQLQIPAQPASSLGADTMSAGGGGPLGDNNQGADGVGNASGDWHCDSTWMGDRVVTKSTRTWVLPSYNNHQYREIKSGSVDGSNANAYFGYSTPWGYFDFNRFHSHWSPRDWQRLINNYWGFRPRSLRVKIFNIQVKEVTVQDSTTTIANNLTSTVQVFTDDDYQLPYVVGNGTEGCLPAFPPQVFTLPQYGYATLNRDNTENPTERSSFFCLEYFPSKMLRTGNNFEFTYNFEEVPFHSSFAPSQNLFKLANPLVDQYLYRFVSTNNTGGVQFNKNLAGRYANTYKNWFPGPMGRTQGWNLGSGVNRASVSAFATTNRMELEGASYQVPPQPNGMTNNLQGSNTYALENTMIFNSQPANPGTTATYLEGNMLITSESETQPVNRVAYNVGGQMATNNQSSTTAPATGTYNLQEIVPGSVWMERDVYLQGPIWAKIPETGAHFHPSPAMGGFGLKHPPPMMLIKNTPVPGNITSFSAVPVSSFITQYSTGQVTVEMEWELKKENSKRWNPEIQYTNNYNDPQFVDFAPDSTGEYRTTRPIGTRYLTRPL

SEQ ID NO: 1720 - DNA, 2203 bp, synthetic construct
  misc_feature 1..2203: note = Description of Artificial Sequence: Synthetic polynucleotide
  source 1..2203: mol_type = other DNA
atgtcttttgttgatcaccctccagattggttggaagaagttggtgaaggtcttcgcgagtttttgggccttgaagcgggcccaccgaaaccaaaacccaatcagcagcatcaagatcaagcccgtggtcttgtgctgcctggttataactatctcggacccggaaacggtctcgatcgaggagagcctgtcaacagggcagacgaggtcgcgcgagagcacgacatctcgtacaacgagcagcttgaggcgggagacaacccctacctcaagtacaaccacgcggacgccgagtttcaggagaagctcgccgacgacacatccttcgggggaaacctcggaaaggcagtctttcaggccaagaaaagggttctcgaaccttttggcctggttgaagagggtgctaagacggcccctaccggaaagcggatagacgaccactttccaaaaagaaagaaggctcggaccgaagaggactccaagccttccacctcgtcagacgccgaagctggacccagcggatcccagcagctgcaaatcccagcccaaccagcctcaagtttgggagctgatacaatgtctgcgggaggtggcggcccattgggcgacaataaccaaggtgccgatggagtgggcaatgcctcgggagattggcattgcgattccacgtggatgggggacagagtcgtcaccaagtccacccgaacctgggtgctgcccagctacaacaaccaccagtaccgagagatcaaaagcggctccgtcgacggaagcaacgccaacgcctactttggatacagcaccccctgggggtactttgactttaaccgcttccacagccactggagcccccgagactggcaaagactcatcaacaactactggggcttcagaccccggtccctcagagtcaaaatcttcaacattcaagtcaaagaggtcacggtgcaggactccaccaccaccatcgccaacaacctcacctccaccgtccaagtgtttatggacgacgactaccagctgccctacgtcgtcggcaacgggaccgagggatgcctgccggccttccctccgcaggtctttacgctgccgcagtacggttacgcgacgctgaaccgcgacaacacagaaaatcccaccgagaggagcagcttcttctgcctagagtactttcccagcaagatgctgagaacgggcaacaactttgagtttacctacaactttgaggaggtgcccttccactccagcttcgctcccagtcagaacctgttcaagctggccaacccgctggtggaccagtacttgtaccgcttcgtgagcacaaataacactggcggagtccagttcaacaagaacctggccgggagatacgccaacacctacaaaaactggttcccggggcccatgggccgaacccagggctggaacctgggctccggggtcaaccgcgccagtgtcagcgccttcgccacgaccaataggatggagctcgagggcgcgagttaccaggtgcccccgcagccgaacggcatgaccaacaacctccagggcagcaacacctatgccctggagaacactatgatcttcaacagccagccggcgaacccgggcaccaccgccacgtacctcgagggcaacatgctcatcaccagcgagagcgagacgcagccggtgaaccgcgtggcgtacaacgtcggcgggcagatggccaccaacaaccagagctccaccactgcccccgcgaccggcacgtacaacctccaggaaatcgtgcccggcagcgtgtggatggagagggacgtgtacctccaaggacccatctgggccaagatcccagagacgggggcgcactttcacccctctccggccatgggcggattcggactcaaacacccaccgcccatgatgctcatcaagaacacgcctgtgcccggaaatatcaccagcttctcggacgtgcccgtcagcagcttcatcacccagtacagcaccgggcaggtcaccgtggagatggagtgggagctcaagaaggaaaactccaagaggtggaacccagagatccagtacacaaacaactacaacgacccccagtttgtggactttgccccggacagcaccggggaatacagaaccaccagacctatcggaacccgataccttacccgacccctttaacccattcatgtcgcataccctcaataaa

SEQ ID NO: 1721 - protein, 724 aa, synthetic construct
  REGION 1..724: note = Description of Artificial Sequence: Synthetic polypeptide
MSFVDHPPDWLEEVGEGLREFLGLEAGPPKPKPNQQHQDQARGLVLPGYNYLGPGNGLDRGEPVNRADEVAREHDISYNEQLEAGDNPYLKYNHADAEFQEKLADDTSFGGNLGKAVFQAKKRVLEPFGLVEEGAKTAPTGKRIDDHFPKRKKARTEEDSKPSTSSDAEAGPSGSQQLQIPAQPASSLGADTMSAGGGGPLGDNNQGADGVGNASGDWHCDSTWMGDRVVTKSTRTWVLPSYNNHQYREIKSGSVDGSNANAYFGYSTPWGYFDFNRFHSHWSPRDWQRLINNYWGFRPRSLRVKIFNIQVKEVTVQDSTTTIANNLTSTVQVFMDDDYQLPYVVGNGTEGCLPAFPPQVFTLPQYGYATLNRDNTENPTERSSFFCLEYFPSKMLRTGNNFEFTYNFEEVPFHSSFAPSQNLFKLANPLVDQYLYRFVSTNNTGGVQFNKNLAGRYANTYKNWFPGPMGRTQGWNLGSGVNRASVSAFATTNRMELEGASYQVPPQPNGMTNNLQGSNTYALENTMIFNSQPANPGTTATYLEGNMLITSESETQPVNRVAYNVGGQMATNNQSSTTAPATGTYNLQEIVPGSVWMERDVYLQGPIWAKIPETGAHFHPSPAMGGFGLKHPPPMMLIKNTPVPGNITSFSDVPVSSFITQYSTGQVTVEMEWELKKENSKRWNPEIQYTNNYNDPQFVDFAPDSTGEYRTTRPIGTRYLTRPL

SEQ ID NO: 1722 - DNA, 2203 bp, synthetic construct
  misc_feature 1..2203: note = Description of Artificial Sequence: Synthetic polynucleotide
  source 1..2203: mol_type = other DNA
atgtcttttgttgatcaccctccagattggttggaagaagttggtgaaggtcttcgcgagtttttgggccttgaagcgggcccaccgaaaccaaaacccaatcagcagcatcaagatcaagcccgtggtcttgtgctgcctggttataactatctcggacccggaaacggtctcgatcgaggagagcctgtcaacagggcagacgaggtcgcgcgagagcacgacatctcgtacaacgagcagcttgaggcgggagacaacccctacctcaagtacaaccacgcggacgccgagtttcaggagaagctcgccgacgacacatccttcgggggaaacctcggaaaggcagtctttcaggccaagaaaagggttctcgaaccttttggcctggttgaagagggtgctaagacggcccctaccggaaagcggatagacgaccactttccaaaaagaaagaaggctcggaccgaagaggactccaagccttccacctcgtcagacgccgaagctggacccagcggatcccagcagctgcaaatcccagcccaaccagcctcaagtttgggagctgatacaatgtctgcgggaggtggcggcccattgggcgacaataaccaaggtgccgatggagtgggcaatgcctcgggagattggcattgcgattccacgtggatgggggacagagtcgtcaccaagtccacccgaacctgggtgctgcccagctacaacaaccaccagtaccgagagatcaaaagcggctccgtcgacggaagcaacgccaacgcctactttggatacagcaccccctgggggtactttgactttaaccgcttccacagccactggagcccccgagactggcaaagactcatcaacaactactggggcttcagaccccggtccctcagagtcaaaatcttcaacattcaagtcaaagaggtcacggtgcaggactccaccaccaccatcgccaacaacctcacctccaccgtcgatgtgtttacggacgacgactaccagctgccctacgtcgtcggcaacgggaccgagggatgcctgccggccttccctccgcaggtctttacgctgccgcagtacggttacgcgacgctgaaccgcgacaacacagaaaatcccaccgagaggagcagcttcttctgcctagagtactttcccagcaagatgctgagaacgggcaacaactttgagtttacctacaactttgaggaggtgcccttccactccagcttcgctcccagtcagaacctgttcaagctggccaacccgctggtggaccagtacttgtaccgcttcgtgagcacaaataacactggcggagtccagttcaacaagaacctggccgggagatacgccaacacctacaaaaactggttcccggggcccatgggccgaacccagggctggaacctgggctccggggtcaaccgcgccagtgtcagcgccttcgccacgaccaataggatggagctcgagggcgcgagttaccaggtgcccccgcagccgaacggcatgaccaacaacctccagggcagcaacacctatgccctggagaacactatgatcttcaacagccagccggcgaacccgggcaccaccgccacgtacctcgagggcaacatgctcatcaccagcgagagcgagacgcagccggtgaaccgcgtggcgtacaacgtcggcgggcagatggccaccaacaaccagagctccaccactgcccccgcgaccggcacgtacaacctccaggaaatcgtgcccggcagcgtgtggatggagagggacgtgtacctccaaggacccatctgggccaagatcccagagacgggggcgcactttcacccctctccggccatgggcggattcggactcaaacacccaccgcccatgatgctcatcaagaacacgcctgtgcccggaaatatcaccagcttctcggacgtgcccgtcagcagcttcatcacccagtacagcaccgggcaggtcaccgtggagatggagtgggagctcaagaaggaaaactccaagaggtggaacccagagatccagtacacaaacaactacaacgacccccagtttgtggactttgccccggacagcaccggggaatacagaaccaccagacctatcggaacccgataccttacccgacccctttaacccattcatgtcgcataccctcaataaa

SEQ ID NO: 1723 - protein, 724 aa, synthetic construct
  REGION 1..724: note = Description of Artificial Sequence: Synthetic polypeptide
MSFVDHPPDWLEEVGEGLREFLGLEAGPPKPKPNQQHQDQARGLVLPGYNYLGPGNGLDRGEPVNRADEVAREHDISYNEQLEAGDNPYLKYNHADAEFQEKLADDTSFGGNLGKAVFQAKKRVLEPFGLVEEGAKTAPTGKRIDDHFPKRKKARTEEDSKPSTSSDAEAGPSGSQQLQIPAQPASSLGADTMSAGGGGPLGDNNQGADGVGNASGDWHCDSTWMGDRVVTKSTRTWVLPSYNNHQYREIKSGSVDGSNANAYFGYSTPWGYFDFNRFHSHWSPRDWQRLINNYWGFRPRSLRVKIFNIQVKEVTVQDSTTTIANNLTSTVDVFTDDDYQLPYVVGNGTEGCLPAFPPQVFTLPQYGYATLNRDNTENPTERSSFFCLEYFPSKMLRTGNNFEFTYNFEEVPFHSSFAPSQNLFKLANPLVDQYLYRFVSTNNTGGVQFNKNLAGRYANTYKNWFPGPMGRTQGWNLGSGVNRASVSAFATTNRMELEGASYQVPPQPNGMTNNLQGSNTYALENTMIFNSQPANPGTTATYLEGNMLITSESETQPVNRVAYNVGGQMATNNQSSTTAPATGTYNLQEIVPGSVWMERDVYLQGPIWAKIPETGAHFHPSPAMGGFGLKHPPPMMLIKNTPVPGNITSFSDVPVSSFITQYSTGQVTVEMEWELKKENSKRWNPEIQYTNNYNDPQFVDFAPDSTGEYRTTRPIGTRYLTRPL

SEQ ID NO: 1724 - DNA, 2203 bp, synthetic construct
  misc_feature 1..2203: note = Description of Artificial Sequence: Synthetic polynucleotide
  source 1..2203: mol_type = other DNA
atgtcttttgttgatcaccctccagattggttggaagaagttggtgaaggtcttcgcgagtttttgggccttgaagcgggcccaccgaaaccaaaacccaatcagcagcatcaagatcaagcccgtggtcttgtgctgcctggttataactatctcggacccggaaacggtctcgatcgaggagagcctgtcaacagggcagacgaggtcgcgcgagagcacgacatctcgtacaacgagcagcttgaggcgggagacaacccctacctcaagtacaaccacgcggacgccgagtttcaggagaagctcgccgacgacacatccttcgggggaaacctcggaaaggcagtctttcaggccaagaaaagggttctcgaaccttttggcctggttgaagagggtgctaagacggcccctaccggaaagcggatagacgaccactttccaaaaagaaagaaggctcggaccgaagaggactccaagccttccacctcgtcagacgccgaagctggacccagcggatcccagcagctgcaaatcccagcccaaccagcctcaagtttgggagctgatacaatgtctgcgggaggtggcggcccattgggcgacaataaccaaggtgccgatggagtgggcaatgcctcgggagattggcattgcgattccacgtggatgggggacagagtcgtcaccaagtccacccgaacctgggtgctgcccagctacaacaaccaccagtaccgagagatcaaaagcggctccgtcgacggaagcaacgccaacgcctactttggatacagcaccccctgggggtactttgactttaaccgcttccacagccactggagcccccgagactggcaaagactcatcaacaactactggggcttcagaccccggtccctcagagtcaaaatcttcaacattcaagtcaaagaggtcacggtgcaggactccaccaccaccatcgccaacaacctcacctccaccgtccaagtgtttacggacgacgactaccagctgccctacgtcgtcggcaacgggacccagggatgcctgccggccttccctccgcaggtctttacgctgccgcagtacggttacgcgacgctgaaccgcgacaacacagaaaatcccaccgagaggagcagcttcttctgcctagagtactttcccagcaagatgctgagaacgggcaacaactttgagtttacctacaactttgaggaggtgcccttccactccagcttcgctcccagtcagaacctgttcaagctggccaacccgctggtggaccagtacttgtaccgcttcgtgagcacaaataacactggcggagtccagttcaacaagaacctggccgggagatacgccaacacctacaaaaactggttcccggggcccatgggccgaacccagggctggaacctgggctccggggtcaaccgcgccagtgtcagcgccttcgccacgaccaataggatggagctcgagggcgcgagttaccaggtgcccccgcagccgaacggcatgaccaacaacctccagggcagcaacacctatgccctggagaacactatgatcttcaacagccagccggcgaacccgggcaccaccgccacgtacctcgagggcaacatgctcatcaccagcgagagcgagacgcagccggtgaaccgcgtggcgtacaacgtcggcgggcagatggccaccaacaaccagagctccaccactgcccccgcgaccggcacgtacaacctccaggaaatcgtgcccggcagcgtgtggatggagagggacgtgtacctccaaggacccatctgggccaagatcccagagacgggggcgcactttcacccctctccggccatgggcggattcggactcaaacacccaccgcccatgatgctcatcaagaacacgcctgtgcccggaaatatcaccagcttctcggacgtgcccgtcagcagcttcatcacccagtacagcaccgggcaggtcaccgtggagatggagtgggagctcaagaaggaaaactccaagaggtggaacccagagatccagtacacaaacaactacaacgacccccagtttgtggactttgccccggacagcaccggggaatacagaaccaccagacctatcggaacccgataccttacccgacccctttaacccattcatgtcgcataccctcaataaa

SEQ ID NO: 1725 - protein, 724 aa, synthetic construct
  REGION 1..724: note = Description of Artificial Sequence: Synthetic polypeptide
MSFVDHPPDWLEEVGEGLREFLGLEAGPPKPKPNQQHQDQARGLVLPGYNYLGPGNGLDRGEPVNRADEVAREHDISYNEQLEAGDNPYLKYNHADAEFQEKLADDTSFGGNLGKAVFQAKKRVLEPFGLVEEGAKTAPTGKRIDDHFPKRKKARTEEDSKPSTSSDAEAGPSGSQQLQIPAQPASSLGADTMSAGGGGPLGDNNQGADGVGNASGDWHCDSTWMGDRVVTKSTRTWVLPSYNNHQYREIKSGSVDGSNANAYFGYSTPWGYFDFNRFHSHWSPRDWQRLINNYWGFRPRSLRVKIFNIQVKEVTVQDSTTTIANNLTSTVQVFTDDDYQLPYVVGNGTQGCLPAFPPQVFTLPQYGYATLNRDNTENPTERSSFFCLEYFPSKMLRTGNNFEFTYNFEEVPFHSSFAPSQNLFKLANPLVDQYLYRFVSTNNTGGVQFNKNLAGRYANTYKNWFPGPMGRTQGWNLGSGVNRASVSAFATTNRMELEGASYQVPPQPNGMTNNLQGSNTYALENTMIFNSQPANPGTTATYLEGNMLITSESETQPVNRVAYNVGGQMATNNQSSTTAPATGTYNLQEIVPGSVWMERDVYLQGPIWAKIPETGAHFHPSPAMGGFGLKHPPPMMLIKNTPVPGNITSFSDVPVSSFITQYSTGQVTVEMEWELKKENSKRWNPEIQYTNNYNDPQFVDFAPDSTGEYRTTRPIGTRYLTRPL

SEQ ID NO: 1726 - DNA, 2203 bp, synthetic construct
  misc_feature 1..2203: note = Description of Artificial Sequence: Synthetic polynucleotide
  source 1..2203: mol_type = other DNA
atgtcttttgttgatcaccctccagattggttggaagaagttggtgaaggtcttcgcgagtttttgggccttgaagcgggcccaccgaaaccaaaacccaatcagcagcatcaagatcaagcccgtggtcttgtgctgcctggttataactatctcggacccggaaacggtctcgatcgaggagagcctgtcaacagggcagacgaggtcgcgcgagagcacgacatctcgtacaacgagcagcttgaggcgggagacaacccctacctcaagtacaaccacgcggacgccgagtttcaggagaagctcgccgacgacacatccttcgggggaaacctcggaaaggcagtctttcaggccaagaaaagggttctcgaaccttttggcctggttgaagagggtgctaagacggcccctaccggaaagcggatagacgaccactttccaaaaagaaagaaggctcggaccgaagaggactccaagccttccacctcgtcagacgccgaagctggacccagcggatcccagcagctgcaaatcccagcccaaccagcctcaagtttgggagctgatacaatgtctgcgggaggtggcggcccattgggcgacaataaccaaggtgccgatggagtgggcaatgcctcgggagattggcattgcgattccacgtggatgggggacagagtcgtcaccaagtccacccgaacctgggtgctgcccagctacaacaaccaccagtaccgagagatcaaaagcggctccgtcgacggaagcaacgccaacgcctactttggatacagcaccccctgggggtactttgactttaaccgcttccacagccactggagcccccgagactggcaaagactcatcaacaactactggggcttcagaccccggtccctcagagtcaaaatcttcaacattcaagtcaaagaggtcacggtgcaggactccaccaccaccatcgccaacaacctcacctccaccgtccaagtgtttacggacgacgactaccagctgccctacgtcgtcggcaacgggaccgagggatgcctgccggccttccctccgcaggtctttacgctgccgcagtacggttacgcgacgctgaaccgcgacaacacagaaaatcccaccgagaggagcagcttcttctgcctagagtactttcccagcaagatgctgagaacgggcaacaactttgagtttacctacaactttgaggaggtgcccttccactccagcttcgctcccagtcagaacctgttcaagctggccaacccgctggtggaccagtacttgtaccgcttcgtgagcacaaataacactggcggagtccagttcaacaagaacctggccgggagatacgccaacacctacaaaaactggttcccggggcccatgggccgaacccagggctggaacctgggctccggggtcaaccgcgccagtgtcagcgccttcgccacgaccaataggatggagctcgagggcgcgagttaccaggtgcccccgcagccgaacggcatgaccaacaacctccagggcagcaacacctatgccctggagaacactatgatcttcaacagccagtcggcgaacccgggcaccaccgccacgtacctcgagggcaacatgctcatcaccagcgagagcgagacgcagccggtgaaccgcgtggcgtacaacgtcggcgggcagatggccaccaacaaccagagctccaccactgcccccgcgaccggcacgtacaacctccaggaaatcgtgcccggcagcgtgtggatggagagggacgtgtacctccaaggacccatctgggccaagatcccagagacgggggcgcactttcacccctctccggccatgggcggattcggactcaaacacccaccgcccatgatgctcatcaagaacacgcctgtgcccggaaatatcaccagcttctcggacgtgcccgtcagcagcttcatcacccagtacagcaccgggcaggtcaccgtggagatggagtgggagctcaagaaggaaaactccaagaggtggaacccagagatccagtacacaaacaactacaacgacccccagtttgtggactttgccccggacagcaccggggaatacagaaccaccagacctatcggaacccgataccttacccgacccctttaacccattcatgtcgcataccctcaataaa

SEQ ID NO: 1727 - protein, 724 aa, synthetic construct
  REGION 1..724: note = Description of Artificial Sequence: Synthetic polypeptide
MSFVDHPPDWLEEVGEGLREFLGLEAGPPKPKPNQQHQDQARGLVLPGYNYLGPGNGLDRGEPVNRADEVAREHDISYNEQLEAGDNPYLKYNHADAEFQEKLADDTSFGGNLGKAVFQAKKRVLEPFGLVEEGAKTAPTGKRIDDHFPKRKKARTEEDSKPSTSSDAEAGPSGSQQLQIPAQPASSLGADTMSAGGGGPLGDNNQGADGVGNASGDWHCDSTWMGDRVVTKSTRTWVLPSYNNHQYREIKSGSVDGSNANAYFGYSTPWGYFDFNRFHSHWSPRDWQRLINNYWGFRPRSLRVKIFNIQVKEVTVQDSTTTIANNLTSTVQVFTDDDYQLPYVVGNGTEGCLPAFPPQVFTLPQYGYATLNRDNTENPTERSSFFCLEYFPSKMLRTGNNFEFTYNFEEVPFHSSFAPSQNLFKLANPLVDQYLYRFVSTNNTGGVQFNKNLAGRYANTYKNWFPGPMGRTQGWNLGSGVNRASVSAFATTNRMELEGASYQVPPQPNGMTNNLQGSNTYALENTMIFNSQSANPGTTATYLEGNMLITSESETQPVNRVAYNVGGQMATNNQSSTTAPATGTYNLQEIVPGSVWMERDVYLQGPIWAKIPETGAHFHPSPAMGGFGLKHPPPMMLIKNTPVPGNITSFSDVPVSSFITQYSTGQVTVEMEWELKKENSKRWNPEIQYTNNYNDPQFVDFAPDSTGEYRTTRPIGTRYLTRPL

SEQ ID NO: 1728 - DNA, 2203 bp, synthetic construct
  misc_feature 1..2203: note = Description of Artificial Sequence: Synthetic polynucleotide
  source 1..2203: mol_type = other DNA
atgtcttttgttgatcaccctccagattggttggaagaagttggtgaaggtcttcgcgagtttttgggccttgaagcgggcccaccgaaaccaaaacccaatcagcagcatcaagatcaagcccgtggtcttgtgctgcctggttataactatctcggacccggaaacggtctcgatcgaggagagcctgtcaacagggcagacgaggtcgcgcgagagcacgacatctcgtacaacgagcagcttgaggcgggagacaacccctacctcaagtacaaccacgcggacgccgagtttcaggagaagctcgccgacgacacatccttcgggggaaacctcggaaaggcagtctttcaggccaagaaaagggttctcgaaccttttggcctggttgaagagggtgctaagacggcccctaccggaaagcggatagacgaccactttccaaaaagaaagaaggctcggaccgaagaggactccaagccttccacctcgtcagacgccgaagctggacccagcggatcccagcagctgcaaatcccagcccaaccagcctcaagtttgggagctgatacaatgtctgcgggaggtggcggcccattgggcgacaataaccaaggtgccgatggagtgggcaatgcctcgggagattggcattgcgattccacgtggatgggggacagagtcgtcaccaagtccacccgaacctgggtgctgcccagctacaacaaccaccagtaccgagagatcaaaagcggctccgtcgacggaagcaacgccaacgcctactttggatacagcaccccctgggggtactttgactttaaccgcttccacagccactggagcccccgagactggcaaagactcatcaacaactactggggcttcagaccccggtccctcagagtcaaaatcttcaacattcaagtcaaagaggtcacggtgcaggactccaccaccaccatcgccaacaacctcacctccaccgtccaagtgtttacggacgacgactaccagctgccctacgtcgtcggcaacgggaccgagggatgcctgccggccttccctccgcaggtctttacgctgccgcagtacggttacgcgacgctgaaccgcgacaacacagaaaatcccaccgagaggagcagcttcttctgcctagagtactttcccagcaagatgctgagaacgggcaacaactttgagtttacctacaactttgaggaggtgcccttccactccagcttcgctcccagtcagaacctgttcaagctggccaacccgctggtggaccagtacttgtaccgcttcgtgagcacaaataacactggcggagtccagttcaacaagaacctggccgggagatacgccaacacctacaaaaactggttcccggggcccatgggccgaacccagggctggaacctgggctccggggtcaaccgcgccagtgtcagcgccttcgccacgaccaataggatggagctcgagggcgcgagttaccaggtgcccccgcagccgaacggcatgaccaacaacctccagggcagcaacacctatgccctggagaacactatgatcttcaacagccagggggcgaacccgggcaccaccgccacgtacctcgagggcaacatgctcatcaccagcgagagcgagacgcagccggtgaaccgcgtggcgtacaacgtcggcgggcagatggccaccaacaaccagagctccaccactgcccccgcgaccggcacgtacaacctccaggaaatcgtgcccggcagcgtgtggatggagagggacgtgtacctccaaggacccatctgggccaagatcccagagacgggggcgcactttcacccctctccggccatgggcggattcggactcaaacacccaccgcccatgatgctcatcaagaacacgcctgtgcccggaaatatcaccagcttctcggacgtgcccgtcagcagcttcatcacccagtacagcaccgggcaggtcaccgtggagatggagtgggagctcaagaaggaaaactccaagaggtggaacccagagatccagtacacaaacaactacaacgacccccagtttgtggactttgccccggacagcaccggggaatacagaaccaccagacctatcggaacccgataccttacccgacccctttaacccattcatgtcgcataccctcaataaa

SEQ ID NO: 1729 - protein, 724 aa, synthetic construct
  REGION 1..724: note = Description of Artificial Sequence: Synthetic polypeptide
MSFVDHPPDWLEEVGEGLREFLGLEAGPPKPKPNQQHQDQARGLVLPGYNYLGPGNGLDRGEPVNRADEVAREHDISYNEQLEAGDNPYLKYNHADAEFQEKLADDTSFGGNLGKAVFQAKKRVLEPFGLVEEGAKTAPTGKRIDDHFPKRKKARTEEDSKPSTSSDAEAGPSGSQQLQIPAQPASSLGADTMSAGGGGPLGDNNQGADGVGNASGDWHCDSTWMGDRVVTKSTRTWVLPSYNNHQYREIKSGSVDGSNANAYFGYSTPWGYFDFNRFHSHWSPRDWQRLINNYWGFRPRSLRVKIFNIQVKEVTVQDSTTTIANNLTSTVQVFTDDDYQLPYVVGNGTEGCLPAFPPQVFTLPQYGYATLNRDNTENPTERSSFFCLEYFPSKMLRTGNNFEFTYNFEEVPFHSSFAPSQNLFKLANPLVDQYLYRFVSTNNTGGVQFNKNLAGRYANTYKNWFPGPMGRTQGWNLGSGVNRASVSAFATTNRMELEGASYQVPPQPNGMTNNLQGSNTYALENTMIFNSQGANPGTTATYLEGNMLITSESETQPVNRVAYNVGGQMATNNQSSTTAPATGTYNLQEIVPGSVWMERDVYLQGPIWAKIPETGAHFHPSPAMGGFGLKHPPPMMLIKNTPVPGNITSFSDVPVSSFITQYSTGQVTVEMEWELKKENSKRWNPEIQYTNNYNDPQFVDFAPDSTGEYRTTRPIGTRYLTRPL

SEQ ID NO: 1730 - DNA, 2194 bp, synthetic construct
  misc_feature 1..2194: note = Description of Artificial Sequence: Synthetic polynucleotide
  source 1..2194: mol_type = other DNA
atgtcttttgttgatcaccctccagattggttggaagaagttggtgaaggtcttcgcgagtttttgggccttgaagcgggcccaccgaaaccaaaacccaatcagcagcatcaagatcaagcccgtggtcttgtgctgcctggttataactatctcggacccggaaacggtctcgatcgaggagagcctgtcaacagggcagacgaggtcgcgcgagagcacgacatctcgtacaacgagcagcttgaggcgggagacaacccctacctcaagtacaaccacgcggacgccgagtttcaggagaagctcgccgacgacacatccttcgggggaaacctcggaaaggcagtctttcaggccaagaaaagggttctcgaaccttttggcctggttgaagagggtgctaagacggcccctaccggaaagcggatagacgaccactttccaaaaagaaagaaggctcggaccgaagaggactccaagccttccacctcgtcagacgccgaagctggacccagcggatcccagcagctgcaaatcccagcccaaccagcctcaagtttgggagctgatacaatgtctgcgggaggtggcggcccattgggcgacaataaccaaggtgccgatggagtgggcaatgcctcgggagattggcattgcgattccacgtggatgggggacagagtcgtcaccaagtccacccgaacctgggtgctgcccagctacaacaaccaccagtaccgagagatcaaaagcggctccgtcgacggaagcaacgccaacgcctactttggatacagcaccccctgggggtactttgactttaaccgcttccacagccactggagcccccgagactggcaaagactcatcaacaactactggggcttcagaccccggtccctcagagtcaaaatcttcaacattcaagtcaaagaggtcacggtgcaggactccaccaccaccatcgccaacaacctcacctccaccgtccaagtgtttacggacgacgactaccagctgccctacgtcgtcggcaacgggaccgagggatgcctgccggccttccctccgcaggtctttacgctgccgcagtacggttacgcgacgctgaaccgcgacaacacagaaaatcccaccgagaggagcagcttcttctgcctagagtactttcccagcaagatgctgagaacgggcaacaactttgagtttacctacaactttgaggaggtgcccttccactccagcttcgctcccagtcagaacctgttcaagctggccaacccgctggtggaccagtacttgtaccgcttcgtgagcacaaataacactggcggagtccagttcaacaagaacctggccgggagatacgccaacacctacaaaaactggttcccggggcccatgggccgaacccagggctggaacctgggctccggggtcaaccgcgccagtgtcagcgccttcgccacgaccaataggatggagctcgagggcgcgagttaccaggtgcccccgcagccgaacggcatgaccaacaacctccagggcagcaacacctatgccctggagaacactatgatcttcgggaagcaaggctcagagaaaacaaatgtggacattgaaaaggtcatgatcaccagcgagagcgagacgcagccggtgaaccgcgtggcgtacaacgtcggcgggcagatggccaccaacaaccagagctccaccactgcccccgcgaccggcacgtacaacctccaggaaatcgtgcccggcagcgtgtggatggagagggacgtgtacctccaaggacccatctgggccaagatcccagagacgggggcgcactttcacccctctccggccatgggcggattcggactcaaacacccaccgcccatgatgctcatcaagaacacgcctgtgcccggaaatatcaccagcttctcggacgtgcccgtcagcagcttcatcacccagtacagcaccgggcaggtcaccgtggagatggagtgggagctcaagaaggaaaactccaagaggtggaacccagagatccagtacacaaacaactacaacgacccccagtttgtggactttgccccggacagcaccggggaatacagaaccaccagacctatcggaacccgataccttacccgacccctttaacccattcatgtcgcataccctcaataaa

SEQ ID NO: 1731 - protein, 721 aa, synthetic construct
  REGION 1..721: note = Description of Artificial Sequence: Synthetic polypeptide
MSFVDHPPDWLEEVGEGLREFLGLEAGPPKPKPNQQHQDQARGLVLPGYNYLGPGNGLDRGEPVNRADEVAREHDISYNEQLEAGDNPYLKYNHADAEFQEKLADDTSFGGNLGKAVFQAKKRVLEPFGLVEEGAKTAPTGKRIDDHFPKRKKARTEEDSKPSTSSDAEAGPSGSQQLQIPAQPASSLGADTMSAGGGGPLGDNNQGADGVGNASGDWHCDSTWMGDRVVTKSTRTWVLPSYNNHQYREIKSGSVDGSNANAYFGYSTPWGYFDFNRFHSHWSPRDWQRLINNYWGFRPRSLRVKIFNIQVKEVTVQDSTTTIANNLTSTVQVFTDDDYQLPYVVGNGTEGCLPAFPPQVFTLPQYGYATLNRDNTENPTERSSFFCLEYFPSKMLRTGNNFEFTYNFEEVPFHSSFAPSQNLFKLANPLVDQYLYRFVSTNNTGGVQFNKNLAGRYANTYKNWFPGPMGRTQGWNLGSGVNRASVSAFATTNRMELEGASYQVPPQPNGMTNNLQGSNTYALENTMIFGKQGSEKTNVDIEKVMITSESETQPVNRVAYNVGGQMATNNQSSTTAPATGTYNLQEIVPGSVWMERDVYLQGPIWAKIPETGAHFHPSPAMGGFGLKHPPPMMLIKNTPVPGNITSFSDVPVSSFITQYSTGQVTVEMEWELKKENSKRWNPEIQYTNNYNDPQFVDFAPDSTGEYRTTRPIGTRYLTRPL

SEQ ID NO: 1732 - protein, 519 aa, synthetic construct
  REGION 1..519: note = Description of Artificial Sequence: Synthetic polypeptide
DGVGSSSGNWHCDSTWLGDRVITTSTRTWALPTYNNHLYKQISNGTSGGATNDNTYFGYSTPWGYFDFNRFHCHFSPRDWQRLINNNWGFRPKRLSFKLFNIQVKEVTQNEGTKTIANNLTSTIQVFTDSEYQLPYVLGSAHQGCLPPFPADVFMIPQYGYLTLNNGSQAVGRSSFYCLEYFPSQMLRTGNNFQFTYTFEDVPFHSSYAHSQSLDRLMNPLIDQYLYYLSRTQTTGGTANTQTLGFSQGGPNTMANQAKNWLPGPCYRQQRVSTTTGQNNNSNFAWTAGTKYHLNGRNSLANPGIAMATHKDDEERFFPSNGILIFGKQNAARDNADYSDVMLTSEEEIKTTNPVATEEYGIVADNLQQQNTAPQIGTVNSQGALPGMVWQNRDVYLQGPIWAKIPHTDGNFHPSPLMGGFGLKHPPPQILIKNTPVPADPPTTFNQSKLNSFITQYSTGQVSVEIEWELQKENSKRWNPEIQYTSNYYKSTSVDFAVNTEGVYSEPRPIGTRYLTRNL

SEQ ID NO: 1733 - protein, 738 aa, synthetic construct
  REGION 1..738: note = Description of Artificial Sequence: Synthetic polypeptide
MAADGYLPDWLEDNLSEGIREWWALQPGAPKPKANQQHQDNARGLVLPGYKYLGPGNGLDKGEPVNAADAAALEHDKAYDQQLKAGDNPYLKYNHADAEFQERLKEDTSFGGNLGRAVFQAKKRLLEPLGLVEEAAKTAPGKKRPVEPSPQRSPDSSTGIGKKGQQPARKRLNFGQTGDSESVPDPQPLGEPPAAPSGVGPNTMAAGGGAPMADNNEGADGVGSSSGNWHCDSTWLGDRVITTSTRTWALPTYNNHLYKQISNGTSGGATNDNTYFGYSTPWGYFDFNRFHCHFSPRDWQRLINNNWGFRPKRLSFKLFNIQVKEVTQNEGTKTIANNLTSTIQVFTDSEYQLPYVLGSAHQGCLPPFPADVFMIPQYGYLTLNNGSQAVGRSSFYCLEYFPSQMLRTGNNFQFTYTFEDVPFHSSYAHSQSLDRLMNPLIDQYLYYLSRTQTTGGTANTQTLGFSQGGPNTMANQAKNWLPGPCYRQQRVSTTTGQNNNSNFAWTAGTKYHLNGRNSLANPGIAMATHKDDEERFFPSNGILIFGKQNAARDNADYSDVMLTSEEEIKTTNPVATEEYGIVADNLQQQNTAPQIGTVNSQGALPGMVWQNRDVYLQGPIWAKIPHTDGNFHPSPLMGGFGLKHPPPQILIKNTPVPADPPTTFNQSKLNSFITQYSTGQVSVEIEWELQKENSKRWNPEIQYTSNYYKSTSVDFAVNTEGVYSEPRPIGTRYLTRNL

SEQ ID NO: 1734 - protein, 725 aa, synthetic construct
  REGION 1..725: note = Description of Artificial Sequence: Synthetic polypeptide
MAADGYLPDWLEDNLSEGIREWWALQPGAPKPKANQQHQDNARGLVLPGYKYLGPGNGLDKGEPVNAADAAALEHDKAYDQQLKAGDNPYLKYNHADAEFQERLKEDTSFGGNLGRAVFQAKKRLLEPLGLVEEAAKTAPTGKRIDDHFPKRKKARTEEDSKPSTSSDAEAGPSGSQQLQIPAQPASSLGADTMSAGGGGPLGDNNQGADGVGNASGDWHCDSTWMGDRVVTKSTRTWVLPSYNNHQYREIKSGSVDGSNANAYFGYSTPWGYFDFNRFHSHWSPRDWQRLINNYWGFRPRSLRVKIFNIQVKEVTVQDSTTTIANNLTSTVQVFTDDDYQLPYVVGNGTEGCLPAFPPQVFTLPQYGYATLNRDNTENPTERSSFFCLEYFPSKMLRTGNNFEFTYNFEEVPFHSSFAPSQNLFKLANPLVDQYLYRFVSTNNTGGVQFNKNLAGRYANTYKNWFPGPMGRTQGWNLGSGVNRASVSAFATTNRMELEGASYQVPPQPNGMTNNLQGSNTYALENTMIFNSQPANPGTTATYLEGNMLITSESETQPVNRVAYNVGGQMATNNQSSTTAPATGTYNLQEIVPGSVWMERDVYLQGPIWAKIPETGAHFHPSPAMGGFGLKHPPPMMLIKNTPVPGNITSFSDVPVSSFITQYSTGQVTVEMEWELKKENSKRWNPEIQYTNNYNDPQFVDFAPDSTGEYRTTRPIGTRYLTRPL

SEQ ID NO: 1735 - protein, 736 aa, synthetic construct
  REGION 1..736: note = Description of Artificial Sequence: Synthetic polypeptide
MAADGYLPDWLEDNLSEGIREWWALKPGAPKPKANQQKQDDGRGLVLPGYKYLGPFNGLDKGEPVNAADAAALEHDKAYDQQLQAGDNPYLRYNHADAEFQERLQEDTSFGGNLGRAVFQAKKRVLEPLGLVEEGAKTAPGKKRPVDQSPQEPDSSSGVGKSGKQPARKRLNFGQTGDSESVPDPQPLGEPPAAPTSLGSNTMASGGGAPMADNNEGADGVGNSSGNWHCDSQWLGDRVITTSTRTWALPTYNNHLYKQISSQSGASNDNHYFGYSTPWGYFDFNRFHCHFSPRDWQRLINNNWGFRPKKLSFKLFNIQVKEVTQNDGTTTIANNLTSTVQVFTDSEYQLPYVLGSAHQGCLPPFPADVFMVPQYGYLTLNNGSQAVGRSSFYCLEYFPSQMLRTGNNFQFSYTFEDVPFHSSYAHSQSLDRLMNPLIDQYLYYLNRTQGTTSGTTNQSRLLFSQAGPQSMSLQARNWLPGPCYRQQRLSKTANDNNNSNFPWTAASKYHLNGRDSLVNPGPAMASHKDDEEKFFPMHGNLIFGKEGTTASNAELDNVMITDEEEIRTTNPVATEQYGTVANNLQSSNTAPTTRTVNDQGALPGMVWQDRDVYLQGPIWAKIPHTDGHFHPSPLMGGFGLKHPPPQIMIKNTPVPANPPTTFSPAKFASFITQYSTGQVSVEIEWELQKENSKRWNPEIQYTSNYNKSVNVDFTVDTNGVYSEPRPIGTRYLTRNL

SEQ ID NO: 1736 - protein, 735 aa, synthetic construct
  REGION 1..735: note = Description of Artificial Sequence: Synthetic polypeptide
MSFVDHPPDWLEEVGEGLREFLGLEAGPPKPKPNQQHQDQARGLVLPGYNYLGPGNGLDRGEPVNRADEVAREHDISYNEQLEAGDNPYLKYNHADAEFQEKLADDTSFGGNLGKAVFQAKKRVLEPFGLVEEGAKTAPGKKRPVDQSPQEPDSSSGVGKSGKQPARKRLNFGQTGDSESVPDPQPLGEPPAAPTSLGSNTMASGGGAPMADNNEGADGVGNSSGNWHCDSQWLGDRVITTSTRTWALPTYNNHLYKQISSQSGASNDNHYFGYSTPWGYFDFNRFHCHFSPRDWQRLINNNWGFRPKKLSFKLFNIQVKEVTQNDGTTTIANNLTSTVQVFTDSEYQLPYVLGSAHQGCLPPFPADVFMVPQYGYLTLNNGSQAVGRSSFYCLEYFPSQMLRTGNNFQFSYTFEDVPFHSSYAHSQSLDRLMNPLIDQYLYYLNRTQGTTSGTTNQSRLLFSQAGPQSMSLQARNWLPGPCYRQQRLSKTANDNNNSNFPWTAASKYHLNGRDSLVNPGPAMASHKDDEEKFFPMHGNLIFGKEGTTASNAELDNVMITDEEEIRTTNPVATEQYGTVANNLQSSNTAPTTRTVNDQGALPGMVWQDRDVYLQGPIWAKIPHTDGHFHPSPLMGGFGLKHPPPQIMIKNTPVPANPPTTFSPAKFASFITQYSTGQVSVEIEWELQKENSKRWNPEIQYTSNYNKSVNVDFTVDTNGVYSEPRPIGTRYLTRPL

SEQ ID NO: 1737 - protein, 736 aa, synthetic construct
  REGION 1..736: note = Description of Artificial Sequence: Synthetic polypeptide
MAADGYLPDWLEDNLSEGIREWWALKPGAPKPKANQQKQDDGRGLVLPGYKYLGPFNGLDKGEPVNAADAAALEHDKAYDQQLQAGDNPYLRYNHADAEFQERLQEDTSFGGNLGRAVFQAKKRVLEPLGLVEEGAKTAPGKKRPVEPSPQRSPDSSTGIGKKGQQPARKRLNFGQTGDSESVPDPQPLGEPPAAPSGVGPNTMAAGGGAPMADNNEGADGVGSSSGNWHCDSTWLGDRVITTSTRTWALPTYNNHLYKQISSQSGASNDNHYFGYSTPWGYFDFNRFHCHFSPRDWQRLINNNWGFRPKRLSFKLFNIQVKEVTQNEGTKTIANNLTSTIQVFTDSEYQLPYVLGSAHQGCLPPFPADVFMIPQYGYLTLNNGSQAVGRSSFYCLEYFPSQMLRTGNNFQFTYTFEDVPFHSSYAHSQSLDRLMNPLIDQYLYYLSRTQTTGGTANTQTLGFSQGGPNTMANQAKNWLPGPCYRQQRVSTTTGQNNNSNFAWTAGTKYHLNGRNSLANPGIAMATHKDDEERFFPSNGILIFGKQGTTASNAELDNVMITDEEEIKTTNPVATEEYGIVADNLQQQNTAPQIGTVNSQGALPGMVWQNRDVYLQGPIWAKIPHTDGNFHPSPLMGGFGLKHPPPQILIKNTPVPADPPTTFNQSKLNSFITQYSTGQVSVEIEWELQKENSKRWNPEIQYTSNYNKSVNVDFTVDTNGVYSEPRPIGTRYLTRNL

SEQ ID NO: 1738 - protein, 736 aa, synthetic construct
  REGION 1..736: note = Description of Artificial Sequence: Synthetic polypeptide
MAADGYLPDWLEDNLSEGIREWWALKPGAPKPKANQQKQDDGRGLVLPGYKYLGPFNGLDKGEPVNAADAAALEHDKAYDQQLQAGDNPYLRYNHADAEFQERLQEDTSFGGNLGRAVFQAKKRVLEPLGLVEEGAKTAPGKKRPVEPSPQRSPDSSTGIGKKGQQPARKRLNFGQTGDSESVPDPQPLGEPPAAPSGVGPNTMAAGGGAPMADNNEGADGVGSSSGNWHCDSTWLGDRVITTSTRTWALPTYNNHLYKQISSQSGASNDNHYFGYSTPWGYFDFNRFHCHFSPRDWQRLINNNWGFRPKRLSFKLFNIQVKEVTQNEGTKTIANNLTSTIQVFTDSEYQLPYVLGSAHQGCLPPFPADVFMIPQYGYLTLNNGSQAVGRSSFYCLEYFPSQMLRTGNNFQFTYTFEDVPFHSSYAHSQSLDRLMNPLIDQYLYYLSRTQTTGGTANTQTLGFSQGGPNTMANQAKNWLPGPCYRQQRVSTTTGQNNNSNFAWTAGTKYHLNGRNSLANPGIAMATHKDDEERFFPSNGILIFGKQNAARDNADYSDVMLTSEEEIKTTNPVATEEYGIVADNLQQQNTAPQIGTVNSQGALPGMVWQNRDVYLQGPIWAKIPHTDGNFHPSPLMGGFGLKHPPPQILIKNTPVPADPPTTFNQSKLNSFITQYSTGQVSVEIEWELQKENSKRWNPEIQYTSNYYKSTSVDFAVNTEGVYSEPRPIGTRYLTRNL

SEQ ID NO: 1739 - protein, 736 aa, synthetic construct
  REGION 1..736: note = Description of Artificial Sequence: Synthetic polypeptide
MAADGYLPDWLEDNLSEGIREWWDLKPGAPKPKANQQKQDDGRGLVLPGYKYLGPFNGLDKGEPVNAADAAALEHDKAYDQQLKAGDNPYLRYNHADAEFQERLQEDTSFGGNLGRAVFQAKKRVLEPLGLVEEGAKTAPGKKRPVEQSPQEPDSSSGIGKTGQQPAKKRLNFGQTGDTESVPDPQPLGEPPAAPSGLGPNTMASGGGAPMADNNEGADGVGNSSGNWHCDSTWLGDRVITTSTRTWALPTYNNHLYKQISNGTSGGSTNDNTYFGYSTPWGYFDFNRFHCHFSPRDWQRLINNNWGFRPKRLNFKLFNIQVKEVTTNEGTKTIANNLTSTVQVFTDSEYQLPYVLGSAHQGCLPPFPADVFMVPQYGYLTLNNGSQALGRSSFYCLEYFPSQMLRTGNNFQFSYTFEDVPFHSSYAHSQSLDRLMNPLIDQYLYYLVRTQTTGTGGTQTLAFSQAGPSSMASQARNWVPGPSYRQQRVSTTTNQNNNSNFAWTGAAKFKLNGRDSLMNPGVAMASHKDDEDRFFPSSGVLIFGKQGAGNDGVDYSQVLITDEEEIKATNPVATEEYGAVAINNQAANTQAQTGLVHNQGVIPGMVWQNRDVYLQGPIWAKIPHTDGNFHPSPLMGGFGLKHPPPQILIKNTPVPADPPLTFNQAKLNSFITQYSTGQVSVEIEWELQKENSKRWNPEIQYTSNYYKSTNVDFAVNTEGVYSEPRPIGTRYLTRNL

SEQ ID NO: 1740 - DNA, 3695 bp, synthetic construct
  misc_feature 1..3695: note = Description of Artificial Sequence: Synthetic polynucleotide
  source 1..3695: mol_type = other DNA
ctctttgcgcttgcgttttcccttgtccagatagcccagtagctgacattcatccggggtcagcaccgtttctgcggactggctttctacgtgaaaaggatctaggtgaagatcctttttgataatctcatgcctgacatttatattccccagaacatcaggttaatggcgtttttgatgtcattttcgcggtggctgagatcagccacttcttccccgataacggagaccggcacactggccatatcggtggtcatcatgcgccagctttcatccccgatatgcaccaccgggtaaagttcacgggagactttatctgacagcagacgtgcactggccagggggatcaccatccgtcgccccggcgtgtcaataatatcactctgtacatccacaaacagacgataacggctctctcttttataggtgtaaaccttaaactgccgtacgtataggctgcgcaactgttgggaagggcgatcggtgcgggcctcttcgctattacgccagctggcgaaagggggatgtgctgcaaggcgattaagttgggtaacgccagggttttcccagtcacgacgttgtaaaacgacggccagtgaattgtaatacgactcactatagggcgaattgaatttagcggccgcgaattcgcccttatgatatctggtgggaggagggcaagatgacggccaaggtcgtggagtccgccaaggccattctcggcggcagcaaagtgcgcgtggaccaaaagtgcaagtcgtccgcccagatcgatcccactcccgtcattgtcacctccaacaccaacatgtgcgccgtgattgacgggaacagcaccaccttcgagcaccagcagccgttgcaggaccggatgttcaaatttgaacttacccgccgtctggagcatgactttggcaaggtgacaaagcaggaagtcaaagagttcttccgctgggcgcaggatcacgtgaccgaggtggcgcatgagttccacgtcagaaagggtggagccaacaagagacccgcccccgatgacgctgataaaagcgagcccaagcgggcctgcccctcagtcgcagatccatcgacgtcagacgcggaaggagctccggtggactttgccgacaggtaccaaaacaaatgttctcgtcacgcgggcatgcttcagatgctgtttccctgcaagacatgcgagagaatgaatcagaatttcaacatttgcttcacgcacgggaccagggactgttcggagtgcttccccggcgtgtcagaatctcaaccggtcgtcagaaaaaggacgtatcggaaactctgtgccattcatcatctgctggggagggctcccgagattgcttgctcggcctgcgatctggtcaacgtggacctggatgactgtgtctctgagcaataaatgacttaaaccaggtatggctgccgatggttatcttccagattggctcgaggacaacctctctgagggcattcgcgagtggtgggacttgaaacctggagccccgaaacccaaagccaaccagcaaaagcaggacgacggccggggtctggtgcttcctggctacaagtacctcggacccttcaacggactcgacaagggggagcccgtcaacgcggcggacgcagcggccctcgagcacgacaaggcctacgaccagcagctcaaagcgggtgacaatccgtacctgcggtataaccacgccgacgccgagtttcaggagcgtctgcaagaagatacgtcttttgggggcaacctcgggcgagcagtcttccaggccaagaagcgggttctcgaacctctcggtctggttgaggaaggcgctaagacggctcctggaaagaagagaccggtagagcagtcaccccaagaaccagactcctcatcgggcatcggcaagacaggccagcagcccgctaaaaagagactcaattttggtcagactggcgacacagagtcagtccccgacccacaacctctcggagaacctccagcagccccctcaggtctgggacctaatacaatggcttcaggcggtggcgctccaatggcagacaataacgaaggcgccgacggagtgggtaattcctcgggaaattggcattgcgattccacatggctgggggacagagtcatcaccaccagcacccgaacctgggccctgcccacctacaacaaccacctctacaagcaaatctccaacggcacctcgggaggaagcaccaacgacaacacctactttggctacagcaccccctgggggtattttgacttcaacagattccactgccacttttcaccacgtgactggcagcgactcatcaacaacaattggggattccggcccaagagactcaacttcaagctcttcaacatccaggtcaaggaagtcacgacgaacgaaggcaccaagaccatcgccaataatctcaccagcaccgtgcaggtctttacggactcggagtaccagctaccgtacgtgctaggatcagctcaccagggatgtctgcctccgttcccggcggacgtcttcatggttcctcagtacggttatctaactctgaacaatggcagccaggccctgggacgttcctccttctactgcctggagtatttcccatcgcagatgctgagaaccggcaacaactttcagttcagctacaccttcgaggacgtgcctttccacagcagctacgcgcacagccaaagcctggacaggctgatgaatcccctcatcgaccagtacctgtattacctggtcagaacgcagacaaccgggactggagggacgcagactctggcattcagccaagcaggccctagctcaatggccagccaggctagaaactgggtgcccggaccgagctaccggcagcagcgcgtctccacgacaaccaaccagaacaacaacagcaactttgcctggacgggagctgccaaatttaaactgaacggccgagactctctaatgaaccccggcgtggccatggcttcacacaaggatgacgaggaccgcttcttcccttctagcggggtcctgattttcggcaagcaaggagccgggaatgatggagtggattacagccaagtgctgattacagatgaggaagaaatcaaggctaccaaccccgtggcaacagaggaatatggagcagtggccatcaacaaccaggccgctaatacgcaggcgcagaccggactcgtgcacaaccagggggtgattcccggcatggtgtggcagaacagagacgtgtacctgcagggtcccatctgggccaaaattcctcacacggacggcaactttcacccgtctcccctgatgggcggctttggactgaagcacccgcctcctcaaattctcatcaagaacacaccggttccagcggacccgccgcttaccttcaaccaggccaagctgaactctttcatcacgcagtacagcaccggacaggtcagcgtggaaatcgagtgggagctgcagaaagaaaacagcaaacgctggaatccagagattcagtacacttccaactactacaaatctacaaatgtggactttgctgtcaacacggaaggagtgtatagcgagcctcgccccattggcacccgttacctcacccgcaacctgtaattgcctgttaatcaataaaccggttaattcgtttcagtaaggaagaattcgtttaaa

SEQ ID NO: 1741 - protein, 736 aa, synthetic construct; identical to SEQ ID NO: 507
  REGION 1..736: note = Description of Artificial Sequence: Synthetic polypeptide

SEQ ID NO: 1742 - protein, 736 aa, synthetic construct
  REGION 1..736: note = Description of Artificial Sequence: Synthetic polypeptide
MAADGYLPDWLEDNLSEGIREWWDLKPGAPKPKANQQKQDDGRGLVLPGYKYLGPFNGLDKGEPVNAADAAALEHDKAYDQQLKAGDNPYLRYNHADAEFQERLQEDTSFGGNLGRAVFQAKKRVLEPLGLVEEGAKTAPGKKRPVEQSPQEPDSSSGIGKTGQQPAKKRLNFGQTGDTESVPDPQPLGEPPAAPSGLGPNTMASGGGAPMADNNEGADGVGNSSGNWHCDSTWLGDRVITTSTRTWALPTYNNHLYKQISNGTSGGSTNDNTYFGYSTPWGYFDFNRFHCHFSPRDWQRLINNNWGFRPKRLNFKLFNIQVKEVTTNEGTKTIANNLTSTVQVFTDSEYQLPYVLGSAHQGCLPPFPADVFMVPQYGYLTLNNGSQALGRSSFYCLEYFPSQMLRTGNNFQFSYTFEDVPFHSSYAHSQSLDRLMNPLIDQYLYYLVRTQTTGTGGTQTLAFSQAGPSNMASQARNWVPGPSYRQQRVSTTTNQNNNSNFAWTGAAKFKLNGRDSLMNPGVAMASHKDDEDRFFPSSGVLIFGKQGAGNDGVDYSQVLITDEEEIKATNPVATEEYGAVAINNQAANTQAQTGLVHNQGVIPGMVWQNRDVYLQGPIWAKIPHTDGNFHPSPLMGGFGLKHPPPQILIKNTPVPADPPLTFNQAKLNSFITQYSTGQVSVEIEWELQKENSKRWNPEIQYTSNYYKSTNVDFAVNTEGVYSEPRPIGTRYLTRNL

SEQ ID NO: 1743 - protein, 738 aa, synthetic construct; identical to SEQ ID NO: 1437
  REGION 1..738: note = Description of Artificial Sequence: Synthetic polypeptide

SEQ ID NO: 1744 - protein, 736 aa, synthetic construct
  REGION 1..736: note = Description of Artificial Sequence: Synthetic polypeptide
MAADGYLPDWLEDNLSEGIREWWALQPGAPKPKANQQHQDNARGLVLPGYKYLGPGNGLDKGEPVNAADAAALEHDKAYDQQLKAGDNPYLKYNHADAEFQERLKEDTSFGGNLGRAVFQAKKRILEPLGLVEEAAKTAPGKKRPVDQSPQEPDSSSGVGKSGKQPARKRLNFGQTGDSESVPDPQPLGEPPAAPTSLGSNTMASGGGAPMADNNEGADGVGNSSGNWHCDSQWLGDRVITTSTRTWALPTYNNHLYKQISSQSGASNDNHYFGYSTPWGYFDFNRFHCHFSPRDWQRLINNNWGFRPKKLSFKLFNIQVKEVTQNDGTTTIANNLTSTVQVFTDSEYQLPYVLGSAHQGCLPPFPADVFMVPQYGYLTLNNGSQAVGRSSFYCLEYFPSQMLRTGNNFQFSYTFEDVPFHSSYAHSQSLDRLMNPLIDQYLYYLNRTQGTTSGTTNQSRLLFSQAGPQSMSLQARNWLPGPCYRQQRLSKTANDNNNSNFPWTAASKYHLNGRDSLVNPGPAMASHKDDEEKFFPMHGNLIFGKEGTTASNAELDNVMITDEEEIRTTNPVATEQYGTVANNLQSSNTAPTTRTVNDQGALPGMVWQDRDVYLQGPIWAKIPHTDGHFHPSPLMGGFGLKHPPPQIMIKNTPVPANPPTTFSPAKFASFITQYSTGQVSVEIEWELQKENSKRWNPEIQYTSNYNKSVNVDFTVDTNGVYSEPRPIGTRYLTRPL

SEQ ID NO: 1745 - protein, 736 aa, synthetic construct
  REGION 1..736: note = Description of Artificial Sequence: Synthetic polypeptide
MAADGYLPDWLEDNLSEGIREWWALQPGAPKPKANQQHQDNARGLVLPGYKYLGPGNGLDKGEPVNAADAAALEHDKAYDQQLKAGDNPYLKYNHADAEFQERLKEDTSFGGNLGRAVFQAKKRLLEPLGLVEEAAKTAPGKKRPVDQSPQEPDSSSGVGKSGKQPARKRLNFGQTGDSESVPDPQPLGEPPAAPTSLGSNTMASGGGAPMADNNEGADGVGNSSGNWHCDSQWLGDRVITTSTRTWALPTYNNHLYKQISSQSGASNDNHYFGYSTPWGYFDFNRFHCHFSPRDWQRLINNNWGFRPKKLSFKLFNIQVKEVTQNDGTTTIANNLTSTVQVFTDSEYQLPYVLGSAHQGCLPPFPADVFMVPQYGYLTLNNGSQAVGRSSFYCLEYFPSQMLRTGNNFQFSYTFEDVPFHSSYAHSQSLDRLMNPLIDQYLYYLNRTQGTTSGTTNQSRLLFSQAGPQSMSLQARNWLPGPCYRQQRLSKVANDNNNSNFPWTAASKYHLNGRDSLVNPGPAMASHKDDEEKFFPMHGNLIFGKEGTTASNAELDNVMITDEEEIRTTNPVATEQYGTVANNLQSSNTAPTTRTVNDQGALPGMVWQDRDVYLQGPIWAKIPHTDGHFHPSPLMGGFGLKHPPPQIMIKNTPVPANPPTTFVPAKFASFITQYSTGQVSVEIEWELQKENSKRWNPEIQYTSNYNKSVNVDFTVDTNGVYSEPRPIGTRYLTRPL

SEQ ID NO: 1746 - protein, 736 aa, synthetic construct
  REGION 1..736: note = Description of Artificial Sequence: Synthetic polypeptide
  VARIANT 168: note = Xaa can be any naturally occurring amino acid
  VARIANT 204: note = Xaa can be any naturally occurring amino acid
  VARIANT 266: note = Xaa can be any naturally occurring amino acid
  VARIANT 311: note = Xaa can be any naturally occurring amino acid
  VARIANT 411: note = Xaa can be any naturally occurring amino acid
  VARIANT 460: note = Xaa can be any naturally occurring amino acid
  VARIANT 493: note = Xaa can be any naturally occurring amino acid
  VARIANT 562: note = Xaa can be any naturally occurring amino acid
  VARIANT 576: note = Xaa can be any naturally occurring amino acid
  VARIANT 587: note = Xaa can be any naturally occurring amino acid
  VARIANT 609: note = Xaa can be any naturally occurring amino acid
MAADGYLPDWLEDNLSEGIREWWDLKPGAPKPKANQQKQDDGRGLVLPGYKYLGPFNGLDKGEPVNAADAAALEHDKAYDQQLKAGDNPYLRYNHADAEFQERLQEDTSFGGNLGRAVFQAKKRVLEPLGLVEEGAKTAPGKKRPVEQSPQEPDSSSGIGKKGQQPAXKRLNFGQTGDSESVPDPQPLGEPPAAPSGVGSNTMXAGGGAPMADNNEGADGVGNASGNWHCDSTWLGDRVITTSTRTWALPTYNNHLYKQISSQSGXSTNDNTYFGYSTPWGYFDFNRFHCHFSPRDWQRLINNNWGFRPKXLNFKLFNIQVKEVTTNDGTTTIANNLTSTVQVFTDSEYQLPYVLGSAHQGCLPPFPADVFMIPQYGYLTLNNGSQAVGRSSFYCLEYFPSQMLRTGNNFXFSYTFEDVPFHSSYAHSQSLDRLMNPLIDQYLYYLSRTQTTSGTAGNRXLQFSQAGPSSMANQAKNWLPGPCYRQQRVSKTXNQNNNSNFAWTGATKYHLNGRDSLVNPGPAMATHKDDEDKFFPMSGVLIFGKQGAGNSNVDLDNVMITXEEEIKTTNPVATEXYGTVATNLQSXNTAPATGTVNSQGALPGMVWQXRDVYLQGPIWAKIPHTDGHFHPSPLMGGFGLKHPPPQILIKNTPVPANPPTTFSPAKFASFITQYSTGQVSVEIEWELQKENSKRWNPEIQYTSNYNKSTNVDFAVDTNGVYSEPRPIGTRYLTRNL

SEQ ID NO: 1747 - DNA, 2208 bp, synthetic construct
  misc_feature 1..2208: note = Description of Artificial Sequence: Synthetic polynucleotide
  variation 502..504: note = n is a, c, g, or t
  variation 610..612: note = n is a, c, g, or t
  variation 796..798: note = n is a, c, g, or t
  variation 931..933: note = n is a, c, g, or t
  variation 1231..1233: note = n is a, c, g, or t
  variation 1378..1380: note = n is a, c, g, or t
  variation 1477..1479: note = n is a, c, g, or t
  variation 1684..1686: note = n is a, c, g, or t
  variation 1726..1728: note = n is a, c, g, or t
  variation 1759..1761: note = n is a, c, g, or t
  variation 1825..1827: note = n is a, c, g, or t
  source 1..2208: mol_type = other DNA
atggctgccgatggttatcttccagattggctcgaggacaacctctctgagggcattcgcgagtggtgggacttgaaacctggagccccgaaacccaaagccaaccagcaaaagcaggacgacggccggggtctggtgcttcctggctacaagtacctcggacccttcaacggactcgacaagggggagcccgtcaacgcggcggacgcagcggccctcgagcacgacaaggcctacgaccagcagctcaaagcgggtgacaatccgtacctgcggtataaccacgccgacgccgagtttcaggagcgtctgcaagaagatacgtcttttgggggcaacctcgggcgagcagtcttccaggccaagaagcgggttctcgaacctctcggtctggttgaggaaggcgctaagacggctcctggaaagaagagaccggtagagcaatcaccccaggaaccagactcctcttcgggcatcggcaagaaaggccagcagcccgcgnnnaagagactcaactttgggcagacaggcgactcagagtcagtgcccgaccctcaaccactcggagaaccccccgcagccccctctggtgtgggatctaatacaatgnnngcaggcggtggcgctccaatggcagacaataacgaaggcgccgacggagtgggtaacgcctcaggaaattggcattgcgattccacatggctgggcgacagagtcatcaccaccagcacccgaacctgggccctccccacctacaacaaccacctctacaagcaaatctccagccaatcgggannnagcaccaacgacaacacctacttcggctacagcaccccctgggggtattttgactttaacagattccactgccacttctcaccacgtgactggcagcgactcatcaacaacaactggggattccggcccaagnnnctcaacttcaagctcttcaacatccaggtcaaggaggtcacgacgaatgatggcaccacgaccatcgccaataaccttaccagcacggttcaggtctttacggactcggaataccagctcccgtacgtcctcggctctgcgcaccagggctgcctgcctccgttcccggcggacgtcttcatgattcctcagtacgggtacctgactctgaacaatggcagtcaggccgtgggccgttcctccttctactgcctggagtactttccttctcaaatgctgagaacgggcaacaactttnnnttcagctacacgtttgaggacgtgccttttcacagcagctacgcgcacagccaaagcctggaccggctgatgaaccccctcatcgaccagtacctgtactacctgtctcggactcagaccacgagtggtaccgcaggaaatcggnnnttgcaattttctcaggccgggcctagtagcatggcgaatcaggccaaaaactggctacccgggccctgctaccggcagcaacgcgtctccaagacannnaatcaaaataacaacagcaactttgcctggaccggtgccaccaagtatcatctgaatggcagagactctctggtaaatcccggtcccgctatggcaacccacaaggacgacgaagacaaattttttccgatgagcggagtcttaatatttgggaaacagggagctggaaatagcaacgtggaccttgacaacgttatgataaccnnngaggaagaaattaaaaccaccaacccagtggccacagaannntacggcacggtggccactaacctgcaatcgnnnaacaccgctcctgctacagggaccgtcaacagtcaaggagccttacctggcatggtctggcagnnncgggacgtgtacctgcagggtcctatctgggccaagattcctcacacggacggacactttcatccctcgccgctgatgggaggctttggactgaaacacccgcctcctcagatcctgattaagaatacacctgttcccgcgaatcctccaactaccttcagtccagctaagtttgcgtcgttcatcacgcagtacagcaccggacaggtcagcgtggaaattgaatgggagctgcagaaagaaaacagcaaacgctggaacccagagattcaatacacttccaactacaacaaatctacaaatgtggactttgctgttgacacaaatggcgtttattctgagcctcgccccatcggcacccgttacctcacccgtaatctg

SEQ ID NO: 1748 - protein, 737 aa, synthetic construct
  REGION 1..737: note = Description of Artificial Sequence: Synthetic polypeptide
  VARIANT 157: note = Xaa can be any naturally occurring amino acid
  VARIANT 168: note = Xaa can be any naturally occurring amino acid
  VARIANT 262..263: note = Xaa can be any naturally occurring amino acid
  VARIANT 312: note = Xaa can be any naturally occurring amino acid
  VARIANT 412: note = Xaa can be any naturally occurring amino acid
  VARIANT 460..461: note = Xaa can be any naturally occurring amino acid
  VARIANT 552: note = Xaa can be any naturally occurring amino acid
  VARIANT 556..557: note = Xaa can be any naturally occurring amino acid
  VARIANT 563: note = Xaa can be any naturally occurring amino acid
  VARIANT 580: note = Xaa can be any naturally occurring amino acid
  VARIANT 588: note = Xaa can be any naturally occurring amino acid
  VARIANT 664: note = Xaa can be any naturally occurring amino acid
MAADGYLPDWLEDNLSEGIREWWDLKPGAPKPKANQQKQDDGRGLVLPGYKYLGPFNGLDKGEPVNAADAAALEHDKAYDQQLKAGDNPYLRYNHADAEFQERLQEDTSFGGNLGRAVFQAKKRVLEPLGLVEEGAKTAPGKKRPVEQSPQEPDSSXGIGKKGQQPAXKRLNFGQTGDSESVPDPQPLGEPPAAPSGVGSNTMAAGGGAPMADNNEGADGVGNASGNWHCDSTWLGDRVITTSTRTWALPTYNNHLYKQISXXQSGGSTNDNTYFGYSTPWGYFDFNRFHCHFSPRDWQRLINNNWGFRPKXLNFKLFNIQVKEVTTNDGTTTIANNLTSTVQVFTDSEYQLPYVLGSAHQGCLPPFPADVFMIPQYGYLTLNNGSQAVGRSSFYCLEYFPSQMLRTGNNFXFSYTFEDVPFHSSYAHSQSLDRLMNPLIDQYLYYLSRTQTTGGTAGNXXLQFSQAGPSSMANQAKNWLPGPCYRQQRVSKTTNQNNNSNFAWTGATKYHLNGRDSLVNPGVAMATHKDDEDRFFPSSGVLIFGKQGAGNXNVDXXNVMITXEEEIKTTNPVATEEYGXVATNLQSXNTAPQTGTVNSQGALPGMVWQNRDVYLQGPIWAKIPHTDGNFHPSPLMGGFGLKHPPPQILIKNTPVPANPPTTFXPAKFASFITQYSTGQVSVEIEWELQKENSKRWNPEIQYTSNYNKSTNVDFAVDTEGVYSEPRPIGTRYLTRNL

SEQ ID NO: 1749 - DNA, 2211 bp, synthetic construct
  misc_feature 1..2211: note = Description of Artificial Sequence: Synthetic polynucleotide
  variation 469..471: note = n is a, c, g, or t
  variation 502..504: note = n is a, c, g, or t
  variation 784..789: note = n is a, c, g, or t
  variation 934..936: note = n is a, c, g, or t
  variation 1234..1236: note = n is a, c, g, or t
  variation 1378..1383: note = n is a, c, g, or t
  variation 1654..1656: note = n is a, c, g, or t
  variation 1666..1671: note = n is a, c, g, or t
  variation 1687..1689: note = n is a, c, g, or t
  variation 1738..1740: note = n is a, c, g, or t
  variation 1762..1764: note = n is a, c, g, or t
  variation 1990..1992: note = n is a, c, g, or t
  source 1..2211: mol_type = other DNA
atggctgccgatggttatcttccagattggctcgaggacaacctctctgagggcattcgcgagtggtgggacttgaaacctggagccccgaaacccaaagccaaccagcaaaagcaggacgacggccggggtctggtgcttcctggctacaagtacctcggacccttcaacggactcgacaagggggagcccgtcaacgcggcggacgcagcggccctcgagcacgacaaggcctacgaccagcagctcaaagcgggtgacaatccgtacctgcggtataaccacgccgacgccgagtttcaggagcgtctgcaagaagatacgtcttttgggggcaacctcgggcgagcagtcttccaggccaagaagcgggttctcgaacctctcggtctggttgaggaaggcgctaagacggctcctggaaagaagagaccggtagagcaatcaccccaggaaccagactcctctnnnggcatcggcaagaaaggccagcagcccgcgnnnaagagactcaactttgggcagactggcgactcagagtcagtgcccgaccctcaaccactcggagaaccccccgcagccccctctggtgtgggatctaatacaatggctgcaggcggtggcgctccaatggcagacaataacgaaggcgccgacggagtgggtaatgcctcaggaaattggcattgcgattccacatggctgggcgacagagtcatcaccaccagcacccgaacctgggccctccccacctacaacaaccacctctacaagcaaatctccnnnnnncaatcgggaggaagcaccaacgacaacacctacttcggctacagcaccccctgggggtattttgactttaacagattccactgccacttctcaccacgtgactggcagcgactcatcaacaacaactggggattccggcccaagnnnctcaacttcaagctcttcaacatccaggtcaaggaggtcacgacgaatgatggcaccacgaccatcgccaataaccttaccagcacggttcaggtctttacggactcggaataccagctcccgtacgtcctcggctctgcgcaccagggctgcctgcctccgttcccggcggacgtcttcatgattcctcagtacgggtacctgactctgaacaatggcagtcaggccgtgggccgttcctccttctactgcctggagtactttccttctcaaatgctgagaacgggcaacaactttnnnttcagctacacgtttgaggacgtgccttttcacagcagctacgcgcacagccaaagcctggaccggctgatgaaccccctcatcgaccagtacctgtactacctgtctcggactcagaccacgggaggtaccgcaggaaatnnnnnnttgcaattttctcaggccgggcctagtagcatggcgaatcaggccaaaaactggctacccgggccctgctaccggcagcaacgcgtctccaagacaacgaatcaaaataacaacagcaactttgcctggaccggtgccaccaagtatcatctgaatggcagagactctctggtaaatcccggtgtcgctatggcaacccacaaggacgacgaagaccgattttttccgtccagcggagtcttaatatttgggaaacagggagctggaaatnnnaacgtggacnnnnnnaacgttatgataaccnnngaggaagaaattaaaaccaccaacccagtggccacagaagagtacggcnnngtggccactaacctgcaatcgnnnaacaccgctcctcaaacagggaccgtcaacagtcaaggagccttacctggcatggtctggcagaaccgggacgtgtacctgcagggtcctatctgggccaagattcctcacacggacggaaactttcatccctcgccgctgatgggaggctttggactgaaacacccgcctcctcagatcctgattaagaatacacctgttcccgcgaatcctccaactaccttcnnnccagctaagtttgcgtcgttcatcacgcagtacagcaccggacaggtcagcgtggaaattgaatgggagctgcagaaagaaaacagcaaacgctggaacccagagattcaatacacttccaactacaacaaatctacaaatgtggactttgctgttgacacagaaggcgtttattctgagcctcgccccatcggcacccgttacctcacccgtaatctg

SEQ ID NO: 1750 - protein, 738 aa, synthetic construct
  REGION 1..738: note = Description of Artificial Sequence: Synthetic polypeptide
  VARIANT 158: note = Xaa can be any naturally occurring amino acid
  VARIANT 169: note = Xaa can be any naturally occurring amino acid
  VARIANT 564: note = Xaa can be any naturally occurring amino acid
MAADGYLPDWLEDNLSEGIREWWDLKPGAPKPKANQQKQDDGRGLVLPGYKYLGPFNGLDKGEPVNAADAAALEHDKAYDQQLKAGDNPYLRYNHADAEFQERLQEDTSFGGNLGRAVFQAKKRVLEPLGLVEEGAKTAPGKKRPVEQSPQREPDSSXGIGKKGQQPAXKRLNFGQTGDSESVPDPQPLGEPPAAPSGVGSNTMAAGGGAPMADNNEGADGVGNSSGNWHCDSTWLGDRVITTSTRTWALPTYNNHLYKQISNGTSGGSTNDNTYFGYSTPWGYFDFNRFHCHFSPRDWQRLINNNWGFRPKRLNFKLFNIQVKEVTTNEGTKTIANNLTSTVQVFTDSEYQLPYVLGSAHQGCLPPFPADVFMIPQYGYLTLNNGSQAVGRSSFYCLEYFPSQMLRTGNNFQFSYTFEDVPFHSSYAHSQSLDRLMNPLIDQYLYYLSRTQTTGGTAGTQTLQFSQAGPSSMANQAKNWLPGPCYRQQRVSTTTNQNNNSNFAWTGATKYHLNGRDSLVNPGVAMATHKDDEDRFFPSSGVLIFGKQGAGNDNVDYSNVMITXEEEIKTTNPVATEEYGVVATNLQSANTAPQTGTVNSQGALPGMVWQNRDVYLQGPIWAKIPHTDGNFHPSPLMGGFGLKHPPPQILIKNTPVPADPPTTFNQAKLNSFITQYSTGQVSVEIEWELQKENSKRWNPEIQYTSNYYKSTNVDFAVNTEGVYSEPRPIGTRYLTRNL

SEQ ID NO: 1751 - DNA, 2214 bp, synthetic construct
  misc_feature 1..2214: note = Description of Artificial Sequence: Synthetic polynucleotide
  variation 472..474: note = n is a, c, g, or t
  variation 505..507: note = n is a, c, g, or t
  variation 1690..1692: note = n is a, c, g, or t
  source 1..2214: mol_type = other DNA
atggctgccgatggttatcttccagattggctcgaggacaacctctctgagggcattcgcgagtggtgggacctgaaacctggagccccgaaacccaaagccaaccagcaaaagcaggacgacggccggggtctggtgcttcctggctacaagtacctcggacccttcaacggactcgacaagggggagcccgtcaacgcggcggacgcagcggccctcgagcacgacaaggcctacgaccagcagctcaaagcgggtgacaatccgtacctgcggtataatcacgccgacgccgagtttcaggagcgtctgcaagaagatacgtcttttgggggcaacctcgggcgagcagtcttccaggccaagaagcgggttctcgaacctctcggtctggttgaggaaggcgctaagacggctcctggaaagaagagaccggtagagcagtcaccacagcgtgagcccgactcctccnnnggcatcggcaagaaaggccagcagcccgccnnnaagagactcaatttcggtcagactggcgactcagagtcagtccccgaccctcaacctctcggagaacctccagcagcgccctctggtgtgggatctaatacaatggctgcaggcggtggcgcaccaatggcagacaataacgaaggtgccgacggagtgggtaattcctcgggaaattggcattgcgattccacatggctgggcgacagagtcatcaccaccagcacccgaacctgggccctgcccacctacaacaaccacctctacaagcaaatctccaacgggacctcgggaggcagcaccaacgacaacacctactttggctacagcaccccctgggggtattttgactttaacagattccactgccacttctcaccacgtgactggcagcgactcatcaacaacaactggggattccggcccaagagactcaacttcaagctcttcaacatccaggtcaaagaggtcacgacgaatgaaggcaccaagaccatcgccaataacctcaccagcaccgtccaggtgtttacggactcggaataccagctgccgtacgtcctcggctctgcccaccagggctgcctgcctccgttcccggcggacgtcttcatgattcctcagtacggctacctgactctcaacaacggtagtcaggccgtgggacgttcctccttctactgcctggagtacttcccctctcagatgctgagaacgggcaacaactttcaattcagctacactttcgaggacgtgcctttccacagcagctacgcgcacagccagagtttggacaggctgatgaatcctctcatcgaccagtacctgtactacctgtcaagaacccagactacgggaggcacagcgggaacccagacgttgcagttttctcaggccgggcctagcagcatggcgaatcaggccaaaaactggctgcctggaccctgctacagacagcagcgcgtctccacgacaacgaatcaaaacaacaacagcaactttgcctggactggtgccaccaagtatcatctgaacggcagagactctctggtgaatccgggcgtcgccatggcaacccacaaggacgacgaggaccgcttcttcccatccagcggcgtcctcatatttggcaagcagggagctggaaatgacaacgtggactatagcaacgtgatgataaccnnngaggaagaaatcaagaccaccaaccccgtggccacagaagagtatggcgtggtggctactaacctacagtcggcaaacaccgctcctcaaacggggaccgtcaacagccagggagccttacctggcatggtctggcagaaccgggacgtgtacctgcagggtcctatttgggccaagattcctcacacagatggcaactttcacccgtctcctttaatgggcggctttggacttaaacatccgcctcctcagatcctcatcaaaaacactcctgttcctgcggatcctccaacaacgttcaaccaggccaagctgaattctttcatcacgcagtacagcaccggacaagtcagcgtggagatcgagtgggagctgcagaaggagaacagcaagcgctggaacccagagattcagtatacttccaactactacaaatctacaaatgtggactttgctgttaatactgagggtgtttactctgagcctcgccccattggcactcgttacctcacccgtaatctg

SEQ ID NO: 1752 - protein, 738 aa, synthetic construct
  REGION 1..738: note = Description of Artificial Sequence: Synthetic polypeptide
  VARIANT 158: note = Xaa can be any naturally occurring amino acid
  VARIANT 169: note = Xaa can be any naturally occurring amino acid
  VARIANT 315: note = Xaa can be any naturally occurring amino acid
  VARIANT 413: note = Xaa can be any naturally occurring amino acid
  VARIANT 472: note = Xaa can be any naturally occurring amino acid
  VARIANT 534: note = Xaa can be any naturally occurring amino acid
  VARIANT 542: note = Xaa can be any naturally occurring amino acid
  VARIANT 595: note = Xaa can be any naturally occurring amino acid
MAADGYLPDWLEDNLSEGIREWWDLKPGAPKPKANQQKQDDGRGLVLPGYKYLGPFNGLDKGEPVNAADAAALEHDKAYDQQLKAGDNPYLRYNHADAEFQERLQEDTSFGGNLGRAVFQAKKRVLEPLGLVEEGAKTAPGKKRPVEQSPQREPDSSXGIGKKGQQPAXKRLNFGQTGDSESVPDPQPLGEPPAAPSGVGSNTMAAGGGAPMADNNEGADGVGSSSGNWHCDSTWLGDRVITTSTRTWALPTYNNHLYKQISNGTSGGSTNDNTYFGYSTPWGYFDFNRFHCHFSPRDWQRLINNNWGFRPKRLXFKLFNIQVKEVTQNEGTKTIANNLTSTIQVFTDSEYQLPYVLGSAHQGCLPPFPADVFMIPQYGYLTLNNGSQAVGRSSFYCLEYFPSQMLRTGNNFXFSYTFEDVPFHSSYAHSQSLDRLMNPLIDQYLYYLSRTQTTGGTAGTQTLQFSQAGPSXMANQAKNWLPGPCYRQQRVSTTTSQNNNSNFAWTGATKYHLNGRDSLVNPGVAMATHKDDEXRFFPSSGXLIFGKQGAGKDNVDYSNVMLTSEEEIKTTNPVATEEYGVVADNLQQQNTAPQXGTVNSQGALPGMVWQNRDVYLQGPIWAKIPHTDGNFHPSPLMGGFGLKHPPPQILIKNTPVPADPPTTFNQAKLNSFITQYSTGQVSVEIEWELQKENSKRWNPEIQYTSNYYKSTNVDFAVNTEGVYSEPRPIGTRYLTRNL

SEQ ID NO: 1753 - DNA, 2214 bp, synthetic construct
  misc_feature 1..2214: note = Description of Artificial Sequence: Synthetic polynucleotide
  variation 472..474: note = n is a, c, g, or t
  variation 505..507: note = n is a, c, g, or t
  variation 943..945: note = n is a, c, g, or t
  variation 1237..1239: note = n is a, c, g, or t
  variation 1414..1416: note = n is a, c, g, or t
  variation 1600..1602: note = n is a, c, g, or t
  variation 1624..1626: note = n is a, c, g, or t
  variation 1783..1785: note = n is a, c, g, or t
  source 1..2214: mol_type = other DNA
atggctgccgatggttatcttccagattggctcgaggacaacctctctgagggcattcgcgagtggtgggacctgaaacctggagccccgaaacccaaagccaaccagcaaaagcaggacgacggccggggtctggtgcttcctggctacaagtacctcggacccttcaacggactcgacaagggggagcccgtcaacgcggcggacgcagcggccctcgagcacgacaaggcctacgaccagcagctcaaagcgggtgacaatccgtacctgcggtataatcacgccgacgccgagtttcaggagcgtctgcaagaagatacgtcttttgggggcaacctcgggcgagcagtcttccaggccaagaagcgggttctcgaacctctcggtctggttgaggaaggcgctaagacggctcctggaaagaagagaccggtagagcagtcaccacagcgtgagcccgactcctccnnnggcatcggcaagaaaggccagcagcccgccnnnaagagactcaatttcggtcagactggcgactcagagtcagtccccgaccctcaacctctcggagaacctccagcagcgccctctggtgtgggatctaatacaatggctgcaggcggtggcgcaccaatggcagacaataacgaaggtgccgacggagtgggtagttcctcgggaaattggcattgcgattccacatggctgggcgacagagtcatcaccaccagcacccgaacctgggccctgcccacctacaacaaccacctctacaagcaaatctccaacgggacctcgggaggcagcaccaacgacaacacctactttggctacagcaccccctgggggtattttgactttaacagattccactgccacttctcaccacgtgactggcagcgactcatcaacaacaactggggattccggcccaagagactcnnnttcaagctcttcaacatccaggtcaaagaggtcacgcagaatgaaggcaccaagaccatcgccaataacctcaccagcaccatccaggtgtttacggactcggaataccagctgccgtacgtcctcggctctgcccaccagggctgcctgcctccgttcccggcggacgtcttcatgattcctcagtacggctacctgactctcaacaacggtagtcaggccgtgggacgttcctccttctactgcctggagtacttcccctctcagatgctgagaacgggcaacaactttnnnttcagctacactttcgaggacgtgcctttccacagcagctacgcgcacagccagagtttggacaggctgatgaatcctctcatcgaccagtacctgtactacctgtcaagaacccagactacgggaggcacagcgggaacccagacgttgcagttttctcaggccgggcctagcnnnatggcgaatcaggccaaaaactggctgcctggaccctgctacagacagcagcgcgtctccacgacaacgtcgcaaaacaacaacagcaactttgcctggactggtgccaccaagtatcatctgaacggcagagactctctggtgaatccgggcgtcgccatggcaacccacaaggacgacgagnnncgcttcttcccatccagcggcnnnctcatatttggcaagcagggagctggaaaagacaacgtggactatagcaacgtgatgctaaccagcgaggaagaaatcaagaccaccaaccccgtggccacagaagagtatggcgtggtggctgataacctacagcagcaaaacaccgctcctcaannngggaccgtcaacagccagggagccttacctggcatggtctggcagaaccgggacgtgtacctgcagggtcctatttgggccaagattcctcacacagatggcaactttcacccgtctcctttaatgggcggctttggacttaaacatccgcctcctcagatcctcatcaaaaacactcctgttcctgcggatcctccaacaacgttcaaccaggccaagctgaattctttcatcacgcagtacagcaccggacaagtcagcgtggagatcgagtgggagctgcagaaggagaacagcaagcgctggaacccagagattcagtatacttccaactactacaaatctacaaatgtggactttgctgttaatactgagggtgtttactctgagcctcgccccattggcactcgttacctcacccgtaatctg

SEQ ID NO: 1754 - protein, 738 aa, synthetic construct
  REGION 1..738: note = Description of Artificial Sequence: Synthetic polypeptide
  VARIANT 169: note = Xaa can be any naturally occurring amino acid
  VARIANT 315: note = Xaa can be any naturally occurring amino acid
  VARIANT 534: note = Xaa can be any naturally occurring amino acid
  VARIANT 542: note = Xaa can be any naturally occurring amino acid
MAADGYLPDWLEDNLSEGIREWWDLKPGAPKPKANQQKQDDGRGLVLPGYKYLGPFNGLDKGEPVNAADAAALEHDKAYDQQLKAGDNPYLRYNHADAEFQERLQEDTSFGGNLGRAVFQAKKRVLEPLGLVEEGAKTAPGKKRPVEPSPQRSPDSSTGIGKKGQQPAXKRLNFGQTGDSESVPDPQPIGEPPAAPSGVGSGTMAAGGGAPMADNNEGADGVGSSSGNWHCDSTWLGDRVITTSTRTWALPTYNNHLYKQISNGTSGGSTNDNTYFGYSTPWGYFDFNRFHCHFSPRDWQRLINNNWGFRPKRLXFKLFNIQVKEVTQNEGTKTIANNLTSTIQVFTDSEYQLPYVLGSAHQGCLPPFPADVFMIPQYGYLTLNNGSQAVGRSSFYCLEYFPSQMLRTGNNFEFSYTFEDVPFHSSYAHSQSLDRLMNPLIDQYLYYLSRTQSTGGTAGTQQLLFSQAGPSNMSAQAKNWLPGPCYRQQRVSTTLSQNNNSNFAWTGATKYHLNGRDSLVNPGVAMATHKDDEXRFFPSSGXLMFGKQGAGKDNVDYSNVMLTSEEEIKTTNPVATEQYGVVADNLQQQNTAPIVGAVNSQGALPGMVWQNRDVYLQGPIWAKIPHTDGNFHPSPLMGGFGLKHPPPQILIKNTPVPADPPTTFNQAKLNSFITQYSTGQVSVEIEWELQKENSKRWNPEIQYTSNYYKSTNVDFAVNTEGVYSEPRPIGTRYLTRNL

SEQ ID NO: 1755 - DNA, 2214 bp, synthetic construct
  misc_feature 1..2214: note = Description of Artificial Sequence: Synthetic polynucleotide
  variation 505..507: note = n is a, c, g, or t
  variation 943..945: note = n is a, c, g, or t
  variation 1600..1602: note = n is a, c, g, or t
  variation 1624..1626: note = n is a, c, g, or t
  source 1..2214: mol_type = other DNA
atggctgccgatggttatcttccagattggctcgaggacaacctctctgagggcattcgcgagtggtgggacctgaaacctggagccccgaaacccaaagccaaccagcaaaagcaggacgacggccggggtctggtgcttcctggctacaagtacctcggacccttcaacggactcgacaagggggagcccgtcaacgcggcggacgcagcggccctcgagcacgacaaggcctacgaccagcagctcaaagcgggtgacaatccgtacctgcggtataatcacgccgacgccgagtttcaggagcgtctgcaagaagatacgtcttttgggggcaacctcgggcgagcagtcttccaggccaagaagcgggttctcgaacctctcggtctggttgaggaaggcgctaagacggctcctggaaagaagagaccggtagagccgtcaccacagcgttcccccgactcctccacgggcatcggcaagaaaggccagcagcccgccnnnaagagactcaatttcggtcagactggcgactcagagtcagtccccgaccctcaacctatcggagaacctccagcagcgccctctggtgtgggatctggtacaatggctgcaggcggtggcgcaccaatggcagacaataacgaaggtgccgacggagtgggtagttcctcgggaaattggcattgcgattccacatggctgggcgacagagtcatcaccaccagcacccgaacctgggccctgcccacctacaacaaccacctctacaagcaaatctccaacgggacctcgggaggcagcaccaacgacaacacctactttggctacagcaccccctgggggtattttgactttaacagattccactgccacttctcaccacgtgactggcagcgactcatcaacaacaactggggattccggcccaagagactcnnnttcaagctcttcaacatccaggtcaaagaggtcacgcagaatgaaggcaccaagaccatcgccaataacctcaccagcaccatccaggtgtttacggactcggaataccagctgccgtacgtcctcggctctgcccaccagggctgcctgcctccgttcccggcggacgtcttcatgattcctcagtacggctacctgactctcaacaacggtagtcaggccgtgggacgttcctccttctactgcctggagtacttcccctctcagatgctgagaacgggcaacaactttgagttcagctacactttcgaggacgtgcctttccacagcagctacgcgcacagccagagtttggacaggctgatgaatcctctcatcgaccagtacctgtactacctgtcaagaacccagtctacgggaggcacagcgggaacccagcagttgctgttttctcaggccgggcctagcaacatgtcggctcaggccaaaaactggctgcctggaccctgctacagacagcagcgcgtctccacgacactgtcgcaaaacaacaacagcaactttgcctggactggtgccaccaagtatcatctgaacggcagagactctctggtgaatccgggcgtcgccatggcaacccacaaggacgacgagnnncgcttcttcccatccagcggcnnnctcatgtttggcaagcagggagctggaaaagacaacgtggactatagcaacgtgatgctaaccagcgaggaagaaatcaagaccaccaaccccgtggccacagaacagtatggcgtggtggctgataacctacagcagcaaaacaccgctcctattgtgggggccgtcaacagccagggagccttacctggcatggtctggcagaaccgggacgtgtacctgcagggtcctatttgggccaagattcctcacacagatggcaactttcacccgtctcctttaatgggcggctttggacttaaacatccgcctcctcagatcctcatcaaaaacactcctgttcctgcggatcctccaacaacgttcaaccaggccaagctgaattctttcatcacgcagtacagcaccggacaagtcagcgtggagatcgagtgggagctgcagaaggagaacagcaagcgctggaacccagagattcagtatacttccaactactacaaatctacaaatgtggactttgctgttaatactgagggtgtttactctgagcctcgccccattggcactcgttacctcacccgtaatctg

SEQ ID NO: 1756 - protein, 738 aa, synthetic construct
  REGION 1..738: note = Description of Artificial Sequence: Synthetic polypeptide
  VARIANT 471: note = Xaa can be any naturally occurring amino acid
MAADGYLPDWLEDNLSEGIREWWDLKPGAPKPKANQQKQDDGRGLVLPGYKYLGPFNGLDKGEPVNAADAAALEHDKAYDQQLKAGDNPYLRYNHADAEFQERLQEDTSFGGNLGRAVFQAKKRVLEPLGLVEEGAKTAPGKKRPVEPSPQRSPDSSTGIGKKGQQPAKKRLNFGQTGDSESVPDPQPIGEPPAGPSGLGSGTMAAGGGAPMADNNEGADGVGSSSGNWHCDSTWLGDRVITTSTRTWALPTYNNHLYKQISNGTSGGSTNDNTYFGYSTPWGYFDFNRFHCHFSPRDWQRLINNNWGFRPKRLNFKLFNIQVKEVTQNEGTKTIANNLTSTIQVFTDSEYQLPYVLGSAHQGCLPPFPADVFMIPQYGYLTLNNGSQAVGRSSFYCLEYFPSQMLRTGNNFEFSYTFEDVPFHSSYAHSQSLDRLMNPLIDQYLYYLSRTQSTGGTAGTQQLLFSQAGPXNMSAQAKNWLPGPCYRQQRVSTTLSQNNNSNFAWTGATKYHLNGRDSLVNPGVAMATHKDDEERFFPSSGVLMFGKQGAGKDNVDYSSVMLTSEEEIKTTNPVATEQYGVVADNLQQQNTAPIVGAVNSQGALPGMVWQNRDVYLQGPIWAKIPHTDGNFHPSPLMGGFGLKHPPPQILIKNTPVPADPPTTFSQAKLASFITQYSTGQVSVEIEWELQKENSKRWNPEIQYTSNYYKSTNVDFAVNTEGTYSEPRPIGTRYLTRNL

SEQ ID NO: 1757 - DNA, 2214 bp, synthetic construct
  misc_feature 1..2214: note = Description of Artificial Sequence: Synthetic polynucleotide
  variation 1411..1413: note = n is a, c, g, or t
  source 1..2214: mol_type = other DNA
atggctgccgatggttatcttccagattggctcgaggacaacctctctgagggcattcgcgagtggtgggacttgaaacctggagccccgaaacccaaagccaaccagcaaaagcaggacgacggccggggtctggtgcttcctggctacaagtacctcggacccttcaacggactcgacaagggggagcccgtcaacgcggcggacgcagcggccctcgagcacgacaaggcctacgaccagcagctcaaagcgggtgacaatccgtacctgcggtataaccacgccgacgccgagtttcaggagcgtctgcaagaagatacgtcttttgggggcaacctcgggcgagcagtcttccaggccaagaagcgggttctcgaacctctcggtctggttgaggaaggcgctaagacggctcctggaaagaagagaccggtagagccatcaccccagcgttctccagactcctctacgggcatcggcaagaaaggccagcagcccgcgaaaaagagactcaactttgggcagactggcgactcagagtcagtgcccgaccctcaaccaatcggagaaccccccgcaggcccctctggtctgggatctggtacaatggctgcaggcggtggcgctccaatggcagacaataacgaaggcgccgacggagtgggtagttcctcaggaaattggcattgcgattccacatggctgggcgacagagtcatcaccaccagcacccgaacctgggccctccccacctacaacaaccacctctacaagcaaatctccaacgggacttcgggaggaagcaccaacgacaacacctacttcggctacagcaccccctgggggtattttgactttaacagattccactgccacttctcaccacgtgactggcagcgactcatcaacaacaactggggattccggcccaagagactcaacttcaagctcttcaacatccaggtcaaggaggtcacgcagaatgaaggcaccaagaccatcgccaataaccttaccagcacgattcaggtctttacggactcggaataccagctcccgtacgtcctcggctctgcgcaccagggctgcctgcctccgttcccggcggacgtcttcatgattcctcagtacgggtacctgactctgaacaatggcagtcaggccgtgggccgttcctccttctactgcctggagtactttccttctcaaatgctgagaacgggcaacaactttgagttcagctacacgtttgaggacgtgccttttcacagcagctacgcgcacagccaaagcctggaccggctgatgaaccccctcatcgaccagtacctgtactacctgtctcggactcagtccacgggaggtaccgcaggaactcagcagttgctattttctcaggccgggcctnnnaacatgtcggctcaggccaaaaactggctacccgggccctgctaccggcagcaacgcgtctccacgacactgtcgcaaaataacaacagcaactttgcctggaccggtgccaccaagtatcatctgaatggcagagactctctggtaaatcccggtgtcgctatggcaacccacaaggacgacgaagagcgattttttccgtccagcggagtcttaatgtttgggaaacagggagctggaaaagacaacgtggactatagcagcgttatgctaaccagtgaggaagaaattaaaaccaccaacccagtggccacagaacagtacggcgtggtggccgataacctgcaacagcaaaacaccgctcctattgtaggggccgtcaacagtcaaggagccttacctggcatggtctggcagaaccgggacgtgtacctgcagggtcctatctgggccaagattcctcacacggacggaaactttcatccctcgccgctgatgggaggctttggactgaaacacccgcctcctcagatcctgattaagaatacacctgttcccgcggatcctccaactaccttcagtcaagctaagctggcgtcgttcatcacgcagtacagcaccggacaggtcagcgtggaaattgaatgggagctgcagaaagaaaacagcaaacgctggaacccagagattcaatacacttccaactactacaaatctacaaatgtggactttgctgttaacacagaaggcacttattctgagcctcgccccatcggcacccgttacctcacccgtaatctg

SEQ ID NO: 1758 - protein, 737 aa, synthetic construct
  REGION 1..737: note = Description of Artificial Sequence: Synthetic polypeptide
  VARIANT 148: note = Xaa can be any naturally occurring amino acid
  VARIANT 169: note = Xaa can be any naturally occurring amino acid
  VARIANT 314: note = Xaa can be any naturally occurring amino acid
  VARIANT 466: note = Xaa can be any naturally occurring amino acid
  VARIANT 563: note = Xaa can be any naturally occurring amino acid
  VARIANT 580: note = Xaa can be any naturally occurring amino acid
  VARIANT 588: note = Xaa can be any naturally occurring amino acid
MAADGYLPDWLEDNLSEGIREWWDLKPGAPKPKANQQKQDDGRGLVLPGYKYLGPFNGLDKGEPVNAADAAALEHDKAYDQQLKAGDNPYLRYNHADAEFQERLQEDTSFGGNLGRAVFQAKKRVLEPLGLVEEGAKTAPGKKRPVEXSPQRSPDSSTGIGKKGQQPAXKRLNFGQTGDSESVPDPQPLGEPPAAPSGVGSGTMAAGGGAPMADNNEGADGVGNASGNWHCDSTWLGDRVITTSTRTWALPTYNNHLYKQISSQSAGSTNDNTYFGYSTPWGYFDFNRFHCHFSPRDWQRLINNNWGFRPKKLXFKLFNIQVKEVTTNDGVTTIANNLTSTVQVFSDSEYQLPYVLGSAHQGCLPPFPADVFMIPQYGYLTLNNGSQSVGRSSFYCLEYFPSQMLRTGNNFEFSYTFEDVPFHSSYAHSQSLDRLMNPLIDQYLYYLARTQSTTGGTAGNRELQFXQAGPSTMAEQAKNWLPGPCYRQQRVSKTLDQNNNSNFAWTGATKYHLNGRNSLVNPGVAMATHKDDEDRFFPSSGVLIFGKTGAANKTTLENVLMTXEEEIKTTNPVATEEYGXVSSNLQSXNTAPQTQTVNSQGALPGMVWQNRDVYLQGPIWAKIPHTDGNFHPSPLMGGFGLKHPPPQILIKNTPVPANPPEVFTPAKFASFITQYSTGQVSVEIEWELQKENSKRWNPEIQYTSNYDKSTNVDFAVDSEGVYSEPRPIGTRYLTRNL

SEQ ID NO: 1759 - DNA, 2211 bp, synthetic construct
  misc_feature 1..2211: note = Description of Artificial Sequence: Synthetic polynucleotide
  variation 442..444: note = n is a, c, g, or t
  variation 505..507: note = n is a, c, g, or t
  variation 940..942: note = n is a, c, g, or t
  variation 1396..1398: note = n is a, c, g, or t
  variation 1687..1689: note = n is a, c, g, or t
  variation 1738..1740: note = n is a, c, g, or t
  variation 1762..1764: note = n is a, c, g, or t
  source 1..2211: mol_type = other DNA
atggctgccgatggttatcttccagattggctcgaggacaacctctctgagggcattcgcgagtggtgggacctgaaacctggagccccgaaacccaaagccaaccagcaaaagcaggacgacggccggggtctggtgcttcctggctacaagtacctcggacccttcaacggactcgacaagggggagcccgtcaacgcggcggacgcagcggccctcgagcacgacaaggcctacgaccagcagctcaaagcgggtgacaatccgtacctgcggtataaccacgccgacgccgagtttcaggagcgtctgcaagaagatacgtcatttgggggcaacctcgggcgagcagtcttccaggccaagaagcgggttctcgaacctctcggtctggttgaggaaggcgctaagacggctcctggaaagaagagaccggtagagnnntcacctcagcgttcccccgactcctccacgggcatcggcaagaaaggccagcagcccgccnnnaagagactcaatttcggtcagactggcgactcagagtcagtccccgaccctcaacctctcggagaacctccagcagcgccctctggtgtgggatctggtacaatggctgcaggcggtggcgcaccaatggcagacaataacgaaggtgccgacggagtgggtaatgcctcaggaaattggcattgcgattccacatggctgggcgacagagtcattaccaccagcacccgaacctgggccctgcccacctacaacaaccacctctacaagcaaatctccagtcaaagtgcaggtagtaccaacgacaacacctacttcggctacagcaccccctgggggtattttgactttaacagattccactgccacttctcaccacgtgactggcagcgactcatcaacaacaactggggattccggcccaagaagctgnnnttcaagctcttcaacatccaggtcaaggaggtcacgacgaatgacggcgttacgaccatcgctaataaccttaccagcacggttcaggtattctcggactcggaataccagctgccgtacgtcctcggctctgcgcaccagggctgcctgcctccgttcccggcggacgtcttcatgattcctcagtacggctacctgactctcaacaatggcagtcagtctgtgggacgttcctccttctactgcctggagtacttcccctctcagatgctgagaacgggcaacaactttgagttcagctacaccttcgaggacgtgcctttccacagcagctacgcacacagccagagcctggaccggctgatgaatcccctcatcgaccagtacttgtactacctggccagaacacagagtaccacaggaggcacagctggcaatcgggaactgcagtttnnncaggccgggccttcaactatggccgaacaagccaagaattggttacctggaccttgctaccggcaacaaagagtctccaaaacgctggatcaaaacaacaacagcaactttgcttggactggtgccaccaaatatcacctgaacggcagaaactcgttggttaatcccggcgtcgccatggcaactcacaaggacgacgaggaccgctttttcccatccagcggagtcctgatttttggaaaaactggagcagctaacaaaactacattggaaaatgtgttaatgacannngaagaagaaattaaaactactaatcctgtagccacggaagaatacgggnnngtcagcagcaacttacaatcgnnnaatactgcaccccagacacaaactgtcaacagccagggagccttacctggcatggtctggcagaaccgggacgtgtacctgcagggtcccatctgggccaagattcctcacacggatggcaactttcacccgtctcctttgatgggcggctttggacttaaacatccgcctcctcagatcctgatcaagaacactcccgttcccgctaatcctccggaggtgtttactcctgccaagtttgcttcgttcatcacacagtacagcaccggacaagtcagcgtggaaatcgagtgggagctgcagaaggaaaacagcaagcgctggaacccggagattcagtacacctccaactatgataagtcgactaatgtggactttgccgttgacagcgagggtgtttactctgagcctcgccctattggcactcgttacctcacccgtaatctg

SEQ ID NO: 1760 - protein, 735 aa, synthetic construct
  REGION 1..735: note = Description of Artificial Sequence: Synthetic polypeptide
  VARIANT 162: note = Xaa can be any naturally occurring amino acid
  VARIANT 168: note = Xaa can be any naturally occurring amino acid
  VARIANT 224: note = Xaa can be any naturally occurring amino acid
  VARIANT 310: note = Xaa can be any naturally occurring amino acid
  VARIANT 410: note = Xaa can be any naturally occurring amino acid
  VARIANT 446: note = Xaa can be any naturally occurring amino acid
  VARIANT 461: note = Xaa can be any naturally occurring amino acid
  VARIANT 471: note = Xaa can be any naturally occurring amino acid
  VARIANT 708: note = Xaa can be any naturally occurring amino acid
MAADGYLPDWLEDNLSEGIREWWDLKPGAPKPKANQQKQDDGRGLVLPGYKYLGPFNGLDKGEPVNAADAAALEHDKAYDQQLKAGDNPYLRYNHADAEFQERLQEDTSFGGNLGRAVFQAKKRVLEPLGLVEEGAKTAPGKKRPVEQSPQEPDSSSGIGKXGQQPAXKRLNFGQTGDSESVPDPQPLGEPPAAPSGVGSNTMASGGGAPMADNNEGADGVGNXSGNWHCDSTWLGDRVITTSTRTWALPTYNNHLYKQISSQSGASNDNHYFGYSTPWGYFDFNRFHCHFSPRDWQRLINNNWGFRPKXLNFKLFNIQVKEVTTNDGTTTIANNLTSTVQVFTDSEYQLPYVLGSAHQGCLPPFPADVFMIPQYGYLTLNNGSQAVGRSSFYCLEYFPSQMLRTGNNFXFSYTFEDVPFHSSYAHSQSLDRLMNPLIDQYLYYLXRTQTTSGTAQNRELXFSQAGPSSMXNQAKNWLPGPCYRQQRVSKTANDNNNSNFAWTGATKYHLNGRDSLVNPGPAMASHKDDEDKFFPMSGVLIFGKQGAGASNVDLDNVMITDEEEIKTTNPVATEQYGTVATNLQSSNTAPATGTVNSQGALPGMVWQDRDVYLQGPIWAKIPHTDGHFHPSPLMGGFGLKHPPPQILIKNTPVPANPPTTFSPAKFASFITQYSTGQVSVEIEWELQKENSKRWNPEIQYTSNYNKSXNVDFTVDTNGVYSEPRPIGTRYLTRNL

SEQ ID NO: 1761 - DNA, 2205 bp, synthetic construct
  misc_feature 1..2205: note = Description of Artificial Sequence: Synthetic polynucleotide
  variation 484..486: note = n is a, c, g, or t
  variation 502..504: note = n is a, c, g, or t
  variation 670..672: note = n is a, c, g, or t
  variation 928..930: note = n is a, c, g, or t
  variation 1228..1230: note = n is a, c, g, or t
  variation 1336..1338: note = n is a, c, g, or t
  variation 1381..1383: note = n is a, c, g, or t
  variation 1411..1413: note = n is a, c, g, or t
  variation 2122..2124: note = n is a, c, g, or t
  source 1..2205: mol_type = other DNA
atggctgccgatggttatcttccagattggctcgaggacaacctctctgagggcattcgcgagtggtgggacttgaaacctggagccccgaaacccaaagccaaccagcaaaagcaggacgacggccggggtctggtgcttcctggctacaagtacctcggacccttcaacggactcgacaagggggagcccgtcaacgcggcggatgcagcggccctcgagcacgacaaggcctacgaccagcagctcaaagcgggtgacaatccgtacctgcggtataaccacgccgacgccgagtttcaggagcgtctgcaagaagatacgtcttttgggggcaacctcgggcgagcagtcttccaggccaagaagagggttctcgaacctcttggtctggttgaggaaggtgctaagacggctcctggaaagaaacgtccggtagagcagtcgccacaagagccagactcctcctcgggcattggcaagnnnggccagcagcccgctnnnaagagactcaattttggtcagactggcgactcagagtcagtccccgacccacaacctctcggagaacctccagcagccccctctggtgtgggatctaatacaatggcttcaggcggtggcgcaccaatggcagacaataacgaaggcgccgacggagtgggtaatnnntcaggaaattggcattgcgattccacatggctgggcgacagagtcatcaccaccagcacccgaacatgggccttgcccacctataacaaccacctctacaagcaaatctccagtcaatcaggggccagcaacgacaaccactacttcggctacagcaccccctgggggtattttgatttcaacagattccactgccatttctcaccacgtgactggcagcgactcatcaacaacaattggggattccggcccaagnnnctcaacttcaagctcttcaacatccaagtcaaggaggtcacgacgaatgatggcaccacgaccatcgctaataaccttaccagcacggttcaagtcttcacggactcggagtaccagttgccgtacgtcctcggctctgcgcaccagggctgcctccctccgttcccggcggacgtgttcatgattccgcagtacggctacctaacgctcaacaatggcagccaggcagtgggacggtcatccttttactgcctggaatatttcccatcgcagatgctgagaacgggcaataactttnnnttcagctacaccttcgaggacgtgcctttccacagcagctacgcgcacagccagagcctggaccggctgatgaatcctctcatcgaccagtacctgtattacctgnnnagaactcagactacgtccggaactgcccaaaacagggagttgnnntttagccaggcgggtccatctagcatgnnnaatcaggccaaaaactggctacctggaccctgttaccggcagcagcgcgtttctaaaacagcaaatgacaacaacaacagcaactttgcctggactggtgctacaaaatatcaccttaatgggcgtgattctttagtcaaccctggccctgctatggcctcacacaaagacgacgaagacaagttctttcccatgagcggtgtcttgatttttggaaagcagggcgccggagcttcaaacgttgatttggacaatgtcatgatcacagacgaagaggaaatcaaaaccactaaccccgtggccaccgaacaatatgggactgtggcaaccaatctccagagcagcaacacagcccctgcgaccggaactgtgaattctcagggagccttacctggaatggtgtggcaagacagagacgtatacctgcagggtcctatttgggccaaaattcctcacacggatggacactttcacccgtctcctctcatgggcggctttggacttaagcacccgcctcctcagatcctcatcaaaaacacgcctgttcctgcgaatcctccgacaacgttttcgcctgcaaagtttgcttcattcatcacccagtattccacaggacaagtgagcgtggagattgaatgggagctgcagaaagaaaacagcaaacgctggaatcccgaaatacagtatacatctaactataataaatctnnnaacgttgatttcactgtggacaccaatggagtttatagtgagcctcgccccattggcacccgttacctcacccgtaacctg

SEQ ID NO: 1762 - protein, 735 aa, synthetic construct
  REGION 1..735: note = Description of Artificial Sequence: Synthetic polypeptide
  VARIANT 42: note = Xaa can be any naturally occurring amino acid
  VARIANT 168: note = Xaa can be any naturally occurring amino acid
  VARIANT 310: note = Xaa can be any naturally occurring amino acid
  VARIANT 410: note = Xaa can be any naturally occurring amino acid
  VARIANT 446: note = Xaa can be any naturally occurring amino acid
  VARIANT 461: note = Xaa can be any naturally occurring amino acid
  VARIANT 471: note = Xaa can be any naturally occurring amino acid
  VARIANT 475: note = Xaa can be any naturally occurring amino acid
  VARIANT 504: note = Xaa can be any naturally occurring amino acid
  VARIANT 539: note = Xaa can be any naturally occurring amino acid
MAADGYLPDWLEDNLSEGIREWWDLKPGAPQPKANQQHQDDXRGLVLPGYKYLGPFNGLDKGEPVNEADAAALEHDKAYDQQLKAGDNPYLKYNHADAEFQERLQEDTSFGGNLGRAVFQAKKRVLEPLGLVEEAAKTAPGKKRPVEQSPQEPDSSSGIGKSGQQPAXKRLNFGQTGDSESVPDPQPLGEPPAAPSGVGSNTMASGGGAPMADNNEGADGVGNSSGNWHCDSTWLGDRVITTSTRTWALPTYNNHLYKQISSQSGASNDNHYFGYSTPWGYFDFNRFHCHFSPRDWQRLINNNWGFRPKXLNFKLFNIQVKEVTQNDGTTTIANNLTSTVQVFTDSEYQLPYVLGSAHQGCLPPFPADVFMIPQYGYLTLNNGSQAVGRSSFYCLEYFPSQMLRTGNNFXFSYTFEDVPFHSSYAHSQSLDRLMNPLIDQYLYYLXRTQTTSGTTQQSRLXFSQAGPSSMXQQAXNWLPGPCYRQQRVSKTANDNNNSNFAWTXATKYHLNGRDSLVNPGPAMASHKDDEEKFFPMHGXLIFGKQGTGASNVDLDNVMITDEEEIRTTNPVATEQYGTVATNLQSSNTAPATGTVNSQGALPGMVWQDRDVYLQGPIWAKIPHTDGHFHPSPLMGGFGLKHPPPQILIKNTPVPANPPTTFSPAKFASFITQYSTGQVSVEIEWELQKENSKRWNPEIQYTSNYNKSVNVDFTVDTNGVYSEPRPIGTRYLTRNL

SEQ ID NO: 1763 - DNA, 2205 bp, synthetic construct
  misc_feature 1..2205: note = Description of Artificial Sequence: Synthetic polynucleotide
  variation 124..126: note = n is a, c, g, or t
  variation 502..504: note = n is a, c, g, or t
  variation 928..930: note = n is a, c, g, or t
  variation 1228..1230: note = n is a, c, g, or t
  variation 1336..1338: note = n is a, c, g, or t
  variation 1381..1383: note = n is a, c, g, or t
  variation 1411..1413: note = n is a, c, g, or t
  variation 1423..1425: note = n is a, c, g, or t
  variation 1510..1512: note = n is a, c, g, or t
  variation 1615..1617: note = n is a, c, g, or t
  source 1..2205: mol_type = other DNA
atggctgctgacggttatcttccagattggctcgaggacaacctttctgaaggcattcgtgagtggtgggatctgaaacctggagcccctcaacccaaagcgaaccaacaacaccaggacgacnnncggggtcttgtgcttccgggttacaaatacctcggaccctttaacggactcgacaaaggagagccggtcaacgaggcggacgcggcagccctcgaacacgacaaagcttacgaccagcagctcaaggccggtgacaacccgtacctcaagtacaaccacgccgacgccgagtttcaggagcgtcttcaagaagatacgtcttttgggggcaaccttggcagagcagtcttccaggccaaaaagagggtccttgagcctcttggtctggttgaggaagcagctaaaacggctcctggaaagaagaggcctgtagaacagtctcctcaggaaccggactcatcatctggtattggcaaatcgggccaacagcctgccnnnaaaagactaaatttcggtcagactggagactcagagtcagtcccagaccctcaacctctcggagaaccaccagcagccccctcaggtgtgggatctaatacaatggcttcaggcggtggcgcaccaatggcagacaataacgagggtgccgatggagtgggtaattcctcaggaaattggcattgcgattccacatggctgggcgacagagtcatcaccaccagcaccagaacctgggccctgcccacttacaacaaccatctctacaagcaaatctccagccaatcaggagcttcaaacgacaaccactactttggctacagcaccccttgggggtattttgactttaacagattccactgccacttctcaccacgtgactggcagcgactcattaacaacaactggggattccggcccaagnnnctcaacttcaagctcttcaacatccaagttaaagaggtcacgcagaacgatggcacgacgactattgccaataaccttaccagcacggttcaagtgtttacggactcggagtatcagctcccgtacgtgctcgggtcggcgcaccaaggctgtctcccgccgtttccagcggacgtcttcatgatccctcagtatggatacctcaccctgaacaacggaagtcaagcggtgggacgctcatccttttactgcctggagtacttcccttcgcagatgctaaggactggaaataacttcnnnttcagctataccttcgaggatgtaccttttcacagcagctacgctcacagccagagtttggatcgcttgatgaatcctcttattgatcagtatctgtactacctgnnnagaacgcaaacaacctctggaacaacccaacaatcacggctgnnntttagccaggctgggccttcgtctatgnnncagcaggccnnnaattggctacctgggccctgctaccggcaacagagagtttcaaagactgctaacgacaacaacaacagtaactttgcttggacannngccaccaaatatcatctcaatggccgcgactcgctggtgaatccaggaccagctatggccagtcacaaggacgatgaagaaaaatttttccctatgcacggcnnnctaatatttggcaaacaagggacaggggcaagtaacgtagatttagataatgtaatgattacggatgaagaagagattcgtaccaccaatcctgtggcaacagagcagtatggaactgtggcaactaacttgcagagctcaaatacagctcccgcgactggaactgtcaatagtcagggggccttacctggcatggtgtggcaagatcgtgacgtgtaccttcaaggacctatctgggcaaagattcctcacacggatggacactttcatccttctcctctgatgggaggctttggactgaaacatccgcctcctcaaatcttgatcaaaaatactccggtaccggcaaatcctccgacgactttcagcccggccaagtttgcttcatttatcactcagtactccactggacaggtcagcgtggaaattgagtgggagctacagaaagaaaacagcaaacgttggaatccagagattcagtacacttccaactacaacaagtctgttaatgtggactttactgtagacactaatggtgtttatagtgaacctcgccctattggaacccggtatctcacacgaaacttg

SEQ ID NO: 1764 - protein, 736 aa, synthetic construct; identical to SEQ ID NO: 1472
  REGION 1..736: note = Description of Artificial Sequence: Synthetic polypeptide

SEQ ID NO: 1765 - protein, 736 aa, synthetic construct; identical to SEQ ID NO: 1473
  REGION 1..736: note = Description of Artificial Sequence: Synthetic polypeptide

SEQ ID NO: 1766 - protein, 736 aa, synthetic construct; identical to SEQ ID NO: 1474
  REGION 1..736: note = Description of Artificial Sequence: Synthetic polypeptide

SEQ ID NO: 1767 - protein, 736 aa, synthetic construct; identical to SEQ ID NO: 1475
  REGION 1..736: note = Description of Artificial Sequence: Synthetic polypeptide

SEQ ID NO: 1768 - protein, 736 aa, synthetic construct; identical to SEQ ID NO: 1476
  REGION 1..736: note = Description of Artificial Sequence: Synthetic polypeptide

SEQ ID NO: 1769 - protein, 736 aa, synthetic construct; identical to SEQ ID NO: 1477
  REGION 1..736: note = Description of Artificial Sequence: Synthetic polypeptide

SEQ ID NO: 1770 - protein, 736 aa, synthetic construct; identical to SEQ ID NO: 1478
  REGION 1..736: note = Description of Artificial Sequence: Synthetic polypeptide

SEQ ID NO: 1771 - protein, 736 aa, synthetic construct; identical to SEQ ID NO: 1479
  REGION 1..736: note = Description of Artificial Sequence: Synthetic polypeptide

SEQ ID NO: 1772 - DNA, 2211 bp, synthetic construct; identical to SEQ ID NO: 1480
  misc_feature 1..2211: note = Description of Artificial Sequence: Synthetic polynucleotide
  source 1..2211: mol_type = other DNA

SEQ ID NO: 1773 - protein, 738 aa, synthetic construct; identical to SEQ ID NO: 7
  REGION 1..738: note = Description of Artificial Sequence: Synthetic polypeptide

SEQ ID NO: 1774 - protein, 738 aa, synthetic construct; identical to SEQ ID NO: 7
  REGION 1..738: note = Description of Artificial Sequence: Synthetic polypeptide

SEQ ID NO: 1775 - protein, 738 aa, synthetic construct
  REGION 1..738: note = Description of Artificial Sequence: Synthetic polypeptide
  VARIANT 157: note = Xaa can be any naturally occurring amino acid
  VARIANT 169: note = Xaa can be any naturally occurring amino acid
  VARIANT 457: note = Xaa can be any naturally occurring amino acid
  VARIANT 463: note = Xaa can be any naturally occurring amino acid
  VARIANT 508: note = Xaa can be any naturally occurring amino acid
  VARIANT 510..511: note = Xaa can be any naturally occurring amino acid
  VARIANT 558: note = Xaa can be any naturally occurring amino acid
  VARIANT 585: note = Xaa can be any naturally occurring amino acid
  VARIANT 587: note = Xaa can be any naturally occurring amino acid
MAADGYLPDWLEDNLSEGIREWWDLKPGAPKPKANQQKQDDGRGLVLPGYKYLGPFNGLDKGEPVNAADAAALEHDKAYDQQLKAGDNPYLRYNHADAEFQERLQEDTSFGGNLGRAVFQAKKRVLEPLGLVEEGAKTAPGKKRPVEQSPQEPDSSXLGIGKTGQQPAXKRLNFGQTGDSESVPDPQPLGEPPAAPSGVGSNTMASGGGAPMADNNEGADGVGNSSGNWHCDSTWLGDRVITTSTRTWALPTYNNHLYKQISNGTSGGSTNDNTYFGYSTPWGYFDFNRFHCHFSPRDWQRLINNNWGFRPKRLNFKLFNIQVKEVTTNEGTKTIANNLTSTVQVFTDSEYQLPYVLGSAHQGCLPPFPADVFMIPQYGYLTLNNGSQAVGRSSFYCLEYFPSQMLRTGNNFQFSYTFEDVPFHSSYAHSQSLDRLMNPLIDQYLYYLSRTQTTGTXGTQTLXFSQAGPSSMANQARNWVPGPCYRQQRVSTTTNQNNNSNFAWTGAXKXXLNGRDSLMNPGVAMASHKDDEDRFFPSSGVLIFGKQGAGNDNVDYSXVMITNEEEIKTTNPVATEEYGAVATNXQXLANTQAQTGLVHNQGVLPGMVWQNRDVYLQGPIWAKIPHTDGNFHPSPLMGGFGLKHPPPQILIKNTPVPADPPTTFNQAKLNSFITQYSTGQVSVEIEWELQKENSKRWNPEIQYTSNYYKSTNVDFAVNTEGVYSEPRPIGTRYLTRNL

SEQ ID NO: 1776 - DNA, 2211 bp, synthetic construct
  misc_feature 1..2211: note = Description of Artificial Sequence: Synthetic polynucleotide
  variation 469..471: note = n is a, c, g, or t
  variation 502..504: note = n is a, c, g, or t
  variation 1366..1368: note = n is a, c, g, or t
  variation 1384..1386: note = n is a, c, g, or t
  variation 1519..1521: note = n is a, c, g, or t
  variation 1525..1530: note = n is a, c, g, or t
  variation 1669..1671: note = n is a, c, g, or t
  variation 1750..1752: note = n is a, c, g, or t
  variation 1756..1758: note = n is a, c, g, or t
  source 1..2211: mol_type = other DNA
atggctgccgatggttatcttccagattggctcgaggacaacctctctgagggcattcgcgagtggtgggacttgaaacctggagccccgaaacccaaagccaaccagcaaaagcaggacgacggccggggtctggtgcttcctggctacaagtacctcggacccttcaacggactcgacaagggggagcccgtcaacgcggcggacgcagcggccctcgagcacgacaaagcctacgaccagcagctcaaagcgggtgacaatccgtacctgcggtataatcacgccgacgccgagtttcaggagcgtctgcaagaagatacgtcttttgggggcaacctcgggcgagcagtcttccaggccaagaagcgggttctcgaacctctcggtctggttgaggaaggcgctaagacggctcctggaaagaagaggccggtagagcagtcgccacaagagccagactcctccnnnggcatcggcaagacaggccagcagcccgctnnnaagagactcaattttggtcagactggcgactcagagtcagtccccgacccacaacctctcggagaacctccagcagccccctcaggtgtgggatctaatacaatggcttcaggcggtggcgctccaatggcagacaataacgaaggcgccgacggagtgggtaattcctcgggaaattggcattgcgattccacatggctgggggacagagtcatcaccaccagcacccgaacctgggccctgcccacctacaacaaccacctctacaagcaaatctccaacggcacctcgggaggaagcaccaacgacaacacctattttggctacagcaccccctgggggtattttgacttcaacagattccactgtcacttttcaccacgtgactggcaacgactcatcaacaacaattggggattccggcccaaaagactcaacttcaagctgttcaacatccaggtcaaggaagtcacgacgaacgaaggcaccaagaccatcgccaataatctcaccagcaccgtgcaggtctttacggactcggagtaccagttaccgtacgtgctaggatccgctcaccagggatgtctgcctccgttcccggcggacgtcttcatgattcctcagtacggctatttaactttaaacaatggaagccaagccgtgggacgttcctccttctactgtctggagtatttcccatcgcagatgctgagaaccggcaacaactttcagttcagctacaccttcgaggacgtgcctttccacagcagctacgcgcacagccagagcctggacaggctgatgaatcccctcatcgaccagtacctgtactacctgtccagaacgcaaacgactggaactnnngggacgcagactctgnnnttcagccaagcgggtcctagctcaatggccaaccaggctagaaattgggtgcccggaccttgctaccggcagcagcgcgtctccacgacaaccaaccagaacaacaacagcaactttgcctggacgggagctnnnaagnnnnnnctgaacggccgagactctctaatgaatccgggcgtggcaatggcttcccacaaggatgacgaggaccgcttcttcccttcgagcggggtcctgatttttggcaagcaaggagccgggaacgataatgtggattacagcnnngtgatgattacaaatgaggaagaaatcaagactaccaaccccgtggccacagaagaatatggagcagtggccaccaacnnncagnnngccaatacgcaggcgcagaccggactcgtgcacaaccagggggtgcttcccggcatggtgtggcagaatagagacgtgtacctgcagggtcccatctgggccaaaattcctcacacggacggcaactttcacccgtctcccctgatgggcggctttggactgaagcacccgcctcctcaaattctcatcaagaacacaccggttccagcggacccgccgactaccttcaaccaggccaagctgaactctttcatcacgcagtacagcaccggacaggtcagcgtggaaatcgagtgggagctgcagaaagaaaacagcaaacgctggaatccagagattcaatacacttccaactactacaaatctacaaatgtggactttgctgtcaacacggagggggtttatagcgagcctcgccccattggcacccgttacctcacccgcaacctgtaa

SEQ ID NO: 1777 - protein, 733 aa, synthetic construct; identical to SEQ ID NO: 423
  REGION 1..733: note = Description of Artificial Sequence: Synthetic polypeptide

SEQ ID NO: 1778 - DNA, 4472 bp, synthetic construct
  misc_feature 1..4472: note = Description of Artificial Sequence: Synthetic polynucleotide
  source 1..4472: mol_type = other DNA
ctccatcactaggggtaaccgcgaagcgcctcccacgctgccgcgtcagcgctgacgtaaattacgtcataggggagtggtcctgtattagctgtcacgtgagtgcttttgcgacattttgcgacaccacgtggccattcatggtatatatggccgagtgagcgagcaggatctccattttgaccgcgaaatttgaacgagcagcagccatgccgggcttctacgagatcgtgcttaaggtgccgagcgacctggacgagcacctgccgggcatttctgactcgtttgtgaactgggtggcagagaaggaatgggagctgcccccggattctgacatggatcggaatctgattgagcaggcacccctgaccgtggccgagaagctacagcgcgacttcctggtccaatggcgccgcgtgagtaaggccccggaggccctcttctttgttcagttcgagaagggcgagtcctacttccacctccatattctggtagagaccacgggggtcaaatccatggtgctgggccgcttcctgagtcagattcgggacaagctggtgcagaccatctaccgcgggatcgagccgaccctgcccaactggttcgcggtgacaaagacgcgtaatggcgccggaggggggaacaaggtggtggacgagtgctacatccccaactacctgctgcccaagactcagcccgagctgcagtgggcgtggactaacatggaggagtatataagcgcgtgcttgaacctggccgagcgcaaacggctcgtggcgcagcacctgacccacgtcagccagacccaggagcagaacaaggagaatctgaacccgaattctgacgcgcctgtcatccggtcaaaaacctccgcgcgctacatggagctggtcgggtggctggtggaccggggcatcacctccgagaagcagtggatccaggaggaccaggcctcgtacatctccttcaacgccgcctccaactcgcggtctcagatcaaggccgcgctggacaatgccggcaagatcatggcgctgaccaaatccgcgcccgactacctggtaggccccgctctgcccgcggacattaaatccaaccgcatctaccgcatcctggagctgaatggctacgaccctgcctacgccggttccgtctttctcggctgggcccagaaaaagtttggcaaaaggaacaccatctggctgtttgggccggccaccacgggcaagaccaacatcgcggaagccatcgcccacgccgtgcccttctacggctgcgtcaactggaccaatgagaactttcccttcaacgattgcgtcgacaagatggtgatctggtgggaggagggcaagatgacggccaaggtcgtggagtccgccaaggccattctcggcggcagcaaggtgcgcgtggaccaaaagtgcaagtcgtccgcccagatcgatcccacccccgtgatcgtcacctccaacaccaacatgtgcgccgtgattgacgggaacagcaccaccttcgagcaccagcagccgttgcaggaccggatgttcaaatttgaacttacccgccgtctggagcacgactttggcaaggtgacaaagcaggaagtcaaagagttcttccgctgggcgcaggatcacgtgaccgaggtggcgcatgagttctacgtcagaaagggtggagctaacaaaagacccgcccccgatgacgcggatataagcgagcccaagcgggcctgcccctcagtcgcggatccatcgacgtcagacgcggaaggagctccggtggactttgccgacaggtaccaaaacaaatgttctcgtcacgcgggcatgcttcagatgctgtttccctgcaaaacatgcgagagaatgaatcagaatttcaacatttgcttcacgcacgggaccagagactgttcagaatgtttccctggcgtgtcagaatctcaaccggtcgtcagaaaaaagacgtatcggaaactctgtgcgattcatcatctgctggggcgggcacccgagattgcttgctcggcctgcgacctggtcaacgtggacctggatgactgtgtttctgagcaataaatgacttaaaccaggtatggctgccgatggttatcttccagattggctcgaggacaacctctctgagggcattcgcgagtggtgggacctgaaacctggagccccgaaacccaaagccaaccagcaaaagcaggacaacggccggggtctggtgcttcctggctacaagtacctcggacccttcaacggactcgacaagggggagcccgtcaacgcggcggacgcagcggccctcgagcacgacaaggcctacgaccagcagctccaagcgggtgacaatccgtacctgcggtataatcacgccgacgccgagtttcaggagcgtctgcaagaagatacgtcttttgggggcaacctcgggcgcgcagtcttccaggccaaaaagcgggttctcgaacctctgggcctggttgaatcgccggttaagacggctcctggaaagaagagaccggtagagccatcaccccagcgctctccagactcctctacgggcatcggcaagaaaggccagcagcccgcaaaaaagagactcaattttgggcagactggcgactcagagtcagtccccgaccctcaaccaatcggagaaccaccagcaggcccctctggtctgggatctggtacaatggctgcaggcggtggcgctccaatggcagacaataacgaaggcgccgacggagtgggtagttcctcaggaaattggcattgcgattccacatggctgggcgacagagtcatcaccaccagcacccgcacctgggccctgcccacctacaacaaccacctctacaagcaaatctccaacgggacctcgggaggaagcaccaacgacaacacctacttcggctacagcaccccctgggggtattttgacttcaacagattccactgccacttttcaccacgtgactggcagcgactcatcaacaacaactggggattccggcccaagaggctcaacttcaagctcttcaacatccaagtcaaggaggtcacgcagaatgaaggcaccaagaccatcgccaataaccttaccagcacgattcaggtctttacggactcggaataccagctcccgtacgtgctcggctcggcgcaccagggctgcctgcctccgttcccggcggacgtcttcatgattcctcagtacgggtacctgactctgaacaatggcagtcaggctgtgggccggtcgtccttctactgcctggagtactttccttctcaaatgctgagaacgggcaacaactttgaattcagctacaacttcgaggacgtgcccttccacagcagctacgcgcacagccagagcctggaccggctgatgaaccctctcatcgaccagtacttgtactacctgtcccggactcaaagcacgggcggtactgcaggaactcagcagttgctattttctcaggccgggcctaacaacatgtcggctcaggccaagaactggctacccggtccctgctaccggcagcaacgcgtctccacgacactgtcgcagaacaacaacagcaactttgcctggacgggtgccaccaagtatcatctgaatggcagagactctctggtgaatcctggcgttgccatggctacccacaaggacgacgaagagcgattttttccatccagcggagtcttaatgtttgggaaacagggagctggaaaagacaacgtggactatagcagcgtgatgctaaccagcgaggaagaaataaagaccaccaacccagtggccacagaacagtacggcgtggtggccgataacctgcaacagcaaaacgccgctcctattgtaggggccgtcaatagtcaaggagccttacctggcatggtgtggcagaaccgggacgtgtacctgcagggtcccatctgggccaagattcctcatacggacggcaactttcatccctcgccgctgatgggaggctttggactgaagcatccgcctcctcagatcctgattaaaaacacacctgttcccgcggatcctccgaccaccttcactaaggccaagctggcttctttcatcacgcagtacagtaccggccaggtcagcgtggagatcgagtgggagctgcagaaggagaacagcaaacgctggaacccagagattcagtacacttccaactactacaaatctacaaatgtggactttgctgtcaatactgagggtacttattccgagcctcgccccattggcacccgttacctcacccgtaatctgtaattacatgttaatcaataaaccggttaattcgtttcagttgaactttggtctcctgtccttcttatcttatcggttaccatagaaactggttacttattaactgcttggtgcgcttcgcgataaaagacttacgtcatcgggttacccctagtgatgga

SEQ ID NO: 1779 - DNA, 2208 bp, synthetic construct
  misc_feature 1..2208: note = Description of Artificial Sequence: Synthetic polynucleotide
  source 1..2208: mol_type = other DNA
atggctgccgatggttatcttccagattggctcgaggacactctctctgaaggaataagacagtggtggaagctcaaacctggcccaccaccaccaaagcccgcagagcggcataaggacgacagcaggggtcttgtgcttcctgggtacaagtacctcggacccttcaacggactcgacaagggagagccggtcaacgaggcagacgccgcggccctcgagcacgacaaagcctacgaccggcagctcgacagcggagacaacccgtacctcaagtacaaccacgccgacgcggagtttcaggagcgccttaaagaagatacgtcttttgggggcaacctcggacgagcagtcttccaggcgaaaaagagggttcttgaacctctgggcctggttgaggaacctgttaagaaggctccgggaaaaaagaggccggtagagcactctcctgtggagccagactcctcctcgggaaccggaaaggcgggccagcagcctgcaagaaaaagattgaattttggtcagactggagacgcagactcagtacctgacccccagcctctcggacagccaccagcagccccctctggtctgggaactaataccatggctacaggcagtggcgcaccaatggcagacaataacgagggtgccgacggagtgggtaattcctcgggaaattggcattgcgattccacatggatgggcgacagagtcatcaccaccagcacccgaacctgggccctgcccacctacaacaaccacctctacaaacaaatttccagccaatcaggagcctcgaacgacaatcactactttggctacagcaccccttgggggtattttgacttcaacagattccactgccacttttcaccacgtgactggcaaagactcatcaacaacaactggggattccgacccaagagactcaacttcaagctctttaacattcaagtcaaagaggtcacgcagaatgacggtacgacgacgattgccaataaccttaccagcacggttcaggtgtttactgactcggagtaccagctcccgtacgtcctcggctcggcgcatcaaggatgcctcccgccgttcccagcagacgtcttcatggtgccacagtatggatacctcaccctgaacaacgggagtcaggcagtaggacgctcttcattttactgcctggagtactttccttctcagatgctgcgtaccggaaacaactttaccttcagctacacttttgaggacgttcctttccacagcagctacgctcacagccagagtctggaccgtctcatgaatcctctcatcgaccagtacctgtattacttgagcagaacaaacactccaagtggaaccaccacgcagtcaaggcttcagttttctcaggccggagcgagtgacattcgggaccagtctaggaactggcttcctggaccctgttaccgccagcagcgagtatcaaagacatctgcggataacaacaacagtgaatactcgtggactggagctaccaagtaccacctcaatggcagagactctctggtgaatccgggcccggctatggcaagccacaaggacgatgaagaaaagttttttcctcagagcggggttctcatctttgggaagcaaggctcagagaaaacaaatgtggacattgaaaaggtcatgattacagacgaagaggaaatcaggacaaccaatcccgtggctacggagcagtatggttctgtatctaccaacctccagagaggcaacagacaagcagctaccgcagatgtcaacacacaaggcgttcttccaggcatggtctggcaggacagagatgtgtaccttcaggggcccatctgggcaaagattccacacacggacggacattttcacccctctcccctcatgggtggattcggacttaaacaccctcctccacagattctcatcaagaacaccccggtgcctgcgaatccttcgaccaccttcagtgcggcaaagtttgcttccttcatcacacagtactccacgggacaggtcagcgtggagatcgagtgggagctgcagaaggaaaacagcaaacgctggaatcccgaaattcagtacacttccaactacaacaagtctgttaatgtggactttactgtggacactaatggcgtgtattcagagcctcgccccattggcaccagatacctgactcgtaatctgtaa

SEQ ID NO: 1780 - protein, 735 aa, synthetic construct
  REGION 1..735: note = Description of Artificial Sequence: Synthetic polypeptide
MAADGYLPDWLEDTLSEGIRQWWKLKPGPPPPKPAERHKDDSRGLVLPGYKYLGPFNGLDKGEPVNEADAAALEHDKAYDRQLDSGDNPYLKYNHADAEFQERLKEDTSFGGNLGRAVFQAKKRVLEPLGLVEEPVKKAPGKKRPVEHSPVEPDSSSGTGKAGQQPARKRLNFGQTGDADSVPDPQPLGQPPAAPSGLGTNTMATGSGAPMADNNEGADGVGNSSGNWHCDSTWMGDRVITTSTRTWALPTYNNHLYKQISSQSGASNDNHYFGYSTPWGYFDFNRFHCHFSPRDWQRLINNNWGFRPKRLNFKLFNIQVKEVTQNDGTTTIANNLTSTVQVFTDSEYQLPYVLGSAHQGCLPPFPADVFMVPQYGYLTLNNGSQAVGRSSFYCLEYFPSQMLRTGNNFTFSYTFEDVPFHSSYAHSQSLDRLMNPLIDQYLYYLSRTNTPSGTTTQSRLQFSQAGASDIRDQSRNWLPGPCYRQQRVSKTSADNNNSEYSWTGATKYHLNGRDSLVNPGPAMASHKDDEEKFFPQSGVLIFGKQGSEKTNVDIEKVMITDEEEIRTTNPVATEQYGSVSTNLQRGNRQAATADVNTQGVLPGMVWQDRDVYLQGPIWAKIPHTDGHFHPSPLMGGFGLKHPPPQILIKNTPVPANPSTTFSAAKFASFITQYSTGQVSVEIEWELQKENSKRWNPEIQYTSNYNKSVNVDFTVDTNGVYSEPRPIGTRYLTRNL

SEQ ID NO: 1781 - DNA, 8376 bp, synthetic construct
  misc_feature 1..8376: note = Description of Artificial Sequence: Synthetic polynucleotide
  source 1..8376: mol_type = other DNA
aattcccatcatcaataatataccttattttggattgaagccaatatgataatgagggggtggagtttgtgacgtggcgcggggcgtgggaacggggcgggtgacgtagtagtctctagagtcctgtattagaggtcacgtgagtgttttgcgacattttgcgacaccatgtggtcacgctgggtatttaagcccgagtgagcacgcagggtctccattttgaagcgggaggtttgaacgcgcagccaccacgccggggttttacgagattgtgattaaggtccccagcgaccttgacgggcatctgcccggcatttctgacagctttgtgaactgggtggccgagaaggaatgggagttgccgccagattctgacatggatctgaatctgattgagcaggcacccctgaccgtggccgagaagctgcagcgcgactttctgacggaatggcgccgtgtgagtaaggccccggaggcccttttctttgtgcaatttgagaagggagagagctacttccacatgcacgtgctcgtggaaaccaccggggtgaaatccatggttttgggacgtttcctgagtcagattcgcgaaaaactgattcagagaatttaccgcgggatcgagccgactttgccaaactggttcgcggtcacaaagaccagaaatggcgccggaggcgggaacaaggtggtggatgagtgctacatccccaattacttgctccccaaaacccagcctgagctccagtgggcgtggactaatatggaacagtatttaagcgcctgtttgaatctcacggagcgtaaacggttggtggcgcagcatctgacgcacgtgtcgcagacgcaggagcagaacaaagagaatcagaatcccaattctgatgcgccggtgatcagatcaaaaacttcagccaggtacatggagctggtcgggtggctcgtggacaaggggattacctcggagaagcagtggatccaggaggaccaggcctcatacatctccttcaatgcggcctccaactcgcggtcccaaatcaaggctgccttggacaatgcgggaaagattatgagcctgactaaaaccgcccccgactacctggtgggccagcagcccgtggaggacatttccagcaatcggatttataaaattttggaactaaacgggtacgatccccaatatgcggcttccgtctttctgggatgggccacgaaaaagttcggcaagaggaacaccatctggctgtttgggcctgcaactaccgggaagaccaacatcgcggaggccatagcccacactgtgcccttctacgggtgcgtaaactggaccaatgagaactttcccttcaacgactgtgtcgacaagatggtgatctggtgggaggaggggaagatgaccgccaaggtcgtggagtcggccaaagccattctcggaggaagcaaggtgcgcgtggaccagaaatgcaagtcctcggcccagatagacccgactcccgtgatcgtcacctccaacaccaacatgtgcgccgtgattgacgggaactcaacgaccttcgaacaccagcagccgttgcaagaccggatgttcaaatttgaactcacccgccgtctggatcatgactttgggaaggtcaccaagcaggaagtcaaagactttttccggtgggcaaaggatcacgtggttgaggtggagcatgaattctacgtcaaaaagggtggagccaagaaaagacccgcccccagtgacgcagatataagtgagcccaaacgggtgcgcgagtcagttgcgcagccatcgacgtcagacgcggaagcttcgatcaactacgcagacaggtaccaaaacaaatgttctcgtcacgtgggcatgaatctgatgctgtttccctgcagacaatgcgagagaatgaatcagaattcaaatatctgcttcactcacggacagaaagactgtttagagtgctttcccgtgtcagaatctcaacccgtttctgtcgtcaaaaaggcgtatcagaaactgtgctacattcatcatatcatgggaaaggtgccagacgcttgcactgcctgcgatctggtcaatgtggatttggatgactgcatctttgaacaataaatgatttaaatcaggtatggctgccgatggttatcttccagattggctcgaggacactctctctgaaggaataagacagtggtggaagctcaaacctggcccaccaccaccaaagcccgcagagcggcataaggacgacagcaggggtcttgtgcttcctgggtacaagtacctcggacccttcaacggactcgacaagggagagccggtcaacgaggcagacgccgcggccctcgagcacgacaaagcctacgaccggcagctcgacagcggagacaacccgtacctcaagtacaaccacgccgacgcggagtttcaggagcgccttaaagaagatacgtcttttgggggcaacctcggacgagcagtcttccaggcgaaaaagagggttcttgaacctctgggcctggttgaggaacctgttaagacggctccgggaaaaaagaggccggtagagcactctcctgtggagccagactcctcctcgggaaccggaaaggcgggccagcagcctgcaagaaaaagattgaattttggtcagactggagacgcagactcagtacctgacccccagcctctcggacagccaccagcagccccctctggtctgggaactaatacgatggctacaggcagtggcgcaccaatggcagacaataacgagggcgccgacggagtgggtaattcctcgggaaattggcattgcgattccacatggatgggcgacagagtcatcaccaccagcacccgaacctgggccctgcccacctacaacaaccacctctacaaacaaatttccagccaatcaggagcctcgaacgacaatcactactttggctacagcaccccttgggggtattttgacttcaacagattccactgccacttttcaccacgtgactggcaaagactcatcaacaacaactggggattccgacccaagagactcaacttcaagctctttaacattcaagtcaaagaggtcacgcagaatgacggtacgacgacgattgccaataaccttaccagcacggttcaggtgtttactgactcggagtaccagctcccgtacgtcctcggctcggcgcatcaaggatgcctcccgccgttcccagcagacgtcttcatggtgccacagtatggatacctcaccctgaacaacgggagtcaggcagtaggacgctcttcattttactgcctggagtactttccttctcagatgctgcgtaccggaaacaactttaccttcagctacacttttgaggacgttcctttccacagcagctacgctcacagccagagtctggaccgtctcatgaatcctctcatcgaccagtacctgtattacttgagcagaacaaacactccaagtggaaccaccacgcagtcaaggcttcagttttctcaggccggagcgagtgacattcgggaccagtctaggaactggcttcctggaccctgttaccgccagcagcgagtatcaaagacatctgcggataacaacaacagtgaatactcgtggactggagctaccaagtaccacctcaatggcagagactctctggtgaatccgggcccggccatggcaagccacaaggacgatgaagaaaagttttttcctcagagcggggttctcatctttgggaagcaaggctcagagaaaacaaatgtggacattgaaaaggtcatgattacagacgaagaggaaatcaggacaaccaatcccgtggctacggagcagtatggttctgtatctaccaacctccagagaggcaacagacaagcagctaccgcagatgtcaacacacaaggcgttcttccaggcatggtctggcaggacagagatgtgtaccttcaggggcccatctgggcaaagattccacacacggacggacattttcacccctctcccctcatgggtggattcggacttaaacaccctcctccacagattctcatcaagaacaccccggtacctgcgaatccttcgaccaccttcagtgcggcaaagtttgcttccttcatcacacagtactccacgggacaggtcagcgtggagatcgagtgggagctgcagaaggaaaacagcaaacgctggaatcccgaaattcagtacacttccaactacaacaagtctgttaatgtggactttactgtggacactaatggcgtgtattcagagcctcgccccattggcaccagatacctgactcgtaatctgtaattgcttgttaatcaataaaccgtttaattcgtttcagttgaactttggtctctgcgtatttctttcttatctagtttccatgctctagagtcctgtattagaggtcacgtgagtgttttgcgacattttgcgacaccatgtggtcacgctgggtatttaagcccgagtgagcacgcagggtctccattttgaagcgggaggtttgaacgcgcagccaccacggcggggttttacgagattgtgattaaggtccccagcgaccttgacgggcatctgcccggcatttctgacagctttgtgaactgggtggccgagaaggaatgggagttgccgccagattctgacatggatctgaatctgattgagcaggcacccctgaccgtggccgagaagctgcatcgctggcgtaatagcgaagaggcccgcaccgatcgcccttcccaacagttgcgcagcctgaatggcgaatggaattccagacgattgagcgtcaaaatgtaggtatttccatgagcgtttttcctgttgcaatggctggcggtaatattgttctggatattaccagcaaggccgatagtttgagttcttctactcaggcaagtgatgttattactaatcaaagaagtattgcgacaacggttaatttgcgtgatggacagactcttttactcggtggcctcactgattataaaaacacttctcaggattctggcgtaccgttcctgtctaaaatccctttaatcggcctcctgtttagctcccgctctgattctaacgaggaaagcacgttatacgtgctcgtcaaagcaaccatagtacgcgccctgtagcggcgcattaagcgcggcgggtgtggtggttacgcgcagcgtgaccgctacacttgccagcgccctagcgcccgctcctttcgctttcttcccttcctttctcgccacgttcgccggctttccccgtcaagctctaaatcgggggctccctttagggttccgatttagtgctttacggcacctcgaccccaaaaaacttgattagggtgatggttcacgtagtgggccatcgccctgatagacggtttttcgccctttgacgttggagtccacgttctttaatagtggactcttgttccaaactggaacaacactcaaccctatctcggtctattcttttgatttataagggattttgccgatttcggcctattggttaaaaaatgagctgatttaacaaaaatttaacgcgaattttaacaaaatattaacgtttacaatttaaatatttgcttatacaatcttcctgtttttggggcttttctgattatcaaccggggtacatatgattgacatgctagttttacgattaccgttcatcgattctcttgtttgctccagactctcaggcaatgacctgatagcctttgtagagacctctcaaaaatagctaccctctccggcatgaatttatcagctagaacggttgaatatcatattgatggtgatttgactgtctccggcctttctcacccgtttgaatctttacctacacattactcaggcattgcatttaaaatatatgagggttctaaaaatttttatccttgcgttgaaataaaggcttctcccgcaaaagtattacagggtcataatgtttttggtacaaccgatttagctttatgctctgaggctttattgcttaattttgctaattctttgccttgcctgtatgatttattggatgttggaattcctgatgcggtattttctccttacgcatctgtgcggtatttcacaccgcatatggtgcactctcagtacaatctgctctgatgccgcatagttaagccagccccgacacccgccaacacccgctgacgcgccctgacgggcttgtctgctcccggcatccgcttacagacaagctgtgaccgtctccgggagctgcatgtgtcagaggttttcaccgtcatcaccgaaacgcgcgagacgaaagggcctcgtgatacgcctatttttataggttaatgtcatgataataatggtttcttagacgtcaggtggcacttttcggggaaatgtgcgcggaacccctatttgtttatttttctaaatacattcaaatatgtatccgctcatgagacaataaccctgataaatgcttcaataatattgaaaaaggaagagtatgagtattcaacatttccgtgtcgcccttattcccttttttgcggcattttgccttcctgtttttgctcacccagaaacgctggtgaaagtaaaagatgctgaagatcagttgggtgcacgagtgggttacatcgaactggatctcaacagcggtaagatccttgagagttttcgccccgaagaacgttttccaatgatgagcacttttaaagttctgctatgtggcgcggtattatcccgtattgacgccgggcaagagcaactcggtcgccgcatacactattctcagaatgacttggttgagtactcaccagtcacagaaaagcatcttacggatggcatgacagtaagagaattatgcagtgctgccataaccatgagtgataacactgcggccaacttacttctgacaacgatcggaggaccgaaggagctaaccgcttttttgcacaacatgggggatcatgtaactcgccttgatcgttgggaaccggagctgaatgaagccataccaaacgacgagcgtgacaccacgatgcctgtagcaatggcaacaacgttgcgcaaactattaactggcgaactacttactctagcttcccggcaacaattaatagactggatggaggcggataaagttgcaggaccacttctgcgctcggcccttccggctggctggtttattgctgataaatctggagccggtgagcgtgggtctcgcggtatcattgcagcactggggccagatggtaagccctcccgtatcgtagttatctacacgacggggagtcaggcaactatggatgaacgaaatagacagatcgctgagataggtgcctcactgattaagcattggtaactgtcagaccaagtttactcatatatactttagattgatttaaaacttcatttttaatttaaaaggatctaggtgaagatcctttttgataatctcatgaccaaaatcccttaacgtgagttttcgttccactgagcgtcagaccccgtagaaaagatcaaaggatcttcttgagatcctttttttctgcgcgtaatctgctgcttgcaaacaaaaaaaccaccgctaccagcggtggtttgtttgccggatcaagagctaccaactctttttccgaaggtaactggcttcagcagagcgcagataccaaatactgtccttctagtgtagccgtagttaggccaccacttcaagaactctgtagcaccgcctacatacctcgctctgctaatcctgttaccagtggctgctgccagtggcgataagtcgtgtcttaccgggttggactcaagacgatagttaccggataaggcgcagcggtcgggctgaacggggggttcgtgcacacagcccagcttggagcgaacgacctacaccgaactgagatacctacagcgtgagctatgagaaagcgccacgcttcccgaagggagaaaggcggacaggtatccggtaagcggcagggtcggaacaggagagcgcacgagggagcttccagggggaaacgcctggtatctttatagtcctgtcgggtttcgccacctctgacttgagcgtcgatttttgtgatgctcgtcaggggggcggagcctatggaaaaacgccagcaacgcggcctttttacggttcctggccttttgctggccttttgctcacatgttctttcctgcgttatcccctgattctgtggataaccgtattaccgcctttgagtgagctgataccgctcgccgcagccgaacgaccgagcgcagcgagtcagtgagcgaggaagcggaagagcgcccaatacgcaaaccgcctctccccgcgcgttggccgattcattaatgca

SEQ ID NO: 1782 - DNA, 1085 bp, synthetic construct
  misc_feature 1..1085: note = Description of Artificial Sequence: Synthetic polynucleotide
  variation 611: note = n is a, c, g, or t
  variation 640: note = n is a, c, g, or t
  variation 1039: note = n is a, c, g, or t
  source 1..1085: mol_type = other DNA
tgcccacttacaacaaccatctctacaagcaaatctccagcvvmdcaggagctascaacgacaaccactactttggctacagcaccccttgggggtattttgactttaacagattccactgccacttctcaccacgtgactggcagcgactcattaacaacaactggggattccggcccaagaaactcagcttcaagctcttcaacatccaagttagaggggtcacgcagaacgatggcacgacgactattgccaataaccttaccagcacggttcaagtgtttacggactcggagtatcagctcccgtacgtgctcgggtcggcgcaccaaggctgtctcccgccgtttccagcggacgtcttcatggtccctcagtatggatacctcaccctgaacaacggaagtcaagcggtgggacgctcatccttttactgcctggagtacttcccttcgcagatgctaaggactggaaataacttccaattcagctataccttcgaggatgtaccttttcacagcagctacgctcacagccagagtttggatcgcttgatgaatcctcttattgatcagtatctgtactacctgaacagaacgcaargcamcvcnrgcggaacarccrvcmhsmrsvvsctgvngtttagccaggctgggcctcagtctatgtctttgcaggccagaaattggctacctgggccctgctaccggcaacagagactttcaamarycbmcrvcsrsaacaacaacagtrastttccttggmcagcggccagcamatatcatctcaatggccgcgactcgctggtgaatccaggaccagctatggccagtcacrrggacgatrmsgrsaratttttccctatgcacggcaatctaatatttggcaaasaarrcrscrvsrvarvcratrycgmsdwcgrsvrsgtaatgattacggatgaagaagagattcgtaccaccaatcctgtggcaacagagcagtatggaactgtggcaaataacttgcagrvsvvsmrsrvcvvscccacgdhtvvsrnsgtcvmscatcagggggccttacctggcatggtgtggcaagatcgt

SEQ ID NO: 1783 - protein, 620 aa, synthetic construct
  REGION 1..620: note = Description of Artificial Sequence: Synthetic polypeptide
  VARIANT 263..264: note = Xaa can be any naturally occurring amino acid
  VARIANT 267: note = Xaa can be any naturally occurring amino acid
  VARIANT 450..453: note = Xaa can be any naturally occurring amino acid
  VARIANT 456..460: note = Xaa can be any naturally occurring amino acid
  VARIANT 462: note = Xaa can be any naturally occurring amino acid
  VARIANT 491..495: note = Xaa can be any naturally occurring amino acid
  VARIANT 500: note = Xaa can be any naturally occurring amino acid
  VARIANT 504: note = Xaa can be any naturally occurring amino acid
  VARIANT 508: note = Xaa can be any naturally occurring amino acid
  VARIANT 528: note = Xaa can be any naturally occurring amino acid
  VARIANT 531..533: note = Xaa can be any naturally occurring amino acid
  VARIANT 546..557: note = Xaa can be any naturally occurring amino acid
  VARIANT 586..590: note = Xaa can be any naturally occurring amino acid
  VARIANT 593..595: note = Xaa can be any naturally occurring amino acid
  VARIANT 597: note = Xaa can be any naturally occurring amino acid
MAADGYLPDWLEDNLSEGIREWWALKPGVPQPKANQQHQDNRRGLVLPGYKYLGPGNGLDKGEPVNEADAAALEHDKAYDQQLKAGDNPYLKYNHADAEFQERLQEDTSFGGNLGRAVFQAKKRILEPLGLVEEAAKTAPGKKGAVDQSPQEPDSSSGVGKSGKQPARKRLNFGQTGDSESVPDPQPLGEPPAAPTSLGSNTMASGGGAPMADNNEGADGVGNSSGNWHCDSQWLGDRVITTSTRTWALPTYNNHLYKQISSXXGAXNDNHYFGYSTPWGYFDFNRFHCHFSPRDWQRLINNNWGFRPKKLSFKLFNIQVRGVTQNDGTTTIANNLTSTVQVFTDSEYQLPYVLGSAHQGCLPPFPADVFMVPQYGYLTLNNGSQAVGRSSFYCLEYFPSQMLRTGNNFQFSYTFEDVPFHSSYAHSQSLDRLMNPLIDQYLYYLNRTQXXXXGTXXXXXLXFSQAGPQSMSLQARNWLPGPCYRQQRLSXXXXXNNNSXFPWXAASXYHLNGRDSLVNPGPAMASHXDDXXXFFPMHGNLIFGKXXXXXXXXXXXXVMITDEEEIRTTNPVATEQYGTVANNLQXXXXXPTXXXVXHQGALPGMVWQDRDVYLQGPIWA

SEQ ID NO: 1784 - DNA, 1491 bp, synthetic construct
  misc_feature 1..1491: note = Description of Artificial Sequence: Synthetic polynucleotide
  source 1..1491: mol_type = other DNA
accaccagcaccagaacctgggccctgcccacttacaacaaccatctctacaagcaaatctccagccaatcaggagcttcaaacgacaaccactactttggctacagcaccccttgggggtattttgactttaacagattccactgccacttctcaccacgtgactggcagcgactcattaacaacaactggggattccggcccaagaaactcagcttcaagctcttcaacatccaagttagaggggtcacgcagaacgatggcacgacgactattgccaataaccttaccagcacggttcaagtgtttacggactcggagtatcagctcccgtacgtgctcgggtcggcgcaccaaggctgtctcccgccgtttccagcggacgtcttcatggtccctcagtatggatacctcaccctgaacaacggaagtcaagcggtgggacgctcatccttttactgcctggagtacttcccttcgcagatgctaaggactggaaataacttccaattcagctataccttcgaggatgtaccttttcacagcagctacgctcacagccagagtttggatcgcttgatgaatcctcttattgatcagtatctgtactacctgaacagaacgcaaggaacaacctctggaacaaccaaccaatcacggctgctttttagccaggctgggcctcagtctatgtctttgcaggccagaaattggctacctgggccctgctaccggcaacagagactttcaaagactgctaacgacaacaacaacagtaactttccttggacagcggccagcaaatatcatctcaatggccgcgactcgctggtgaatccaggaccagctatggccagtcacaaggacgatgaagaaaaatttttccctatgcacggcaatctaatatttggcaaagaagggacaacggcaagtaacgcagaattagataatgtaatgattacggatgaagaagagattcgtaccaccaatcctgtggcaacagagcagtatggaactgtggcaaataacttgcagagctcaaatacagctcccacgactggaactgtcaatcatcagggggccttacctggcatggtgtggcaagatcgtgacgtctaccttcaaggacctatctgggcaaagattcctcacacggatggacactttcatccttctcctctgatgggaggctttggactgaaacatccgcctcctcaaatcatgatcaaaaatactccggtaccggcaaatcctccgacgactttcagcccggccaagtttgcttcatttatcactcagtactccactggacaggtcagcgtggaaattgagtgggagctacagaaagaaaacagcaaacgttggaatccagagattcagtacacttccaactacaacaagtctgttaatgtggactttactgtagacactaatggtgtttatagtgaacctcgccctattggaacccggtatctcacacgaaacttgtga

SEQ ID NO: 1785 - protein, 482 aa, synthetic construct
  REGION 1..482: note = Description of Artificial Sequence: Synthetic polypeptide
TTSTRTWALPTYNNHLYKQISSQSGASNDNHYFGYSTPWYFDFNRFHCHFSPRDWQRLNNNWGFRPKKLSFKLFNIQRGVTQNDGTTTIANNLTSTQVFTDSEYQLPYVLGSAHQCLPPFPADVFMVPQYGYLTNNGSQAVGRSSFYCLEYFPQMLRTGNNFQFSYTFEDVPHSSYAHSQSLDRLMNPLIDYLYYLNRTQGTTSGTTNQSLLFSQAGPQSMSLQARNWLGPCYRQQRLSKTANDNNNSFPWTAASKYHLNGRDSLVNGPAMASHKDDEEKFFPMHGLIFGKEGTTASNAELDNVMITDEEEIRTTNPVATEQYGTVANNLQSSNTAPTTGTVNHQGALPGMVWQDRDVYLQGPIWAKIPHTDGHFHPSPLMGGFGLKHPPPQIMIKNTPVPANPPTTFSPAKFASFITQYSTGQVSVEIEWELQKENSKRWNPEIQYTSNYNKSVNVDFTVDTNGVYSEPRPIGTRYLTRNL

SEQ ID NO: 1786 - DNA, 1140 bp, synthetic construct
  misc_feature 1..1140: note = Description of Artificial Sequence: Synthetic polynucleotide
  variation 636: note = n is a, c, g, or t
  variation 665: note = n is a, c, g, or t
  variation 1064: note = n is a, c, g, or t
  source 1..1140: mol_type = other DNA
accaccagcaccagaacctgggccctgcccacttacaacaaccatctctacaagcaaatctccagcvvmdcaggagctascaacgacaaccactactttggctacagcaccccttgggggtattttgactttaacagattccactgccacttctcaccacgtgactggcagcgactcattaacaacaactggggattccggcccaagaaactcagcttcaagctcttcaacatccaagttagaggggtcacgcagaacgatggcacgacgactattgccaataaccttaccagcacggttcaagtgtttacggactcggagtatcagctcccgtacgtgctcgggtcggcgcaccaaggctgtctcccgccgtttccagcggacgtcttcatggtccctcagtatggatacctcaccctgaacaacggaagtcaagcggtgggacgctcatccttttactgcctggagtacttcccttcgcagatgctaaggactggaaataacttccaattcagctataccttcgaggatgtaccttttcacagcagctacgctcacagccagagtttggatcgcttgatgaatcctcttattgatcagtatctgtactacctgaacagaacgcaargcamcvcnrgcggaacarccrvcmhsmrsvvsctgvngtttagccaggctgggcctcagtctatgtctttgcaggccagaaattggctacctgggccctgctaccggcaacagagactttcaamarycbmcrvcsrsaacaacaacagtrastttccttggmcagcggccagcamatatcatctcaatggccgcgactcgctggtgaatccaggaccagctatggccagtcacrrggacgatrmsgrsaratttttccctatgcacggcaatctaatatttggcaaasaarrcrscrvsrvarvcratrycgmsdwcgrsvrsgtaatgattacggatgaagaagagattcgtaccaccaatcctgtggcaacagagcagtatggaactgtggcaaataacttgcagrvsvvsmrsrvcvvscccacgdhtvvsrnsgtcvmscatcagggggccttacctggcatggtgtggcaagatcgtgacgtctaccttcaaggacctatctgggca

SEQ ID NO: 1787 - protein, 620 aa, synthetic construct; identical to SEQ ID NO: 1783
  REGION 1..620: note = Description of Artificial Sequence: Synthetic polypeptide
  VARIANT 263..264: note = Xaa can be any naturally occurring amino acid
  VARIANT 267: note = Xaa can be any naturally occurring amino acid
  VARIANT 450..453: note = Xaa can be any naturally occurring amino acid
  VARIANT 456..460: note = Xaa can be any naturally occurring amino acid
  VARIANT 462: note = Xaa can be any naturally occurring amino acid
  VARIANT 491..495: note = Xaa can be any naturally occurring amino acid
  VARIANT 500: note = Xaa can be any naturally occurring amino acid
  VARIANT 504: note = Xaa can be any naturally occurring amino acid
  VARIANT 508: note = Xaa can be any naturally occurring amino acid
  VARIANT 528: note = Xaa can be any naturally occurring amino acid
  VARIANT 531..533: note = Xaa can be any naturally occurring amino acid
  VARIANT 546..557: note = Xaa can be any naturally occurring amino acid
  VARIANT 586..590: note = Xaa can be any naturally occurring amino acid
  VARIANT 593..595: note = Xaa can be any naturally occurring amino acid
  VARIANT 597: note = Xaa can be any naturally occurring amino acid

SEQ ID NO: 1788 - protein, 738 aa, synthetic construct; identical to SEQ ID NO: 7
  REGION 1..738: note = Description of Artificial Sequence: Synthetic polypeptide

SEQ ID NO: 1789 - DNA, 2258 bp, synthetic construct
  misc_feature 1..2258: note = Description of Artificial Sequence: Synthetic polynucleotide
  source 1..2258: mol_type = other DNA
tcgaggacaacctctctgagggcattcgcgagtggtgggacttgaaacctggagccccgaaacccaaagccaaccagcaaaagcaggacgacggccggggtctggtgcttcctggctacaagtacctcggacccttcaacggactcgacaagggggagcccgtcaacgcggcggacgcagcggccctcgagcacgacaaggcctacgaccagcagctcaaagcgggtgacaatccgtacctgcggtataaccacgccgacgccgagtttcaggagcgtctgcaagaagatacgtcttttgggggcaacctcgggcgagcagtcttccaggccaagaagcgggttctcgaacctctcggtctggttgaggaaggcgctaagacggctcctggaaagaagagaccggtagagccatcaccccagcgttctccagactcctctacgggcatcggcaagaaaggccagcagcccgcgaaaaagagactcaactttgggcagactggcgactcagagtcagtgcccgaccctcaaccaatcggagaaccccccgcaggcccctctggtctgggatctggtacaatggctgcaggcggtggcgctccaatggcagacaataacgaaggcgccgacggagtgggtagttcctcaggaaattggcattgcgattccacatggctgggcgacagagtcatcaccaccagcacccgaacctgggccctccccacctacaacaaccacctctacaagcaaatctccaacgggacttcgggaggaagcaccaacgacaacacctacttcggctacagcaccccctgggggtattttgactttaacagattccactgccacttctcaccacgtgactggcagcgactcatcaacaacaactggggattccggcccaagagactcaacttcaagctcttcaacatccaggtcaaggaggtcacgcagaatgaaggcaccaagaccatcgccaataaccttaccagcacgattcaggtctttacggactcggaataccagctcccgtacgtcctcggctctgcgcaccagggctgcctgcctccgttcccggcggacgtcttcatgattcctcagtacgggtacctgactctgaacaatggcagtcaggccgtgggccgttcctccttctactgcctggagtactttccttctcaaatgctgagaacgggcaacaactttgagttcagctaccagtttgaggacgtgccttttcacagcagctacgcgcacagccaaagcctggaccggctgatgaaccccctcatcgaccagtacctgtactacctgtctcggactcagtccacgggaggtaccgcaggaactcagcagttgctattttctcaggccgggcctaataacatgtcggctcaggccaaaaactggctacccgggccctgctaccggcagcaacgcgtctccacgacactgtcgcaaaataacaacagcaactttgcctggaccggtgccaccaagtatcatctgaatggcagagactctctggtaaatcccggtgtcgctatggcaacccacaaggacgacgaagagcgattttttccgtccagcggagtcttaatgtttgggaaacagggagctggaaaagacaacgtggactatagcagcgttatgctaaccagtgaggaagaaattaaaaccaccaacccagtggccacagaacagtacggcgtggtggccgataacctgcaacagcaaaacgccgctcctattgtaggggccgtcaacagtcaaggagccttacctggcatggtctggcagaaccgggacgtgtacctgcagggtcctatctgggccaagattcctcacacggacggaaactttcatccctcgccgctgatgggaggctttggactgaaacacccgcctcctcagatcctgattaagaatacacctgttcccgcggatcctccaactaccttcagtcaagctaagctggcgtcgttcatcacgcagtacagcaccggacaggtcagcgtggaaattgaatgggagctgcagaaagaaaacagcaaacgctggaacccagagattcaatacacttccaactactacaaatctacaaatgtggactttgctgttaacacagatggcacttattctgagcctcgccccatcggcacccgttacctcacccgtaatctgtaattgcttgttaatcaataaaccggttgattcgtttcagttgaactttggtctctgcgaagggcgaattcgttt

SEQ ID NO: 1790 - DNA, 2208 bp, synthetic construct
  misc_feature 1..2208: note = Description of Artificial Sequence: Synthetic polynucleotide
  source 1..2208: mol_type = other DNA
atggctgccgatggttatcttccagattggctcgaggacactctctctgaaggaataagacagtggtggaagctcaaacctggcccaccaccaccaaagcccgcagagcggcataaggacgacagcaggggtcttgtgcttcctgggtacaagtacctcggacccttcaacggactcgacaagggagagccggtcaacgaggcagacgccgcggccctcgagcacgacaaagcctacgaccggcagctcgacagcggagacaacccgtacctcaagtacaaccacgccgacgcggagtttcaggagcgccttaaagaagatacgtcttttgggggcaacctcggacgagcagtcttccaggcgaaaaagagggttcttgaacctctgggcctggttgaggaacctgttaagacggctccgggaaaaaagaggccggtagagcactctcctgtggagccagactcctcctcgggaaccggaaaggcgggccagcagcctgcaagaaaaagattgaattttggtcagactggagacgcagactcagtacctgacccccagcctctcggacagccaccagcagccccctctggtctgggaactaatacgatggctacaggcagtggcgcaccaatggcagacaataacgagggcgccgacggagtgggtaattcctcgggaaattggcattgcgattccacatggatgggcgacagagtcatcaccaccagcacccgaacctgggccctgcccacctacaacaaccacctctacaaacaaatttccagccaatcaggagcctcgaacgacaatcactactttggctacagcaccccttgggggtattttgacttcaacagattccactgccacttttcaccacgtgactggcaaagactcatcaacaacaactggggattccgacccaagagactcaacttcaagctctttaacattcaagtcaaagaggtcacgcagaatgacggtacgacgacgattgccaataaccttaccagcacggttcaggtgtttactgactcggagtaccagctcccgtacgtcctcggctcggcgcatcaaggatgcctcccgccgttcccagcagacgtcttcatggtgccacagtatggatacctcaccctgaacaacgggagtcaggcagtaggacgctcttcattttactgcctggagtactttccttctcagatgctgcgtaccggaaacaactttaccttcagctacacttttgaggacgttcctttccacagcagctacgctcacagccagagtctggaccgtctcatgaatcctctcatcgaccagtacctgtatttcttaagcagaacaaacactccaagtggaaccaccacgcagtcaaggcttcagttttctcaggccggagcgagtgacattcgggaccagtctaggaactggcttcctggaccctgttaccgccagcagcgagtatcaaagacatctgcggataacaacaacagtgaattctcgtggaccggtgctaccaagtaccacctcaatggcagagactctctggtgaatccgggcccggccatggcaagccacaaggacgatgaagaaaagttttttcctcagagcggggttctcatctttgggaagcaaggctcagagaaaacaaatgtggacattgaaaaggtcatgattacagacgaagaggaaatcaggacaaccaatcccgtggctacggagcagtatggttctgtatctaccaacctccagagaggcaacagacaagcagctaccgcagatgtcaacacacaaggcgttcttccaggcatggtctggcaggacagagatgtgtaccttcaggggcccatctgggcaaagattccacacacggacggacattttcacccctctcccctcatgggtggattcggacttaaacaccctcctccacagattctcatcaagaacaccccggtacctgcgaatccttcgaccaccttcagtgcggcaaagtttgcttccttcatcacacagtactccacgggacaggtcagcgtggagatcgagtgggagctgcagaaggaaaacagcaaacgctggaatcccgaaattcagtacacttccaactacaacaagtctgttaatgtggactttactgtggacactaatggcgtgtattcagagcctcgccccattggtaccagattcctgactcgtaatctgtaa

SEQ ID NO: 1791 - protein, 737 aa, synthetic construct
  REGION 1..737: note = Description of Artificial Sequence: Synthetic polypeptide
MAADGYLPDWLEDNLSEGIREWWDLKPGAPKPKANQQKQDNGRGLVLPGYKYLGPFNGLDKGEPVNAADAAALEHDKAYDQQLQAGDNPYLRYNHADAEFQERLQEDTSFGGNLGRAVFQAKKRVLEPLGLVESPVKTAPGKKRPVEPSPQRSPDSSTGIGKKGQQPAKKRLNFGQTGDSESVPDPQPIGEPPAAPSGVGPNTMAAGGGAPMADNNEGADGVGSSSGNWHCDSTWLGDRVITTSTRTWALPTYNNHLYKQISNGTSGGSTNDNTYFGYSTPWGYFDFNRFHCHFSPRDWQRLINNNWGFRPKRLNFKLFNIQVKEVTQNEGTKTIANNLTSTIQVFTDSEYQLPYVLGSAHQGCLPPFPADVFMIPQYGYLTLNNGSQAVGRSSFYCLEYFPSQMLRTGNNFEFSYNFEDVPFHSSYAHSQSLDRLMNPLIDQYLYYLSRTQSTGGTAGTQQLLFSQAGPNNMSAQAKNWLPGPCYRQQRVSTTLSQNNNSNFAWTGATKYHLNGRDSLVNPGVAMATHKDDEERFFPSSGVLMFGKQGAGKDNVDYSSVMLTSEEEIKTTNPVATEQYGWADNLQQQNAAPIVGAVNSQGALPGMVWQNRDVYLQGPIWAKIPHTDGNFHPSPLMGGFGLKHPPPQILIKNTPVPADPPTTFNQAKLASFITQYSTGQVSVEIEWELQKENSKRWNPEIQYTSNYYKSTNVDFAVNTEGTYSEPRPIGTRYLTRNL

SEQ ID NO: 1792 - DNA, 2211 bp, synthetic construct
  misc_feature 1..2211: note = Description of Artificial Sequence: Synthetic polynucleotide
  source 1..2211: mol_type = other DNA
atggctgccgatggttatcttccagattggctcgaggacactctctctgaaggaataagacagtggtggaagctcaaacctggcccaccaccaccaaagcccgcagagcggcataaggacgacagcaggggtcttgtgcttcctgggtacaagtacctcggacccttcaacggactcgacaagggagagccggtcaacgaggcagacgccgcggccctcgagcacgacaaagcctacgaccggcagctcgacagcggagacaacccgtacctcaagtacaaccacgccgacgcggagtttcaggagcgccttaaagaagatacgtcttttgggggcaacctcggacgagcagtcttccaggcgaaaaagagggttcttgaacctctgggcctggttgaggaacctgttaagacggctccgggaaaaaagaggccggtagagcactctcctgtggagccagactcctcctcgggaaccggaaaggcgggccagcagcctgcaagaaaaagattgaattttggtcagactggagacgcagactcagtacctgacccccagcctctcggacagccaccagcagccccctctggtctgggaactaatacgatggctacaggcagtggcgcaccaatggcagacaataacgagggcgccgacggagtgggtaattcctcgggaaattggcattgcgattccacatggatgggcgacagagtcatcaccaccagcacccgaacctgggccctgcccacctacaacaaccacctctacaaacaaatttccagcgcttcaacgggagcctcgaacgacaatcactactttggctacagcaccccttgggggtattttgacttcaacagattccactgccacttttcaccacgtgactggcaaagactcatcaacaacaactggggattccgacccaagagactcaacttcaagctctttaacattcaagtcaaagaggtcacgcagaatgacggtacgacgacgattgccaataaccttaccagcacggttcaggtgtttactgactcggagtaccagctcccgtacgtcctcggctcggcgcatcaaggatgcctcccgccgttcccagcagacgtcttcatggtgccacagtatggatacctcaccctgaacaacgggagtcaggcagtaggacgctcttcattttactgcctggagtactttccttctcagatgctgcgtaccggaaacaactttaccttcagctacacttttgaggacgttcctttccacagcagctacgctcacagccagagtctggaccgtctcatgaatcctctcatcgaccagtacctgtattacttgagcagaacaaacactccaagtggaaccaccacgcagtcaaggcttcagttttctcaggccggagcgagtgacattcgggaccagtctaggaactggcttcctggaccctgttaccgccagcagcgagtatcaaagacatctgcggataacaacaacagtgaatactcgtggactggagctaccaagtaccacctcaatggcagagactctctggtgaatccgggcccggccatggcaagccacaaggacgatgaagaaaagttttttcctcagagcggggttctcatctttgggaagcaaggctcagagaaaacaaatgtggacattgaaaaggtcatgattacagacgaagaggaaatcaggacaaccaatcccgtggctacggagcagtatggttctgtatctaccaacctccagagaggcaacagacaagcagctaccgcagatgtcaacacacaaggcgttcttccaggcatggtctggcaggacagagatgtgtaccttcaggggcccatctgggcaaagattccacacacggacggacattttcacccctctcccctcatgggtggattcggacttaaacaccctcctccacagattctcatcaagaacaccccggtacctgcgaatccttcgaccaccttcagtgcggcaaagtttgcttccttcatcacacagtactccacgggacaggtcagcgtggagatcgagtgggagctgcagaaggaaaacagcaaacgctggaatcccgaaattcagtacacttccaactacgccaagtctgtcaatgtggactttactgtggacaataatggcgtgtattcagagcctcgccccattggcaccagatacctgactcgtaatctgtaa

SEQ ID NO: 1793 - DNA, 2208 bp, synthetic construct
  misc_feature 1..2208: note = Description of Artificial Sequence: Synthetic polynucleotide
  source 1..2208: mol_type = other DNA
atggctgccgatggttatcttccagattggctcgaggacaacctctctgagggcattcgcgagtggtgggacttgaaacctggagccccgaagcccaaagccaaccagcaaaagcaggacgacggccggggtctggtgcttcctggctacaagtacctcggacccttcaacggactcgacaagggggagcccgtcaacgcggcggacgcagcggccctcgagcacgacaaggcctacgaccagcagctcaaagcgggtgacaatccgtacctgcggtataaccacgccgacgccgagtttcaggagcgtctgcaagaagatacgtcttttgggggcaacctcgggcgagcagtcttccaggccaagaagcgggttctcgaacctctcggtctggttgaggaaggcgctaagacggctcctggaaagaaacgtccggtagagcagtcgccacaagagccagactcctcctcgggcatcggcaagacaggccagcagcccgctaaaaagagactcaattttggtcagactggcgactcagagtcagtccccgatccacaacctctcggagaacctccagcaacccccgctgctgtgggacctactacaatggcttcaggcggtggcgcaccaatggcagacaataacgaaggcgccgacggagtgggtaatgcctcaggaaattggcattgcgattccacatggctgggcgacagagtcatcaccaccagcacccgcacctgggccttgcccacctacaataaccacctctacaagcaaatctccagtgcttcaggggccagcaacgacaaccactacttcggctacagcaccccctgggggtattttgatttcaacagattccactgccacttttcaccacgtgactggcagcgactcatcaacaacaattggggattccggcccaagagactcaacttcaaactcttcaacatccaagtcaaggaggtcacgacgaatgatggcgtcacaaccatcgctaataaccttaccagcacggttcaagtcttctcggactcggagtaccagcttccgtacgtcctcggctctgcgcaccagggctgcctccctccgttcccggcggacgtgttcatgattccgcaatacggctacctgacgctcaacaatggcagccaagccgtgggacgttcatccttttactgcctggaatatttcccttctcagatgctgagaacgggcaacaactttaccttcagctacacctttgaggaagtgcctttccacagcagctacgcgcacagccagagcctggaccggctgatgaatcctctcatcgaccaatacctgtattacctgaacagaactcaaaatcagtccggaagtgcccaaaacaaggacttgctgtttagccgtgggtctccagctggcatgtctgttcagcccaaaaactggctacctggaccctgttatcggcagcagcgcgtttctaaaacaaaaacagacaacaacaacagcaattttacctggactggtgcttcaaaatataacctcaatgggcgtgaatccatcatcaaccctggcactgctatggcctcacacaaagacgacgaagacaagttctttcccatgagcggtgtcatgatttttggaaaagagagcgccggagcttcaaacactgcattggacaatgtcatgattacagacgaagaggaaattaaagccactaaccctgtggccaccgaaagatttgggaccgtggcagtcaatttccagagcagcagcacagaccctgcgaccggagatgtgcatgctatgggagcattacctggcatggtgtggcaagatagagacgtgtacctgcagggtcccatttgggccaaaattcctcacacagatggacactttcacccgtctcctcttatgggcggctttggactcaagaacccgcctcctcagatcctcatcaaaaacacgcctgttcctgcgaatcctccggcggagttttcagctacaaagtttgcttcattcatcacccaatactccacaggacaagtgagtgtggaaattgaatgggagctgcagaaagaaaacagcaagcgctggaatcccgaagtgcagtacacatccaattatgcaaaatctgccaacgttgattttactgtggacaacaatggactttatactgagcctcgccccattggcacccgttaccttacccgtcccctgtaa

SEQ ID NO: 1794 - DNA, 2205 bp, synthetic construct
  misc_feature 1..2205: note = Description of Artificial Sequence: Synthetic polynucleotide
  source 1..2205: mol_type = other DNA
atggctgccgatggttatcttccagattggctcgaggacaacctctdgagggcattcgcgagtggtgggacttgaaacctggagccccgaaacccaaagccaaccagcaaaagcaggacgacggccggggtdggtgcttcctggctacaagtacctcggacccttcaacggactcgacaagggggagcccgtcaacgcggcggatgcagcggccctcgagcacgacaaggcctacgaccagcagctcaaagcgggtgacaatccgtacctgcggtataaccacgccgacgccgagtttcaggagcgtctgcaagaagatacgtcttttgggggcaacctcgggcgagcagtcttccaggccaagaagagggttctcgaaccttttggtdggttgaggaaggtgctaagacggctcctggaaagaaacgtccggtagagcagtcgccacaagagccagactcctcctcgggcattggcaagacaggccagcagcccgctaaaaagagactcaattttggtcagactggcgactcagagtcagtccccgacccacaacctctcggagaacctccagcaacccccgctgctgtgggacctactacaatggcttcaggcggtggcgcaccaatggcagacaataacgaaggcgccgacggagtgggtaatgcctcaggaaattggcattgcgattccacatggctgggcgacagagtcatcaccaccagcacccgaacatgggccttgcccacctataacaaccacctctacaagcaaatctccagtgcttcaggggccagcaacgacaaccactacttcggctacagcaccccctgggggtattttgatttcaacagattccactgccatttctcaccacgtgactggcagcgactcatcaacaacaattggggattccggcccaagagactcaacttcaagctcttcaacatccaagtcaaggaggtcacgacgaatgatggcgtcacgaccatcgctaataaccttaccagcacggttcaagtcttctcggactcggagtaccagttgccgtacgtcctcggctctgcgcaccagggctgcctccctccgttcccggcggacgtgttcatgattccgcagtacggctacctaacgctcaacaatggcagccaggcagtgggacggtcatccttttactgcctggaatatttcccatcgcagatgctgagaacgggcaataactttaccttcagctacaccttcgaggacgtgcctttccacagcagctacgcgcacagccagagcctggaccggctgatgaatcctctcatcgaccagtacctgtattacctgaacagaactcagaatcagtccggaagtgcccaaaacaaggacttgctgtttagccgggggtctccagctggcatgtctgttcagcccaaaaactggctacctggaccctgttaccggcagcagcgcgtttctaaaacaaaaacagacaacaacaacagcaactttacctggactggtgcttcaaaatataaccttaatgggcgtgaatctataatcaaccctggcactgctatggcctcacacaaagacgacaaagacaagttctttcccatgagcggtgtcatgatttttggaaaggagagcgccggagcttcaaacactgcattggacaatgtcatgatcacagacgaagaggaaatcaaagccactaaccccgtggccaccgaaagatttgggactgtggcagtcaatctccagagcagcagcacagaccctgcgaccggagatgtgcatgttatgggagccttacctggaatggtgtggcaagacagagacgtatacctgcagggtcctatttgggccaaaattcctcacacggatggacactttcacccgtctcctctcatgggcggctttggacttaagcacccgcctcctcagatcctcatcaaaaacacgcctgttcctgcgaatcctccggcagagttttcggctacaaagtttgcttcattcatcacccagtattccacaggacaagtgagcgtggagattgaatgggagctgcagaaagaaaacagcaaacgctggaatcccgaagtgcagtatacatctaactatgcaaaatctgccaacgttgatttcactgtggacaacaatggactttatactgagcctcgccccattggcacccgttacctcacccgtcccctgtaa

SEQ ID NO: 1795 - DNA, 2208 bp, synthetic construct
  misc_feature 1..2208: note = Description of Artificial Sequence: Synthetic polynucleotide
  source 1..2208: mol_type = other DNA
atggctgccgatggttatcttccagattggctcgaggacaacctctctgagggcattcgcgagtggtgggacttgaaacctggagccccgaaacccaaagccaaccagcaaaagcaggacgacggccggggtctggtgcttcctggctacaagtacctcggacccttcaacggactcgacaagggggagcccgtcaacgcggcggatgcagcggccctcgagcacgacaaggcctacgaccagcagctcaaagcgggtgacaatccgtacctgcggtataaccacgccgacgccgagtttcaggagcgtctgcaagaagatacgtcttttgggggcaacctcgggcgagcagtcttccaggccaagaagagggttctcgaaccttttggtctggttgaggaaggtgctaagacggctcctggaaagaaacgtccggtagagcagtcgccacaagagccagactcctcctcgggcattggcaagacaggccagcagcccgctaaaaagagactcaattttggtcagactggcgactcagagtcagtccccgacccacaacctctcggagaacctccagcaacccccgctgctgtgggacctactacaatggcttcaggcggtggcgcaccaatggcagacaataacgaaggcgccgacggagtgggtaatgcctcaggaaattggcattgcgattccacatggctgggcgacagagtcatcaccaccagcacccgaacatgggccttgcccacctataacaaccacctctacaagcaaatctccagtgcttcaggggccagcaacgacaaccactacttcggctacagcaccccctgggggtattttgatttcaacagattccactgccatttctcaccacgtgactggcagcgactcatcaacaacaattggggattccggcccaagagactcaacttcaagctcttcaacatccaagtcaaggaggtcacgacgaatgatggcgtcacgaccatcgctaataaccttaccagcacggttcaagtcttctcggactcggagtaccagttgccgtacgtcctcggctctgcgcaccagggctgcctccctccgttcccggcggacgtgttcatgattccgcagtacggctacctaacgctcaacaatggcagccaggcagtgggacggtcatccttttactgcctggaatatttcccatcgcagatgctgagaacgggcaataactttaccttcagctacaccttcgaggacgtgcctttccacagcagctacgcgcacagccagagcctggaccggctgatgaatcctctcatcgaccagtacctgtattacctgaacagaactcagaatcagtccggaagtgcccaaaacaaggacttgctgtttagccgggggtctccagctggcatgtctgttcagcccaaaaactggctacctggaccctgttaccggcagcagcgcgtttctaaaacaaaaacagacaacaacaacagcaactttacctggactggtgcttcaaaatataaccttaatgggcgtgaatctataatcaaccctggcactgctatggcctcacacaaagacgacgaagacaagttctttcccatgagcggtgtcatgatttttggaaaggagagcgccggagcttcaaacactgcattggacaatgtcatgatcacagacgaagaggaaatcaaagccactaaccccgtggccaccgaaagatttgggactgtggcagtcaatctccagagcagcagcacagaccctgcgaccggagatgtgcatgttatgggagccttacctggaatggtgtggcaagacagagacgtatacctgcagggtcctatttgggccaaaattcctcacacggatggacactttcacccgtctcctctcatgggcggctttggacttaagcacccgcctcctcagatcctcatcaaaaacacgcctgttcctgcgaatcctccggcagagttttcggctacaaagtttgcttcattcatcacccagtattccacaggacaagtgagcgtggagattgaatgggagctgcagaaagaaaacagcaaacgctggaatcccgaagtgcagtatacatctaactatgcaaaatctgccaacgttgatttcactgtggacaacaatggactttatactgagcctcgccccattggcacccgttacctcacccgtcccctgtaa

SEQ ID NO: 1796 - DNA, 2208 bp, synthetic construct
  misc_feature 1..2208: note = Description of Artificial Sequence: Synthetic polynucleotide
  source 1..2208: mol_type = other DNA
atggctgccgatggttatcttccagattggctcgaggacactctctctgaaggaataagacagtggtggaagctcaaacctggcccaccaccaccaaagcccgcagagcggcataaggacgacagcaggggtcttgtgcttcctgggtacaagtacctcggacccttcaacggactcgacaagggagagccggtcaacgaggcagacgccgcggccctcgagcacgacaaagcctacgaccggcagctcgacagcggagacaacccgtacctcaagtacaaccacgccgacgcggagtttcaggagcgccttaaagaagatacgtcttttgggggcaacctcggacgagcagtcttccaggcgaaaaagagggttcttgaacctctgggcctggttgaggaacctgttaagacggctccgggaaaaaagaggccggtagagcactctcctgtggagccagactcctcctcgggaaccggaaaggcgggccagcagcctgcaagaaaaagattgaattttggtcagactggagacgcagactcagtacctgacccccagcctctcggacagccaccagcagccccctctggtctgggaactaatacgatggctacaggcagtggcgcaccaatggcagacaataacgagggcgccgacggagtgggtaattcctcgggaaattggcattgcgattccacatggatgggcgacagagtcatcaccaccagcacccgaacctgggccctgcccacctacaacaaccacctctacaaacaaatttccagccaatcaggagcctcgaacgacaatcactactttggctacagcaccccttgggggtattttgacttcaacagattccactgccacttttcaccacgtgactggcaaagactcatcaacaacaactggggattccgacccaagagactcaacttcaagctctttaacattcaagtcaaagaggtcacgcagaatgacggtacgacgacgattgccaataaccttaccagcacggttcaggtgtttactgactcggagtaccagctcccgtacgtcctcggctcggcgcatcaaggatgcctcccgccgttcccagcagacgtcttcatggtgccacagtatggatacctcaccctgaacaacgggagtcaggcagtaggacgctcttcattttactgcctggagtactttccttctcagatgctgcgtaccggaaacaactttaccttcagctacacttttgaggacgttcctttccacagcagctacgctcacagccagagtctggaccgtctcatgaatcctctcatcgaccagtacctgtattacttgagcagaacaaacactccaagtggaaccaccacgcagtcaaggcttcagttttctgtggccggacccagtaacatggctgtccagggaaggaactggcttcctggaccctgttaccgccagcagcgagtatcaaagacatctgcggataacaacaacagtgaatttgcttggactggagctaccaagtaccacctcaatggcagagactctctggtgaatccgggcccggccatggcaagccacaaggacgatgaagaaaagttttttcctcagagcggggttctcatctttgggaagcaaggctcagagaaaacaaatgtggacattgaaaaggtcatgattacagacgaagaggaaatcaggacaaccaatcccgtggctacggagcagtatggttctgtatctaccaacctccagcaacagaacacagcaccagctaccgcagatgtcaacacacaaggcgttcttccaggcatggtctggcaggacagagatgtgtaccttcaggggcccatctgggcaaagattccacacacggacggacattttcacccctctcccctcatgggtggattcggacttaaacaccctcctccacagattctcatcaagaacaccccggtacctgcgaatccttcgaccaccttcagtgcggcaaagtttgcttccttcatcacacagtactccacgggacaggtcagcgtggagatcgagtgggagctgcagaaggaaaacagcaaacgctggaatcccgaaattcagtacacttccaactacaacaagtctgttaatgtggactttactgtggacactaatggcgtgtattcagagcctcgccccattggcaccagatacctgactcgtaatctgtaa

SEQ ID NO: 1797 - protein, 735 aa, synthetic construct
  REGION 1..735: note = Description of Artificial Sequence: Synthetic polypeptide
MAADGYLPDWLEDTLSEGIRQWWKLKPGPPPPKPAERHKDDSRGLVLPGYKYLGPFNGLDKGEPVNEADAAALEHDKAYDRQLDSGDNPYLKYNHADAEFQERLKEDTSFGGNLGRAVFQAKKRVLEPLGLVEEPVKTAPGKKRPVEHSPVEPDSSSGTGKAGQQPARKRLNFGQTGDADSVPDPQPLGQPPAAPSGLGTNTMATGSGAPMADNNEGADGVGNSSGNWHCDSTWMGDRVITTSTRTWALPTYNNHLYKQISSQSGASNDNHYFGYSTPWGYFDFNRFHCHFSPRDWQRLINNNWGFRPKRLNFKLFNIQVKEVTQNDGTTTIANNLTSTVQVFTDSEYQLPYVLGSAHQGCLPPFPADVFMVPQYGYLTLNNGSQAVGRSSFYCLEYFPSQMLRTGNNFTFSYTFEDVPFHSSYAHSQSLDRLMNPLIDQYLYYLSRTNTPSGTTTQSRLQFSVAGPSNMAVQGRNWLPGPCYRQQRVSKTSADNNNSEFAWTGATKYHLNGRDSLVNPGPAMASHKDDEEKFFPQSGVLIFGKQGSEKTNVDIEKVMITDEEEIRTTNPVATEQYGSVSTNLQQQNTAPATADVNTQGVLPGMVWQDRDVYLQGPIWAKIPHTDGHFHPSPLMGGFGLKHPPPQILIKNTPVPANPSTTFSAAKFASFITQYSTGQVSVEIEWELQKENSKRWNPEIQYTSNYNKSVNVDFTVDTNGVYSEPRPIGTRYLTRNL

SEQ ID NO: 1798 - DNA, 2208 bp, synthetic construct
  misc_feature 1..2208: note = Description of Artificial Sequence: Synthetic polynucleotide
  source 1..2208: mol_type = other DNA
atggctgccgatggttatcttccagattggctcgaggacactctctctgaaggaataagacagtggtggaagctcaaacctggcccaccaccaccaaagcccgcagagcggcataaggacgacagcaggggtcttgtgcttcctgggtacaagtacctcggacccttcaacggactcgacaagggagagccggtcaacgaggcagacgccgcggccctcgagcacgacaaagcctacgaccggcagctcgacagcggagacaacccgtacctcaagtacaaccacgccgacgcggagtttcaggagcgccttaaagaagatacgtcttttgggggcaacctcggacgagcagtcttccaggcgaaaaagaggattcttgaacctctgggcctggttgaggaacctgttaagacggctccgggaaaaaagaggccggtagagcactctcctgcggagccagactcctcctcgggaaccggaaagtcgggccagcagcctgcaagaaaaagattgaattttggtcagactggagacgcagactcagtacctgacccccagcctctcggacagccaccagcagccccctctggtctgggaactaatacgatggcttcaggcagtggcgcaccaatggcagacaataacgagggcgccgacggagtgggtaattcctcgggaaattggcattgcgattccacatggatgggcgacagagtcatcaccaccagcacccgaacctgggccctgcccacctacaacaaccacctctacaaacaaatttccagccaatcaggagcctcgaacgacaatcactactttggctacagcaccccttgggggtattttgacttcaacagattccactgccacttttcaccacgtgactggcaaagactcatcaacaacaactggggattccgacccaagagactcagcttcaagctctttaacattcaagtcaaagaggtcacgcagaatgacggtacgacgacgattgccaataaccttaccagcacggttcaggtgtttactgactcggagtaccagctcccgtacgtcctcggctcggcgcatcaaggatgcctcccgccgttcccagcagacgtcttcatggtgccacagtatggatacctcaccctgaacaacgggagtcaggcagtaggacgctcttcattttactgcctggagtactttccttctcagatgctgcgtaccggaaacaactttaccttcagctacacttttgaggacgttcctttccacagcagctacgctcacagccagagtctggaccgtctcatgaatcctctcatcgaccagtacctgtattacttgagcagaacaaacactccaagtggaaccaccacgatgtcaaggcttcagttttctcaggccggagcgagtgacattcgggaccagtctaggaactggcttcctggaccctgttaccgccagcagcgagtatcaaagacagctgcggataacaacaacagtgattactcgtggactggagctaccaagtaccacctcaatggcagagactctctggtgaatccgggcccggccatggcaagccacaaggacgatgaagaaaagtattttcctcagagcggggttctcatctttgggaagcaagactcaggaaaaacaaatgtggacattgaaaaggtcatgattacagacgaagaggaaatcaggacaaccaatcccgtggctacggagcagtatggttctgtatctaccaacctccagagcggcaacacacaagcagctacctcagatgtcaacacacaaggcgttcttccaggcatggtctggcaggacagagatgtgtaccttcaggggcccatctgggcaaagattccacacacggacggacattttcacccctctcccctcatgggtggattcggacttaaacaccctcctccacagattctcatcaagaacaccccggtacctgcgaatccttcgaccaccttcagtgcggcaaagtttgcttccttcatcacacagtactccacgggacaggtcagcgtggagatcgagtgggagctgcagaaggaaaacagcaaacgctggaatcccgaaattcagtacacttccaactacaacaagtctgttaatgtggactttactgtggacactaatggcgtgtattcagagcctcgccccattggcaccagatacctgactcgtaatctgtaa

SEQ ID NO: 1799 - DNA, 2208 bp, synthetic construct
  misc_feature 1..2208: note = Description of Artificial Sequence: Synthetic polynucleotide
  source 1..2208: mol_type = other DNA
atggctgccgatggttatcttccagattggctcgaggacactctctctgaaggaataagacagtggtggaagctcaaacctggcccaccaccaccaaagcccgcagagcggcataaggacgacagcaggggtcttgtgcttcctgggtacaagtacctcggacccttcaacggactcgacaagggagagccggtcaacgaggcagacgccgcggccctcgagcacgacaaagcctacgaccggcagctcgacagcggagacaacccgtacctcaagtacaaccacgccgacgcggagtttcaggagcgccttaaagaagatacgtcttttgggggcaacctcggacgagcagtcttccaggcgaaaaagaggattcttgaacctctgggcctggttgaggaacctgttaagacggctccgggaaaaaagaggccggtagagcactctcctgcggagccagactcctcctcgggaaccggaaagtcgggccagcagcctgcaagaaaaagattgaattttggtcagactggagacgcagactcagtacctgacccccagcctctcggacagccaccagcagccccctctggtctgggaactaatacgatggcttcaggcagtggcgcaccaatggcagacaataacgagggcgccgacggagtgggtaattcctcgggaaattggcattgcgattccacatggatgggcgacagagtcatcaccaccagcacccgaacctgggccctgcccacctacaacaaccacctctacaaacaaatttccagccaatcaggagcctcgaacgacaatcactactttggctacagcaccccttgggggtattttgacttcaacagattccactgccacttttcaccacgtgactggcaaagactcatcaacaacaactggggattccgacccaagagactcaacttcaagctctttaacattcaagtcaaagaggtcacgcagaatgacggtacgacgacgattgccaataaccttaccagcacggttcaggtgtttactgactcggagtaccagctcccgtacgtcctcggctcggcgcatcaaggatgcctcccgccgttcccagcagacgtcttcatggtgccacagtatggatacctcaccctgaacaacgggagtcaggcagtaggacgctcttcattttactgcctggagtactttccttctcagatgctgcgtaccggaaacaactttaccttcagctacacttttgaggacgttcctttccacagcagctacgctcacagccagagtctggaccgtctcatgaatcctctcatcgaccagtacctgtattacttgagcagaacaaacactccaagtggaaccaccacgatgtcaaggcttcagttttctcaggccggagcgagtgacattcgggaccagtctaggaactggcttcctggaccctgttaccgccagcagcgagtatcaaagacagctgcggataacaacaacagtgattactcgtggactggagctaccaagtaccacctcaatggcagagactctctggtgaatccgggcccggccatggcaagccacaaggacgatgaagaaaagtattttcctcagagcggggttctcatctttgggaagcaagactcaggaaaaacaaatgtggacattgaaaaggtcatgattacagacgaagaggaaatcaggacaaccaatcccgtggctacggagcagtatggttctgtatctaccaacctccagagcggcaacacacaagcagctacctcagatgtcaacacacaaggcgttcttccaggcatggtctggcaggacagagatgtgtaccttcaggggcccatctgggcaaagattccacacacggacggacattttcacccctctcccctcatgggtggattcggacttaaacaccctcctccacagattctcatcaagaacaccccggtacctgcgaatccttcgaccaccttcagtgcggcaaagtttgcttccttcatcacacagtactccacgggacaggtcagcgtggagatcgagtgggagctgcagaaggaaaacagcaaacgctggaatcccgaaattcagtacacttccaactacaacaagtctgttaatgtggactttactgtggacactaatggcgtgtattcagagcctcgccccattggcaccagatacctgactcgtaatctgtaa

SEQ ID NO: 1800 - protein, 735 aa, synthetic construct
  REGION 1..735: note = Description of Artificial Sequence: Synthetic polypeptide
MAADGYLPDWLEDTLSEGIRQWWKLKPGPPPPKPAERHKDDSRGLVLPGYKYLGPFNGLDKGEPVNEADAAALEHDKAYDRQLDSGDNPYLKYNHADAEFQERLKEDTSFGGNLGRAVFQAKKRILEPLGLVEEPVKTAPGKKRPVEHSPAEPDSSSGTGKSGQQPARKRLNFGQTGDADSVPDPQPLGQPPAAPSGLGTNTMASGSGAPMADNNEGADGVGNSSGNWHCDSTWMGDRVITTSTRTWALPTYNNHLYKQISSQSGASNDNHYFGYSTPWGYFDFNRFHCHFSPRDWQRLINNNWGFRPKRLNFKLFNIQVKEVTQNDGTTTIANNLTSTVQVFTDSEYQLPYVLGSAHQGCLPPFPADVFMVPQYGYLTLNNGSQAVGRSSFYCLEYFPSQMLRTGNNFTFSYTFEDVPFHSSYAHSQSLDRLMNPLIDQYLYYLSRTNTPSGTTTMSRLQFSQAGASDIRDQSRNWLPGPCYRQQRVSKTAADNNNSDYSWTGATKYHLNGRDSLVNPGPAMASHKDDEEKYFPQSGVLIFGKQDSGKTNVDIEKVMITDEEEIRTTNPVATEQYGSVSTNLQSGNTQAATSDVNTQGVLPGMVWQDRDVYLQGPIWAKIPHTDGHFHPSPLMGGFGLKHPPPQILIKNTPVPANPSTTFSAAKFASFITQYSTGQVSVEIEWELQKENSKRWNPEIQYTSNYNKSVNVDFTVDTNGVYSEPRPIGTRYLTRNL

SEQ ID NO: 1801 - protein, 736 aa, synthetic construct
  REGION 1..736: note = Description of Artificial Sequence: Synthetic polypeptide
MAADGYLPDWLEDNLSEGIREWWDLKPGAPKPKANQQKQDDGRGLVLPGYKYLGPFNGLDKGEPVNAADAAALEHDKAYDQQLKAGDNPYLRYNHADAEFQERLQEDTSFGGNLGRAVFQAKKRVLEPFGLVEEGAKTAPGKKRPVEQSPQEPDSSSGIGKTGQQPAKKRLNFGQTGDSESVPDPQPLGEPPATPAAVGPTTMASGGGAPMADNNEGADGVGNASGNWHCDSTWLGDRVITTSTRTWALPTYNNHLYKQISSASTGASNDNHYFGYSTPWGYFDFNRFHCHFSPRDWQRLINNNWGFRPKRLNFKLFNIQVKEVTTNDGVTTIANNLTSTVQVFSDSEYQLPYVLGSAHQGCLPPFPADVFMIPQYGYLTLNNGSQAVGRSSFYCLEYFPSQMLRTGNNFTFSYTFEDVPFHSSYAHSQSLDRLMNPLIDQYLYFLNRTQNQSGSAQNKDLLFSRGSPAGMSVQPKNWLPGPCYRQQRVSKTKTDNNNSNFTWTGASKYNLNGRESIINPGTAMASHKDDKDKFFPMSGVMIFGKESAGASNTALDNVMITDEEEIKATNPVATERFGTVAVNLQSSSTDPATGDVHVMGALPGMVWQDRDVYLQGPIWAKIPHTDGHFHPSPLMGGFGLKHPPPQILIKNTPVPANPPAEFSATKFASFITQYSTGQVSVEIEWELQKENSKRWNPEVQYTSNYAKSANVDFTVDNNGLYTEPRPIGTRYLTRPL

SEQ ID NO: 1802 - protein, 747 aa, synthetic construct
  REGION 1..747: note = Description of Artificial Sequence: Synthetic polypeptide
MAADGYLPDWLEDTLSEGIRQWWKLKPGPPPPKPAERHKDDSRGLVLPGYKYLGPFNGLDKGEPVNEADAAALEHDKAYDRQLDSGDNPYLKYNHADAEFQERLKEDTSFGGNLGRAVFQAKKRVLEPLGLVEEPVKTAPGKKRPVEHSPVEPDSSSGTGKAGQQPARKRLNFGQTGDADSVPDPQPLGQPPAAPSGLGTNTMATGSGAPMADNNEGADGVGNSSGNWHCDSTWMGDRVITTSTRTWALPTYNNHLYKQISSQSGASNDNHYFGYSTPWGYFDFNRFHCHFSPRDWQRLINNNWGFRPKRLNFKLFNIQVKEVTQNDGTTTIANNLTSTVQVFTDSEYQLPYVLGSAHQGCLPPFPADVFMVPQYGYLTLNNGSQAVGRSSFYCLEYFPSQMLRTGNNFTFSYTFEDVPFHSSYAHSQSLDRLMNPLIDQYLYYLSRTNTPSGTTTQSRLQFSQAGASDIRDQSRNWLPGPCYRQQRVSKTSADNNNSEYSWTGATKYHLNGRDSLVNPGPAMASHKDDEEKFFPQSGVLIFGKQGSEKTNVDIEKVMITDEEEIRTTNPVATEQYGSVSTNLQRGNAAAGSTPPPMAARQAATADVNTQGVLPGMVWQDRDVYLQGPIWAKIPHTDGHFHPSPLMGGFGLKHPPPQILIKNTPVPANPSTTFSAAKFASFITQYSTGQVSVEIEWELQKENSKRWNPEIQYTSNYNKSVNVDFTVDTNGVYSEPRPIGTRYLTRNL

SEQ ID NO: 1803 - protein, 747 aa, synthetic construct
  REGION 1..747: note = Description of Artificial Sequence: Synthetic polypeptide
MAADGYLPDWLEDTLSEGIRQWWKLKPGPPPPKPAERHKDDSRGLVLPGYKYLGPFNGLDKGEPVNEADAAALEHDKAYDRQLDSGDNPYLKYNHADAEFQERLKEDTSFGGNLGRAVFQAKKRVLEPLGLVEEPVKTAPGKKRPVEHSPVEPDSSSGTGKAGQQPARKRLNFGQTGDADSVPDPQPLGQPPAAPSGLGTNTMATGSGAPMADNNEGADGVGNSSGNWHCDSTWMGDRVITTSTRTWALPTYNNHLYKQISSQSGASNDNHYFGYSTPWGYFDFNRFHCHFSPRDWQRLINNNWGFRPKRLNFKLFNIQVKEVTQNDGTTTIANNLTSTVQVFTDSEYQLPYVLGSAHQGCLPPFPADVFMVPQYGYLTLNNGSQAVGRSSFYCLEYFPSQMLRTGNNFTFSYTFEDVPFHSSYAHSQSLDRLMNPLIDQYLYYLSRTNTPSGTTTQSRLQFSQAGASDIRDQSRNWLPGPCYRQQRVSKTSADNNNSEYSWTGATKYHLNGRDSLVNPGPAMASHKDDEEKFFPQSGVLIFGKQGSEKTNVDIEKVMITDEEEIRTTNPVATEQYGSVSTNLQRGNAAAGETRAPLAARQAATADVNTQGVLPGMVWQDRDVYLQGPIWAKIPHTDGHFHPSPLMGGFGLKHPPPQILIKNTPVPANPSTTFSAAKFASFITQYSTGQVSVEIEWELQKENSKRWNPEIQYTSNYNKSVNVDFTVDTNGVYSEPRPIGTRYLTRNL

SEQ ID NO: 1804 - protein, 11 aa, synthetic construct
  REGION 1..11: note = Description of Artificial Sequence: Synthetic polypeptide
AQTLAVPFKAQ

SEQ ID NO: 1805 - protein, 11 aa, synthetic construct
  REGION 1..11: note = Description of Artificial Sequence: Synthetic polypeptide
AQSVSKPFLAQ

SEQ ID NO: 1806 - protein, 11 aa, synthetic construct
  REGION 1..11: note = Description of Artificial Sequence: Synthetic polypeptide
AQFTLTTPKAQ

SEQ ID NO: 1807 - protein, 11 aa, synthetic construct
  REGION 1..11: note = Description of Artificial Sequence: Synthetic polypeptide
DGTLAVPFKAQ

SEQ ID NO: 1808 - protein, 11 aa, synthetic construct
  REGION 1..11: note = Description of Artificial Sequence: Synthetic polypeptide
ESTLAVPFKAQ

SEQ ID NO: 1809 - protein, 11 aa, synthetic construct
  REGION 1..11: note = Description of Artificial Sequence: Synthetic polypeptide
GGTLAVPFKAQ

SEQ ID NO: 1810 - protein, 11 aa, synthetic construct
  REGION 1..11: note = Description of Artificial Sequence: Synthetic polypeptide
AQTLATPFKAQ

SEQ ID NO: 1811 - protein, 11 aa, synthetic construct
  REGION 1..11: note = Description of Artificial Sequence: Synthetic polypeptide
ATTLATPFKAQ

SEQ ID NO: 1812 - protein, 11 aa, synthetic construct
  REGION 1..11: note = Description of Artificial Sequence: Synthetic polypeptide
DGTLATPFKAQ

SEQ ID NO: 1813 - protein, 11 aa, synthetic construct
  REGION 1..11: note = Description of Artificial Sequence: Synthetic polypeptide
GGTLATPFKAQ

SEQ ID NO: 1814 - protein, 11 aa, synthetic construct
  REGION 1..11: note = Description of Artificial Sequence: Synthetic polypeptide
SGSLAVPFKAQ

SEQ ID NO: 1815 - protein, 11 aa, synthetic construct
  REGION 1..11: note = Description of Artificial Sequence: Synthetic polypeptide
AQTLAQPFKAQ

SEQ ID NO: 1816 - protein, 11 aa, synthetic construct
  REGION 1..11: note = Description of Artificial Sequence: Synthetic polypeptide
AQTLQQPFKAQ

SEQ ID NO: 1817 - protein, 11 aa, synthetic construct
  REGION 1..11: note = Description of Artificial Sequence: Synthetic polypeptide
AQTLSNPFKAQ

SEQ ID NO: 1818 - protein, 11 aa, synthetic construct
  REGION 1..11: note = Description of Artificial Sequence: Synthetic polypeptide
AQTLAVPFSNP

SEQ ID NO: 1819 - protein, 11 aa, synthetic construct
  REGION 1..11: note = Description of Artificial Sequence: Synthetic polypeptide
QGTLAVPFKAQ

SEQ ID NO: 1820 - protein, 11 aa, synthetic construct
  REGION 1..11: note = Description of Artificial Sequence: Synthetic polypeptide
NQTLAVPFKAQ

SEQ ID NO: 1821 - protein, 11 aa, synthetic construct
  REGION 1..11: note = Description of Artificial Sequence: Synthetic polypeptide
EGSLAVPFKAQ

SEQ ID NO: 1822 - protein, 11 aa, synthetic construct
  REGION 1..11: note = Description of Artificial Sequence: Synthetic polypeptide
SGNLAVPFKAQ

SEQ ID NO: 1823 - protein, 11 aa, synthetic construct
  REGION 1..11: note = Description of Artificial Sequence: Synthetic polypeptide
EGTLAVPFKAQ

SEQ ID NO: 1824 - protein, 11 aa, synthetic construct
  REGION 1..11: note = Description of Artificial Sequence: Synthetic polypeptide
DSTLAVPFKAQ

SEQ ID NO: 1825 - protein, 11 aa, synthetic construct
  REGION 1..11: note = Description of Artificial Sequence: Synthetic polypeptide
AVTLAVPFKAQ

SEQ ID NO: 1826 - protein, 11 aa, synthetic construct
  REGION 1..11: note = Description of Artificial Sequence: Synthetic polypeptide
AQTLSTPFKAQ

SEQ ID NO: 1827 - protein, 11 aa, synthetic construct
  REGION 1..11: note = Description of Artificial Sequence: Synthetic polypeptide
AQTLPQPFKAQ

SEQ ID NO: 1828 - protein, 11 aa, synthetic construct
  REGION 1..11: note = Description of Artificial Sequence: Synthetic polypeptide
AQTLSQPFKAQ

SEQ ID NO: 1829 - protein, 11 aa, synthetic construct
  REGION 1..11: note = Description of Artificial Sequence: Synthetic polypeptide
AQTLQLPFKAQ

SEQ ID NO: 1830 - protein, 11 aa, synthetic construct
  REGION 1..11: note = Description of Artificial Sequence: Synthetic polypeptide
AQTLTMPFKAQ

SEQ ID NO: 1831 - protein, 11 aa, synthetic construct
  REGION 1..11: note = Description of Artificial Sequence: Synthetic polypeptide
AQTLTTPFKAQ

SEQ ID NO: 1832 - protein, 11 aa, synthetic construct
  REGION 1..11: note = Description of Artificial Sequence: Synthetic polypeptide
AQYTLSQGWAQ

SEQ ID NO: 1833 - protein, 11 aa, synthetic construct
  REGION 1..11: note = Description of Artificial Sequence: Synthetic polypeptide
AQMNATKNVAQ

SEQ ID NO: 1834 - protein, 11 aa, synthetic construct
  REGION 1..11: note = Description of Artificial Sequence: Synthetic polypeptide
AQVSGGHHSAQ

SEQ ID NO: 1835 - protein, 11 aa, synthetic construct
  REGION 1..11: note = Description of Artificial Sequence: Synthetic polypeptide
AQTLTAPFKAQ

SEQ ID NO: 1836 - protein, 11 aa, synthetic construct
  REGION 1..11: note = Description of Artificial Sequence: Synthetic polypeptide
AQTLSKPFKAQ

SEQ ID NO: 1837 - protein, 7 aa, synthetic construct
  REGION 1..7: note = Description of Artificial Sequence: Synthetic polypeptide
QAVRTSL

SEQ ID NO: 1838 - protein, 7 aa, synthetic construct
  REGION 1..7: note = Description of Artificial Sequence: Synthetic polypeptide
LAKERLS

SEQ ID NO: 1839 - protein, 7 aa, synthetic construct
  REGION 1..7: note = Description of Artificial Sequence: Synthetic polypeptide
MNSTKNV

SEQ ID NO: 1840 - protein, 7 aa, synthetic construct
  REGION 1..7: note = Description of Artificial Sequence: Synthetic polypeptide
VSGGHHS

SEQ ID NO: 1841 - protein, 14 aa, synthetic construct
  REGION 1..14: note = Description of Artificial Sequence: Synthetic polypeptide
SAQTLAVPFKAQAQ

SEQ ID NO: 1842 - protein, 14 aa, synthetic construct
  REGION 1..14: note = Description of Artificial Sequence: Synthetic polypeptide
  VARIANT 2..4: note = Xaa can be any naturally occurring amino acid
SXXXLAVPFKAQAQ

SEQ ID NO: 1843 - protein, 14 aa, synthetic construct
  REGION 1..14: note = Description of Artificial Sequence: Synthetic polypeptide
  VARIANT 4..6: note = Xaa can be any naturally occurring amino acid
SAQXXXVPFKAQAQ

SEQ ID NO: 1844 - protein, 14 aa, synthetic construct
  REGION 1..14: note = Description of Artificial Sequence: Synthetic polypeptide
  VARIANT 6..8: note = Xaa can be any naturally occurring amino acid
SAQTLXXXFKAQAQ

SEQ ID NO: 1845 - protein, 14 aa, synthetic construct
  REGION 1..14: note = Description of Artificial Sequence: Synthetic polypeptide
  VARIANT 8..10: note = Xaa can be any naturally occurring amino acid
SAQTLAVXXXAQAQ

SEQ ID NO: 1846 - protein, 14 aa, synthetic construct
  REGION 1..14: note = Description of Artificial Sequence: Synthetic polypeptide
  VARIANT 10..12: note = Xaa can be any naturally occurring amino acid
SAQTLAVPFXXXAQ

SEQ ID NO: 1847 - protein, 7 aa, synthetic construct
  REGION 1..7: note = Description of Artificial Sequence: Synthetic polypeptide
TNHQSAQ

SEQ ID NO: 1848 - protein, 7 aa, synthetic construct
  REGION 1..7: note = Description of Artificial Sequence: Synthetic polypeptide
AQAQTGW

SEQ ID NO: 1849 - protein, 9 aa, synthetic construct
  REGION 1..9: note = Description of Artificial Sequence: Synthetic polypeptide
DGTLATPFK

SEQ ID NO: 1850 - protein, 11 aa, synthetic construct
  REGION 1..11: note = Description of Artificial Sequence: Synthetic polypeptide
  VARIANT 10..11: note = Xaa can be any naturally occurring amino acid
DGTLATPFKXX

SEQ ID NO: 1851 - protein, 8 aa, synthetic construct
  REGION 1..8: note = Description of Artificial Sequence: Synthetic polypeptide
LAVPFKAQ

SEQ ID NO: 1852 - protein, 6 aa, synthetic construct
  REGION 1..6: note = Description of Artificial Sequence: Synthetic polypeptide
VPFKAQ

SEQ ID NO: 1853 - protein, 4 aa, synthetic construct
  REGION 1..4: note = Description of Artificial Sequence: Synthetic polypeptide
FKAQ

SEQ ID NO: 1854 - protein, 6 aa, synthetic construct
  REGION 1..6: note = Description of Artificial Sequence: Synthetic polypeptide
AQTLAV

SEQ ID NO: 1855 - protein, 8 aa, synthetic construct
  REGION 1..8: note = Description of Artificial Sequence: Synthetic polypeptide
AQTLAVPF

SEQ ID NO: 1856 - protein, 4 aa, synthetic construct
  REGION 1..4: note = Description of Artificial Sequence: Synthetic polypeptide
QAVR

SEQ ID NO: 1857 - protein, 4 aa, synthetic construct
  REGION 1..4: note = Description of Artificial Sequence: Synthetic polypeptide
AVRT

SEQ ID NO: 1858 - protein, 4 aa, synthetic construct
  REGION 1..4: note = Description of Artificial Sequence: Synthetic polypeptide
VRTS

SEQ ID NO: 1859 - protein, 4 aa, synthetic construct
  REGION 1..4: note = Description of Artificial Sequence: Synthetic polypeptide
RTSL

SEQ ID NO: 1860 - protein, 5 aa, synthetic construct
  REGION 1..5: note = Description of Artificial Sequence: Synthetic polypeptide
QAVRT

SEQ ID NO: 1861 - protein, 5 aa, synthetic construct
  REGION 1..5: note = Description of Artificial Sequence: Synthetic polypeptide
AVRTS

SEQ ID NO: 1862 - protein, 5 aa, synthetic construct
  REGION 1..5: note = Description of Artificial Sequence: Synthetic polypeptide
VRTSL

SEQ ID NO: 1863 - protein, 6 aa, synthetic construct
  REGION 1..6: note = Description of Artificial Sequence: Synthetic polypeptide
QAVRTS

SEQ ID NO: 1864 - protein, 6 aa, synthetic construct
  REGION 1..6: note = Description of Artificial Sequence: Synthetic polypeptide
AVRTSL

SEQ ID NO: 1865 - DNA, 33 bp, synthetic construct
  misc_feature 1..33: note = Description of Artificial Sequence: Synthetic polynucleotide
  source 1..33: mol_type = other DNA
gatgggactttggcggtgccttttaaggcacag

SEQ ID NO: 1866 - DNA, 33 bp, synthetic construct
  misc_feature 1..33: note = Description of Artificial Sequence: Synthetic polynucleotide
  source 1..33: mol_type = other DNA
gatgggacgttggcggtgccttttaaggcacag

SEQ ID NO: 1867 - DNA, 21 bp, synthetic construct
  misc_feature 1..21: note = Description of Artificial Sequence: Synthetic polynucleotide
  source 1..21: mol_type = other DNA
caggcggttaggacgtctttg

SEQ ID NO: 1868 - DNA, 27 bp, synthetic construct
  misc_feature 1..27: note = Description of Artificial Sequence: Synthetic polynucleotide
  source 1..27: mol_type = other DNA
caggtcttcacggactcagactatcag

SEQ ID NO: 1869 - DNA, 32 bp, synthetic construct
  misc_feature 1..32: note = Description of Artificial Sequence: Synthetic polynucleotide
  source 1..32: mol_type = other DNA
caagtaaaacctctacaaatgtggtaaaatcg

SEQ ID NO: 1870 - DNA, 36 bp, synthetic construct
  misc_feature 1..36: note = Description of Artificial Sequence: Synthetic polynucleotide
  source 1..36: mol_type = other DNA
actcatcgaccaatacttgtactatctctctagaac

SEQ ID NO: 1871 - DNA, 26 bp, synthetic construct
  misc_feature 1..26: note = Description of Artificial Sequence: Synthetic polynucleotide
  source 1..26: mol_type = other DNA
ggaagtattccttggttttgaaccca

SEQ ID NO: 1872 - DNA, 23 bp, synthetic construct
  misc_feature 1..23: note = Description of Artificial Sequence: Synthetic polynucleotide
  source 1..23: mol_type = other DNA
ggtcgcggttcttgtttgtggat

SEQ ID NO: 1873 - DNA, 24 bp, synthetic construct
  misc_feature 1..24: note = Description of Artificial Sequence: Synthetic polynucleotide
  source 1..24: mol_type = other DNA
cgaccttgaagcgcatgaactcct

SEQ ID NO: 1874 - DNA, 83 bp, synthetic construct
  misc_feature 1..83: note = Description of Artificial Sequence: Synthetic polynucleotide
  variation 42..43: note = n is a, c, g, or t
  variation 45..46: note = n is a, c, g, or t
  variation 48..49: note = n is a, c, g, or t
  variation 51..52: note = n is a, c, g, or t
  variation 54..55: note = n is a, c, g, or t
  variation 57..58: note = n is a, c, g, or t
  variation 60..61: note = n is a, c, g, or t
  source 1..83: mol_type = other DNA
gtattccttggttttgaacccaaccggtctgcgcctgtgcmnnmnnmnnmnnmnnmnnmnnttgggcactctggtggtttgtc

SEQ ID NO: 1875 - DNA, 64 bp, synthetic construct
  misc_feature 1..64: note = Description of Artificial Sequence: Synthetic polynucleotide
  variation 36..37: note = n is a, c, g, or t
  variation 39..40: note = n is a, c, g, or t
  variation 42..43: note = n is a, c, g, or t
  source 1..64: mol_type = other DNA
gtattccttggttttgaacccaaccggtctgcgcmnnmnnmnnaaaaggcaccgccaaagtttg

SEQ ID NO: 1876 - DNA, 70 bp, synthetic construct
  misc_feature 1..70: note = Description of Artificial Sequence: Synthetic polynucleotide
  variation 42..43: note = n is a, c, g, or t
  variation 45..46: note = n is a, c, g, or t
  variation 48..49: note = n is a, c, g, or t
  source 1..70: mol_type = other DNA
gtattccttggttttgaacccaaccggtctgcgcctgtgcmnnmnnmnncaccgccaaagtttgggcact

SEQ ID NO: 1877 - DNA, 77 bp, synthetic construct
  misc_feature 1..77: note = Description of Artificial Sequence: Synthetic polynucleotide
  variation 48..49: note = n is a, c, g, or t
  variation 51..52: note = n is a, c, g, or t
  variation 54..55: note = n is a, c, g, or t
  source 1..77: mol_type = other DNA
gtattccttggttttgaacccaaccggtctgcgcctgtgccttaaamnnmnnmnncaaagtttgggcactctggtgg

SEQ ID NO: 1878 - DNA, 83 bp, synthetic construct
  misc_feature 1..83: note = Description of Artificial Sequence: Synthetic polynucleotide
  variation 54..55: note = n is a, c, g, or t
  variation 57..58: note = n is a, c, g, or t
  variation 60..61: note = n is a, c, g, or t
  source 1..83: mol_type = other DNA
gtattccttggttttgaacccaaccggtctgcgcctgtgccttaaaaggcacmnnmnnmnnttgggcactctggtggtttgtg

SEQ ID NO: 1879 - RNA, 21 nt, synthetic construct
  modified_base 2..3: mod_base = OTHER; note = thymine
  modified_base 17..19: mod_base = OTHER; note = thymine
  misc_feature 1..21: note = Description of Artificial Sequence: Synthetic polynucleotide
  source 1..21: mol_type = other RNA
cttgcgaaggagcggctttcg

SEQ ID NO: 1880 - protein, 10 aa, synthetic construct
  REGION 1..10: note = Description of Artificial Sequence: Synthetic polypeptide
VNLTWSRASG

SEQ ID NO: 1881 - protein, 14 aa, synthetic construct
  REGION 1..14: note = Description of Artificial Sequence: Synthetic polypeptide
EFCINHRGYWVCGD

SEQ ID NO: 1882 - protein, 11 aa, synthetic construct
  REGION 1..11: note = Description of Artificial Sequence: Synthetic polypeptide
EDGQVMDVDLS

SEQ ID NO: 1883 - protein, 9 aa, synthetic construct
  REGION 1..9: note = Description of Artificial Sequence: Synthetic polypeptide
EKQRNGTLT

SEQ ID NO: 1884 - protein, 17 aa, synthetic construct
  REGION 1..17: note = Description of Artificial Sequence: Synthetic polypeptide
TYQCRVTHPHLPRALMR

SEQ ID NO: 1885 - protein, 14 aa, synthetic construct
  REGION 1..14: note = Description of Artificial Sequence: Synthetic polypeptide
RHSTTQPRKTKGSG

SEQ ID NO: 1886 - protein, 13 aa, synthetic construct
  REGION 1..13: note = Description of Artificial Sequence: Synthetic polypeptide
DSNPRGVSAYLSR

SEQ ID NO: 1887 - protein, 12 aa, synthetic construct
  REGION 1..12: note = Description of Artificial Sequence: Synthetic polypeptide
TITCLWDLAPSK

SEQ ID NO: 1888 - protein, 10 aa, synthetic construct
  REGION 1..10: note = Description of Artificial Sequence: Synthetic polypeptide
KTKGSGFFVF

SEQ ID NO: 1889 - protein, 12 aa, synthetic construct
  REGION 1..12: note = Description of Artificial Sequence: Synthetic polypeptide
THPHLPRALMRS

SEQ ID NO: 1890 - protein, 23 aa, synthetic construct
  REGION 1..23: note = Description of Artificial Sequence: Synthetic polypeptide
GETYQCRVTHPHLPRALMRSTTK

SEQ ID NO: 1891 - protein, 8 aa, synthetic construct
  REGION 1..8: note = Description of Artificial Sequence: Synthetic polypeptide
LPRALMRS

SEQ ID NO: 1892 - protein, 8 aa, synthetic construct
  REGION 1..8: note = Description of Artificial Sequence: Synthetic polypeptide
INHRGYWV

SEQ ID NO: 1893 - protein, 12 aa, synthetic construct
  REGION 1..12: note = Description of Artificial Sequence: Synthetic polypeptide
CDAGSVRTNAPD

SEQ ID NO: 1894 - protein, 17 aa, synthetic construct
  REGION 1..17: note = Description of Artificial Sequence: Synthetic polypeptide
AKAVSNLTESRSESLQS

SEQ ID NO: 1895 - protein, 13 aa, synthetic construct
  REGION 1..13: note = Description of Artificial Sequence: Synthetic polypeptide
SLTGDEFKKVLET

SEQ ID NO: 1896 - protein, 11 aa, synthetic construct
  REGION 1..11: note = Description of Artificial Sequence: Synthetic polypeptide
REAVAYRFEED

SEQ ID NO: 1897 - protein, 10 aa, synthetic construct
  REGION 1..10: note = Description of Artificial Sequence: Synthetic polypeptide
INPEIITLDG

SEQ ID NO: 1898 - protein, 15 aa, synthetic construct
  REGION 1..15: note = Description of Artificial Sequence: Synthetic polypeptide
DISVTGAPVITATYL

SEQ ID NO: 1899 - protein, 12 aa, synthetic construct
  REGION 1..12: note = Description of Artificial Sequence: Synthetic polypeptide
DISVTGAPVITA

SEQ ID NO: 1900 - protein, 17 aa, synthetic construct
  REGION 1..17: note = Description of Artificial Sequence: Synthetic polypeptide
PKTVSNLTESSSESVQS

SEQ ID NO: 1901 - protein, 13 aa, synthetic construct
  REGION 1..13: note = Description of Artificial Sequence: Synthetic polypeptide
SLMGDEFKAVLET

SEQ ID NO: 1902 - protein, 11 aa, synthetic construct
  REGION 1..11: note = Description of Artificial Sequence: Synthetic polypeptide
QHSVAYTFEED

SEQ ID NO: 1903 - protein, 10 aa, synthetic construct
  REGION 1..10: note = Description of Artificial Sequence: Synthetic polypeptide
INPEIITRDG

SEQ ID NO: 1904 - protein, 15 aa, synthetic construct
  REGION 1..15: note = Description of Artificial Sequence: Synthetic polypeptide
DISLTGDPVITASYL

SEQ ID NO: 1905 - protein, 12 aa, synthetic construct
  REGION 1..12: note = Description of Artificial Sequence: Synthetic polypeptide
DISLTGDPVITA

SEQ ID NO: 1906 - protein, 11 aa, synthetic construct
  REGION 1..11: note = Description of Artificial Sequence: Synthetic polypeptide
DQSIDFEIDSA

SEQ ID NO: 1907 - protein, 20 aa, synthetic construct
  REGION 1..20: note = Description of Artificial Sequence: Synthetic polypeptide
KNVSEDLPLPTFSPTLLGDS

SEQ ID NO: 1908 - protein, 11 aa, synthetic construct
  REGION 1..11: note = Description of Artificial Sequence: Synthetic polypeptide
KNVSEDLPLPT

SEQ ID NO: 1909 - protein, 12 aa, synthetic construct
  REGION 1..12: note = Description of Artificial Sequence: Synthetic polypeptide
CDSGRVRTDAPD

SEQ ID NO: 1910 - protein, 14 aa, synthetic construct
  REGION 1..14: note = Description of Artificial Sequence: Synthetic polypeptide
FPEHLLVDFLQSLS

SEQ ID NO: 1911 - protein, 9 aa, synthetic construct
  REGION 1..9: note = Description of Artificial Sequence: Synthetic polypeptide
DAEFRHDSG

SEQ ID NO: 1912 - protein, 16 aa, synthetic construct
  REGION 1..16: note = Description of Artificial Sequence: Synthetic polypeptide
HYAAAQWDFGNTMCQL

SEQ ID NO: 1913 - protein, 13 aa, synthetic construct
  REGION 1..13: note = Description of Artificial Sequence: Synthetic polypeptide
YAAQWDFGNTMCQ

SEQ ID NO: 1914 - protein, 10 aa, synthetic construct
  REGION 1..10: note = Description of Artificial Sequence: Synthetic polypeptide
RSQKEGLHYT

SEQ ID NO: 1915 - protein, 19 aa, synthetic construct
  REGION 1..19: note = Description of Artificial Sequence: Synthetic polypeptide
SSRTPSDKPVAHWANPQAE

SEQ ID NO: 1916 - protein, 15 aa, synthetic construct
  REGION 1..15: note = Description of Artificial Sequence: Synthetic polypeptide
SRTPSDKPVAHWANP

SEQ ID NO: 1917 - protein, 9 aa, synthetic construct
  REGION 1..9: note = Description of Artificial Sequence: Synthetic polypeptide
SSRTPSDKP

SEQ ID NO: 1918 - protein, 14 aa, synthetic construct
  REGION 1..14: note = Description of Artificial Sequence: Synthetic polypeptide
NADGNVDYHMNSVP

SEQ ID NO: 1919 - protein, 11 aa, synthetic construct
  REGION 1..11: note = Description of Artificial Sequence: Synthetic polypeptide
DGNVDYHMNSV

SEQ ID NO: 1920 - protein, 16 aa, synthetic construct
  REGION 1..16: note = Description of Artificial Sequence: Synthetic polypeptide
RSFKEFLQSSLRALRQ

SEQ ID NO: 1921 - protein, 11 aa, synthetic construct
  REGION 1..11: note = Description of Artificial Sequence: Synthetic polypeptide
FKEFLQSSLRA

SEQ ID NO: 1922 - protein, 10 aa, synthetic construct
  REGION 1..10: note = Description of Artificial Sequence: Synthetic polypeptide
QMWAPQWGPD

SEQ ID NO: 1923 - protein, 6 aa, synthetic construct
  REGION 1..6: note = Description of Artificial Sequence: Synthetic polypeptide
RGNRQA

SEQ ID NO: 1924 - protein, 6 aa, synthetic construct
  REGION 1..6: note = Description of Artificial Sequence: Synthetic polypeptide
SSSTDP

SEQ ID NO: 1925 - protein, 6 aa, synthetic construct
  REGION 1..6: note = Description of Artificial Sequence: Synthetic polypeptide
SSNTAP

SEQ ID NO: 1926 - protein, 6 aa, synthetic construct
  REGION 1..6: note = Description of Artificial Sequence: Synthetic polypeptide
SNSNLP

SEQ ID NO: 1927 - protein, 6 aa, synthetic construct
  REGION 1..6: note = Description of Artificial Sequence: Synthetic polypeptide
SSTTAP

SEQ ID NO: 1928 - protein, 6 aa, synthetic construct
  REGION 1..6: note = Description of Artificial Sequence: Synthetic polypeptide
AANTAA

SEQ ID NO: 1929 - protein, 6 aa, synthetic construct
  REGION 1..6: note = Description of Artificial Sequence: Synthetic polypeptide
QQNTAP

SEQ ID NO: 1930 - protein, 6 aa, synthetic construct
  REGION 1..6: note = Description of Artificial Sequence: Synthetic polypeptide
SAQAQA

SEQ ID NO: 1931 - protein, 6 aa, synthetic construct
  REGION 1..6: note = Description of Artificial Sequence: Synthetic polypeptide
QANTGP

SEQ ID NO: 1932 - protein, 6 aa, synthetic construct
  REGION 1..6: note = Description of Artificial Sequence: Synthetic polypeptide
NATTAP

SEQ ID NO: 1933 - protein, 6 aa, synthetic construct
  REGION 1..6: note = Description of Artificial Sequence: Synthetic polypeptide
SSTAGP

SEQ ID NO: 1934 - protein, 6 aa, synthetic construct
  REGION 1..6: note = Description of Artificial Sequence: Synthetic polypeptide
QQNTAA

SEQ ID NO: 1935 - protein, 6 aa, synthetic construct
  REGION 1..6: note = Description of Artificial Sequence: Synthetic polypeptide
PSTAGP

SEQ ID NO: 1936 - protein, 6 aa, synthetic construct
  REGION 1..6: note = Description of Artificial Sequence: Synthetic polypeptide
NQNTAP

SEQ ID NO: 1937 - protein, 6 aa, synthetic construct
  REGION 1..6: note = Description of Artificial Sequence: Synthetic polypeptide
QAANAP

SEQ ID NO: 1938 - protein, 6 aa, synthetic construct
  REGION 1..6: note = Description of Artificial Sequence: Synthetic polypeptide
SIVGLP

SEQ ID NO: 1939 - protein, 6 aa, synthetic construct
  REGION 1..6: note = Description of Artificial Sequence: Synthetic polypeptide
AASTAA

SEQ ID NO: 1940 - protein, 6 aa, synthetic construct
  REGION 1..6: note = Description of Artificial Sequence: Synthetic polypeptide
SQNTTA

SEQ ID NO: 1941 - protein, 6 aa, synthetic construct
  REGION 1..6: note = Description of Artificial Sequence: Synthetic polypeptide
QQDTAP

SEQ ID NO: 1942 - protein, 6 aa, synthetic construct
  REGION 1..6: note = Description of Artificial Sequence: Synthetic polypeptide
QTNTGP

SEQ ID NO: 1943 - protein, 6 aa, synthetic construct
  REGION 1..6: note = Description of Artificial Sequence: Synthetic polypeptide
QTNGAP

SEQ ID NO: 1944 - protein, 6 aa, synthetic construct
  REGION 1..6: note = Description of Artificial Sequence: Synthetic polypeptide
QQNAAP

SEQ ID NO: 1945 - protein, 6 aa, synthetic construct
  REGION 1..6: note = Description of Artificial Sequence: Synthetic polypeptide
AANTQA

SEQ ID NO: 1946 - protein, 6 aa, synthetic construct
  REGION 1..6: note = Description of Artificial Sequence: Synthetic polypeptide
NGRAHA

SEQ ID NO: 1947 - protein, 7 aa, synthetic construct
  REGION 1..7: note = Description of Artificial Sequence: Synthetic polypeptide
QPEHSST

SEQ ID NO: 1948 - protein, 7 aa, synthetic construct
  REGION 1..7: note = Description of Artificial Sequence: Synthetic polypeptide
VNTANST

SEQ ID NO: 1949 - protein, 7 aa, synthetic construct
  REGION 1..7: note = Description of Artificial Sequence: Synthetic polypeptide
HGPMQKS

SEQ ID NO: 1950 - protein, 7 aa, synthetic construct
  REGION 1..7: note = Description of Artificial Sequence: Synthetic polypeptide
PHKPPLA

SEQ ID NO: 1951 - protein, 7 aa, synthetic construct
  REGION 1..7: note = Description of Artificial Sequence: Synthetic polypeptide
IKNNEMW

SEQ ID NO: 1952 - protein, 7 aa, synthetic construct
  REGION 1..7: note = Description of Artificial Sequence: Synthetic polypeptide
RNLDTPM

SEQ ID NO: 1953 - protein, 7 aa, synthetic construct
  REGION 1..7: note = Description of Artificial Sequence: Synthetic polypeptide
VDSHRQS

SEQ ID NO: 1954 - protein, 7 aa, synthetic construct
  REGION 1..7: note = Description of Artificial Sequence: Synthetic polypeptide
YDSKTKT

SEQ ID NO: 1955 - protein, 7 aa, synthetic construct
  REGION 1..7: note = Description of Artificial Sequence: Synthetic polypeptide
SQLPHQK

SEQ ID NO: 1956 - protein, 7 aa, synthetic construct
  REGION 1..7: note = Description of Artificial Sequence: Synthetic polypeptide
STMQQNT

SEQ ID NO: 1957 - protein, 7 aa, synthetic construct
  REGION 1..7: note = Description of Artificial Sequence: Synthetic polypeptide
TERYMTQ

SEQ ID NO: 1958 - protein, 7 aa, synthetic construct
  REGION 1..7: note = Description of Artificial Sequence: Synthetic polypeptide
DASLSTS

SEQ ID NO: 1959 - protein, 7 aa, synthetic construct
  REGION 1..7: note = Description of Artificial Sequence: Synthetic polypeptide
DLPNKKT

SEQ ID NO: 1960 - protein, 7 aa, synthetic construct
  REGION 1..7: note = Description of Artificial Sequence: Synthetic polypeptide
DLTAARL

SEQ ID NO: 1961 - protein, 7 aa, synthetic construct
  REGION 1..7: note = Description of Artificial Sequence: Synthetic polypeptide
EPHQFNY

SEQ ID NO: 1962 - protein, 7 aa, synthetic construct
  REGION 1..7: note = Description of Artificial Sequence: Synthetic polypeptide
EPQSNHT

SEQ ID NO: 1963 - protein, 7 aa, synthetic construct
  REGION 1..7: note = Description of Artificial Sequence: Synthetic polypeptide
MSSWPSQ

SEQ ID NO: 1964 - protein, 7 aa, synthetic construct
  REGION 1..7: note = Description of Artificial Sequence: Synthetic polypeptide
NPKHNAT

SEQ ID NO: 1965 - protein, 7 aa, synthetic construct
  REGION 1..7: note = Description of Artificial Sequence: Synthetic polypeptide
PDGMRTT

SEQ ID NO: 1966 - protein, 7 aa, synthetic construct
  REGION 1..7: note = Description of Artificial Sequence: Synthetic polypeptide
PNNNKTT

SEQ ID NO: 1967 - protein, 7 aa, synthetic construct
  REGION 1..7: note = Description of Artificial Sequence: Synthetic polypeptide
QSTTHDS

SEQ ID NO: 1968 - protein, 7 aa, synthetic construct
  REGION 1..7: note = Description of Artificial Sequence: Synthetic polypeptide
TGSKQKQ

SEQ ID NO: 1969 - protein, 7 aa, synthetic construct
  REGION 1..7: note = Description of Artificial Sequence: Synthetic polypeptide
SLKHQAL

SEQ ID NO: 1970 - protein, 7 aa, synthetic construct
  REGION 1..7: note = Description of Artificial Sequence: Synthetic polypeptide
SPIDGEQ

SEQ ID NO: 1971 - protein, 8 aa, synthetic construct
  REGION 1..8: note = Description of Artificial Sequence: Synthetic polypeptide
WIFPWIQL

SEQ ID NO: 1972 - protein, 9 aa, synthetic construct
  REGION 1..9: note = Description of Artificial Sequence: Synthetic polypeptide
CDCRGDCFC

SEQ ID NO: 1973 - protein, 5 aa, synthetic construct
  REGION 1..5: note = Description of Artificial Sequence: Synthetic polypeptide
CNGRC

SEQ ID NO: 1974 - protein, 7 aa, synthetic construct
  REGION 1..7: note = Description of Artificial Sequence: Synthetic polypeptide
CPRECES

SEQ ID NO: 1975 - protein, 10 aa, synthetic construct
  REGION 1..10: note = Description of Artificial Sequence: Synthetic polypeptide
CTTHWGFTLC

SEQ ID NO: 1976 - protein, 9 aa, synthetic construct
  REGION 1..9: note = Description of Artificial Sequence: Synthetic polypeptide
CGRRAGGSC

SEQ ID NO: 1977 - protein, 9 aa, synthetic construct
  REGION 1..9: note = Description of Artificial Sequence: Synthetic polypeptide
CKGGRAKDC

SEQ ID NO: 1978 - protein, 9 aa, synthetic construct
  REGION 1..9: note = Description of Artificial Sequence: Synthetic polypeptide
CVPELGHEC

SEQ ID NO: 1979 - protein, 9 aa, synthetic construct
  REGION 1..9: note = Description of Artificial Sequence: Synthetic polypeptide
CRRETAWAK

SEQ ID NO: 1980 - protein, 14 aa, synthetic construct
  REGION 1..14: note = Description of Artificial Sequence: Synthetic polypeptide
VSWFSHRYSPFAVS

SEQ ID NO: 1981 - protein, 13 aa, synthetic construct
  REGION 1..13: note = Description of Artificial Sequence: Synthetic polypeptide
GYRDGYAGPILYN

SEQ ID NO: 1982-1983 - skipped (2 entries)

SEQ ID NO: 1984 - protein, 7 aa, synthetic construct
  REGION 1..7: note = Description of Artificial Sequence: Synthetic polypeptide
RPLPPLP

SEQ ID NO: 1985 - protein, 7 aa, synthetic construct
  REGION 1..7: note = Description of Artificial Sequence: Synthetic polypeptide
APPLPPR

SEQ ID NO: 1986 - protein, 12 aa, synthetic construct
  REGION 1..12: note = Description of Artificial Sequence: Synthetic polypeptide
DVFYPYPYASGS

SEQ ID NO: 1987 - protein, 6 aa, synthetic construct
  REGION 1..6: note = Description of Artificial Sequence: Synthetic polypeptide
MYWYPY

SEQ ID NO: 1988 - protein, 12 aa, synthetic construct
  REGION 1..12: note = Description of Artificial Sequence: Synthetic polypeptide
DITWDQLWDLMK

SEQ ID NO: 1989 - protein, 8 aa, synthetic construct
  REGION 1..8: note = Description of Artificial Sequence: Synthetic polypeptide
  VARIANT 5: note = Xaa is Gly or Leu
CWDDXWLC

SEQ ID NO: 1990 - protein, 14 aa, synthetic construct
  REGION 1..14: note = Description of Artificial Sequence: Synthetic polypeptide
EWCEYLGGYLRCYA

SEQ ID NO: 1991 - protein, 14 aa, synthetic construct
  REGION 1..14: note = Description of Artificial Sequence: Synthetic polypeptide
  VARIANT 2: note = Xaa can be any naturally occurring amino acid
  VARIANT 4..5: note = Xaa can be any naturally occurring amino acid
  VARIANT 8: note = Xaa can be any naturally occurring amino acid
  VARIANT 11: note = Xaa can be any naturally occurring amino acid
  VARIANT 13: note = Xaa can be any naturally occurring amino acid
YXCXXGPXTWXCXP

SEQ ID NO: 1992 - protein, 14 aa, synthetic construct
  REGION 1..14: note = Description of Artificial Sequence: Synthetic polypeptide
IEGPTLRQWLAARA

SEQ ID NO: 1993 - skipped

SEQ ID NO: 1994 - protein, 7 aa, synthetic construct
  REGION 1..7: note = Description of Artificial Sequence: Synthetic polypeptide
  VARIANT 1: note = Xaa can be any naturally occurring amino acid
  VARIANT 3..4: note = Xaa can be any naturally occurring amino acid
XFXXYLW

SEQ ID NO: 1995 - protein, 13 aa, synthetic construct
  REGION 1..13: note = Description of Artificial Sequence: Synthetic polypeptide
SSIISHFRWGLCD

SEQ ID NO: 1996 - protein, 13 aa, synthetic construct
  REGION 1..13: note = Description of Artificial Sequence: Synthetic polypeptide
MSRPACPPNDKYE

SEQ ID NO: 1997 - protein, 8 aa, synthetic construct
  REGION 1..8: note = Description of Artificial Sequence: Synthetic polypeptide
CLRSGRGC

SEQ ID NO: 1998 - protein, 9 aa, synthetic construct
  REGION 1..9: note = Description of Artificial Sequence: Synthetic polypeptide
CHWMFSPWC

SEQ ID NO: 1999 - skipped

SEQ ID NO: 2000 - protein, 8 aa, synthetic construct
  REGION 1..8: note = Description of Artificial Sequence: Synthetic polypeptide
CSSRLDAC

SEQ ID NO: 2001 - protein, 7 aa, synthetic construct
  REGION 1..7: note = Description of Artificial Sequence: Synthetic polypeptide
CLPVASC

SEQ ID NO: 2002 - protein, 13 aa, synthetic construct
  REGION 1..13: note = Description of Artificial Sequence: Synthetic polypeptide
CGFECVRQCPERC

SEQ ID NO: 2003 - protein, 13 aa, synthetic construct
  REGION 1..13: note = Description of Artificial Sequence: Synthetic polypeptide
CVALCREACGEGC

SEQ ID NO: 2004 - protein, 9 aa, synthetic construct
  REGION 1..9: note = Description of Artificial Sequence: Synthetic polypeptide
SWCEPGWCR

SEQ ID NO: 2005 - protein, 7 aa, synthetic construct
  REGION 1..7: note = Description of Artificial Sequence: Synthetic polypeptide
YSGKWGW

SEQ ID NO: 2006 - protein, 7 aa, synthetic construct
  REGION 1..7: note = Description of Artificial Sequence: Synthetic polypeptide
GLSGGRS

SEQ ID NO: 2007 - protein, 7 aa, synthetic construct
  REGION 1..7: note = Description of Artificial Sequence: Synthetic polypeptide
LMLPRAD

SEQ ID NO: 2008 - protein, 9 aa, synthetic construct
  REGION 1..9: note = Description of Artificial Sequence: Synthetic polypeptide
CSCFRDVCC

SEQ ID NO: 2009 - protein, 9 aa, synthetic construct
  REGION 1..9: note = Description of Artificial Sequence: Synthetic polypeptide
CRDVVSVIC

SEQ ID NO: 2010 - protein, 6 aa, synthetic construct
  REGION 1..6: note = Description of Artificial Sequence: Synthetic polypeptide
MARSGL

SEQ ID NO: 2011 - protein, 6 aa, synthetic construct
  REGION 1..6: note = Description of Artificial Sequence: Synthetic polypeptide
MARAKE

SEQ ID NO: 2012 - protein, 6 aa, synthetic construct
  REGION 1..6: note = Description of Artificial Sequence: Synthetic polypeptide
MSRTMS

SEQ ID NO: 2013 - protein, 6 aa, synthetic construct
  REGION 1..6: note = Description of Artificial Sequence: Synthetic polypeptide
KCCYSL

SEQ ID NO: 2014 - protein, 14 aa, synthetic construct
  REGION 1..14: note = Description of Artificial Sequence: Synthetic polypeptide
MYWGDSHWLQYWYE

SEQ ID NO: 2015 - protein, 7 aa, synthetic construct
  REGION 1..7: note = Description of Artificial Sequence: Synthetic polypeptide
MQLPLAT

SEQ ID NO: 2016 - protein, 4 aa, synthetic construct
  REGION 1..4: note = Description of Artificial Sequence: Synthetic polypeptide
EWLS

SEQ ID NO: 2017 - protein, 4 aa, synthetic construct
  REGION 1..4: note = Description of Artificial Sequence: Synthetic polypeptide
SNEW

SEQ ID NO: 2018 - protein, 4 aa, synthetic construct
  REGION 1..4: note = Description of Artificial Sequence: Synthetic polypeptide
TNYL

SEQ ID NO: 2019 - protein, 12 aa, synthetic construct
  REGION 1..12: note = Description of Artificial Sequence: Synthetic polypeptide
WDLAWMFRLPVG

SEQ ID NO: 2020 - protein, 13 aa, synthetic construct
  REGION 1..13: note = Description of Artificial Sequence: Synthetic polypeptide
CTVALPGGYVRVC

SEQ ID NO: 2021 - protein, 13 aa, synthetic construct
  REGION 1..13: note = Description of Artificial Sequence: Synthetic polypeptide
CVAYCIEHHCWTC

SEQ ID NO: 2022 - protein, 12 aa, synthetic construct
  REGION 1..12: note = Description of Artificial Sequence: Synthetic polypeptide
CVFAHNYDYLVC

SEQ ID NO: 2023 - protein, 10 aa, synthetic construct
  REGION 1..10: note = Description of Artificial Sequence: Synthetic polypeptide
CVFTSNYAFC

SEQ ID NO: 2024 - protein, 7 aa, synthetic construct
  REGION 1..7: note = Description of Artificial Sequence: Synthetic polypeptide
VHSPNKK

SEQ ID NO: 2025 - protein, 7 aa, synthetic construct
  REGION 1..7: note = Description of Artificial Sequence: Synthetic polypeptide
CRGDGWC

SEQ ID NO: 2026 - protein, 6 aa, synthetic construct
  REGION 1..6: note = Description of Artificial Sequence: Synthetic polypeptide
  VARIANT 1: note = Xaa can be any naturally occurring amino acid
  VARIANT 6: note = Xaa can be any naturally occurring amino acid
XRGCDX

SEQ ID NO: 2027 - skipped

SEQ ID NO: 2028 - protein, 11 aa, synthetic construct
  REGION 1..11: note = Description of Artificial Sequence: Synthetic polypeptide
SGKGPRQITAL

SEQ ID NO: 2029 - protein, 14 aa, synthetic construct
  REGION 1..14: note = Description of Artificial Sequence: Synthetic polypeptide
  VARIANT 10: note = Xaa is Ala or Gln
  VARIANT 11: note = Xaa is Asn or Ala
  VARIANT 12..14: note = Xaa can be any naturally occurring amino acid
AAAAAAAAAXXXXX

SEQ ID NO: 2030 - protein, 6 aa, synthetic construct
  REGION 1..6: note = Description of Artificial Sequence: Synthetic polypeptide
VYMSPF

SEQ ID NO: 2031 - protein, 7 aa, synthetic construct
  REGION 1..7: note = Description of Artificial Sequence: Synthetic polypeptide
ATWLPPR

SEQ ID NO: 2032 - protein, 12 aa, synthetic construct
  REGION 1..12: note = Description of Artificial Sequence: Synthetic polypeptide
HTMYYHHYQHHL

SEQ ID NO: 2033 - protein, 19 aa, synthetic construct
  REGION 1..19: note = Description of Artificial Sequence: Synthetic polypeptide
SEVGCRAGPLQWLCEKYFG

SEQ ID NO: 2034 - protein, 18 aa, synthetic construct
  REGION 1..18: note = Description of Artificial Sequence: Synthetic polypeptide
CGLLPVGRPDRNVWRWLC

SEQ ID NO: 2035 - protein, 15 aa, synthetic construct
  REGION 1..15: note = Description of Artificial Sequence: Synthetic polypeptide
CKGQCDRFKGLPWEC

SEQ ID NO: 2036 - protein, 5 aa, synthetic construct
  REGION 1..5: note = Description of Artificial Sequence: Synthetic polypeptide
SGRSA

SEQ ID NO: 2037 - protein, 4 aa, synthetic construct
  REGION 1..4: note = Description of Artificial Sequence: Synthetic polypeptide
WGFP

SEQ ID NO: 2038 - protein, 17 aa, synthetic construct
  REGION 1..17: note = Description of Artificial Sequence: Synthetic polypeptide
AEPMPHSLNFSQYLWYT

SEQ ID NO: 2039 - protein, 6 aa, synthetic construct
  REGION 1..6: note = Description of Artificial Sequence: Synthetic polypeptide
  VARIANT 4: note = Xaa is Trp or Phe
WAYXSP

SEQ ID NO: 2040 - protein, 7 aa, synthetic construct
  REGION 1..7: note = Description of Artificial Sequence: Synthetic polypeptide
IELLQAR

SEQ ID NO: 2041 - protein, 16 aa, synthetic construct
  REGION 1..16: note = Description of Artificial Sequence: Synthetic polypeptide
AYTKCSRQWRTCMTTH

SEQ ID NO: 2042 - protein, 15 aa, synthetic construct
  REGION 1..15: note = Description of Artificial Sequence: Synthetic polypeptide
PQNSKIPGPTFLDPH

SEQ ID NO: 2043 - protein, 15 aa, synthetic construct
  REGION 1..15: note = Description of Artificial Sequence: Synthetic polypeptide
SMEPALPDWWWKMFK

SEQ ID NO: 2044 - protein, 16 aa, synthetic construct
  REGION 1..16: note = Description of Artificial Sequence: Synthetic polypeptide
ANTPCGPYTHDCPVKR

SEQ ID NO: 2045 - protein, 12 aa, synthetic construct
  REGION 1..12: note = Description of Artificial Sequence: Synthetic polypeptide
TACHQHVRMVRP

SEQ ID NO: 2046 - protein, 12 aa, synthetic construct
  REGION 1..12: note = Description of Artificial Sequence: Synthetic polypeptide
VPWMEPAYQRFL

SEQ ID NO: 2047 - protein, 8 aa, synthetic construct
  REGION 1..8: note = Description of Artificial Sequence: Synthetic polypeptide
DPRATPGS

SEQ ID NO: 2048 - protein, 12 aa, synthetic construct
  REGION 1..12: note = Description of Artificial Sequence: Synthetic polypeptide
FRPNRAQDYNTN

SEQ ID NO: 2049 - protein, 9 aa, synthetic construct
  REGION 1..9: note = Description of Artificial Sequence: Synthetic polypeptide
CTKNSYLMC

SEQ ID NO: 2050 - protein, 11 aa, synthetic construct
  REGION 1..11: note = Description of Artificial Sequence: Synthetic polypeptide
  VARIANT 2: note = Xaa is Gln or Arg
  VARIANT 3: note = Xaa is Leu or Arg
  VARIANT 5: note = Xaa is Gly or Asn
  VARIANT 6..7: note = Xaa is any amino acid residue
  VARIANT 9: note = Xaa iis Ala or Val
CXXTXXXGXGC

SEQ ID NO: 2051 - protein, 9 aa, synthetic construct
  REGION 1..9: note = Description of Artificial Sequence: Synthetic polypeptide
CPIEDRPMC

SEQ ID NO: 2052 - protein, 12 aa, synthetic construct
  REGION 1..12: note = Description of Artificial Sequence: Synthetic polypeptide
HEWSYLAPYPWF

SEQ ID NO: 2053 - protein, 9 aa, synthetic construct
  REGION 1..9: note = Description of Artificial Sequence: Synthetic polypeptide
MCPKHPLGC

SEQ ID NO: 2054 - protein, 15 aa, synthetic construct
  REGION 1..15: note = Description of Artificial Sequence: Synthetic polypeptide
RMWPSSTVNLSAGRR

SEQ ID NO: 2055 - protein, 20 aa, synthetic construct
  REGION 1..20: note = Description of Artificial Sequence: Synthetic polypeptide
SAKTAVSQRVWLPSHRGGEP

SEQ ID NO: 2056 - protein, 20 aa, synthetic construct
  REGION 1..20: note = Description of Artificial Sequence: Synthetic polypeptide
KSREHVNNSACPSKRITAAL

SEQ ID NO: 2057 - protein, 4 aa, synthetic construct
  REGION 1..4: note = Description of Artificial Sequence: Synthetic polypeptide
EGFR

SEQ ID NO: 2058 - protein, 6 aa, synthetic construct
  REGION 1..6: note = Description of Artificial Sequence: Synthetic polypeptide
AGLGVR

SEQ ID NO: 2059 - protein, 15 aa, synthetic construct
  REGION 1..15: note = Description of Artificial Sequence: Synthetic polypeptide
GTRQGHTMRLGVSDG

SEQ ID NO: 2060 - protein, 15 aa, synthetic construct
  REGION 1..15: note = Description of Artificial Sequence: Synthetic polypeptide
IAGLATPGWSHWLAL

SEQ ID NO: 2061 - protein, 7 aa, synthetic construct
  REGION 1..7: note = Description of Artificial Sequence: Synthetic polypeptide
SMSIARL

SEQ ID NO: 2062 - protein, 7 aa, synthetic construct
  REGION 1..7: note = Description of Artificial Sequence: Synthetic polypeptide
HTFEPGV

SEQ ID NO: 2063 - protein, 15 aa, synthetic construct
  REGION 1..15: note = Description of Artificial Sequence: Synthetic polypeptide
NTSLKRISNKRIRRK

SEQ ID NO: 2064 - protein, 15 aa, synthetic construct
  REGION 1..15: note = Description of Artificial Sequence: Synthetic polypeptide
LRIKRKRRKRKKTRK

SEQ ID NO: 2065 - DNA, 21 bp, adeno-associated virus 2
  variation 3: note = a, c, t, or g
  source 1..21: mol_type = genomic DNA
agnvvmdcaggarscascaac

SEQ ID NO: 2066 - protein, 7 aa, synthetic construct
  REGION 1..7: note = Description of Artificial Sequence: Synthetic polypeptide
SDSGASN

SEQ ID NO: 2067 - protein, 7 aa, synthetic construct
  REGION 1..7: note = Description of Artificial Sequence: Synthetic polypeptide
SPSGASN

SEQ ID NO: 2068 - protein, 7 aa, synthetic construct
  REGION 1..7: note = Description of Artificial Sequence: Synthetic polypeptide
SHSGASN

SEQ ID NO: 2069 - protein, 7 aa, synthetic construct
  REGION 1..7: note = Description of Artificial Sequence: Synthetic polypeptide
SRSGASN

SEQ ID NO: 2070 - protein, 7 aa, synthetic construct
  REGION 1..7: note = Description of Artificial Sequence: Synthetic polypeptide
SKSGASN

SEQ ID NO: 2071 - protein, 7 aa, synthetic construct
  REGION 1..7: note = Description of Artificial Sequence: Synthetic polypeptide
SNSGASN

SEQ ID NO: 2072 - protein, 7 aa, synthetic construct
  REGION 1..7: note = Description of Artificial Sequence: Synthetic polypeptide
SGSGASN

SEQ ID NO: 2073 - protein, 7 aa, synthetic construct
  REGION 1..7: note = Description of Artificial Sequence: Synthetic polypeptide
SASGASN

SEQ ID NO: 2074 - protein, 7 aa, synthetic construct
  REGION 1..7: note = Description of Artificial Sequence: Synthetic polypeptide
SESGTSN

SEQ ID NO: 2075 - protein, 7 aa, synthetic construct
  REGION 1..7: note = Description of Artificial Sequence: Synthetic polypeptide
STTGGSN

SEQ ID NO: 2076 - protein, 7 aa, synthetic construct
  REGION 1..7: note = Description of Artificial Sequence: Synthetic polypeptide
SSAGSTN

SEQ ID NO: 2077 - protein, 6 aa, synthetic construct
  REGION 1..6: note = Description of Artificial Sequence: Synthetic polypeptide
NNDSQA

SEQ ID NO: 2078 - protein, 6 aa, synthetic construct
  REGION 1..6: note = Description of Artificial Sequence: Synthetic polypeptide
NNRNQA

SEQ ID NO: 2079 - protein, 6 aa, synthetic construct
  REGION 1..6: note = Description of Artificial Sequence: Synthetic polypeptide
NNNKQA

SEQ ID NO: 2080 - protein, 6 aa, synthetic construct
  REGION 1..6: note = Description of Artificial Sequence: Synthetic polypeptide
NAKRQA

SEQ ID NO: 2081 - protein, 6 aa, synthetic construct
  REGION 1..6: note = Description of Artificial Sequence: Synthetic polypeptide
NDEHQA

SEQ ID NO: 2082 - protein, 6 aa, synthetic construct
  REGION 1..6: note = Description of Artificial Sequence: Synthetic polypeptide
NTSQKA

SEQ ID NO: 2083 - protein, 25 aa, synthetic construct
  REGION 1..25: note = Description of Artificial Sequence: Synthetic polypeptide
YYLSRTNTPSGTDTQSRLVFSQAGA

SEQ ID NO: 2084 - protein, 25 aa, synthetic construct
  REGION 1..25: note = Description of Artificial Sequence: Synthetic polypeptide
YYLSRTNTDSGTETQSGLDFSQAGA

SEQ ID NO: 2085 - protein, 25 aa, synthetic construct
  REGION 1..25: note = Description of Artificial Sequence: Synthetic polypeptide
YYLSRTNTESGTPTQSALEFSQAGA

SEQ ID NO: 2086 - protein, 25 aa, synthetic construct
  REGION 1..25: note = Description of Artificial Sequence: Synthetic polypeptide
YYLSRTNTHSGTHTQSPLHFSQAGA

SEQ ID NO: 2087 - protein, 25 aa, synthetic construct
  REGION 1..25: note = Description of Artificial Sequence: Synthetic polypeptide
YYLSRTNTSSGTITISHLIFSQAGA

SEQ ID NO: 2088 - protein, 25 aa, synthetic construct
  REGION 1..25: note = Description of Artificial Sequence: Synthetic polypeptide
YYLSRTNTRSGIMTKSSLMFSQAGA

SEQ ID NO: 2089 - protein, 25 aa, synthetic construct
  REGION 1..25: note = Description of Artificial Sequence: Synthetic polypeptide
YYLSRTNTKSGRKTLSNLSFSQAGA

SEQ ID NO: 2090 - protein, 25 aa, synthetic construct
  REGION 1..25: note = Description of Artificial Sequence: Synthetic polypeptide
YYLSRTNDGSGPVTPSKLRFSQRGA

SEQ ID NO: 2091 - protein, 25 aa, synthetic construct
  REGION 1..25: note = Description of Artificial Sequence: Synthetic polypeptide
YYLSRTNAASGHATHSDLKFSQPGA

SEQ ID NO: 2092 - protein, 25 aa, synthetic construct
  REGION 1..25: note = Description of Artificial Sequence: Synthetic polypeptide
YYLSRTNGQAGSLTMSELGFSQVGA

SEQ ID NO: 2093 - protein, 25 aa, synthetic construct
  REGION 1..25: note = Description of Artificial Sequence: Synthetic polypeptide
YYLSRTNSTGGNQTTSQLLFSQLSA

SEQ ID NO: 2094 - protein, 25 aa, synthetic construct
  REGION 1..25: note = Description of Artificial Sequence: Synthetic polypeptide
YFLSRTNNNTGLNTNSTLNFSQGRA

SEQ ID NO: 2095 - protein, 16 aa, synthetic construct
  REGION 1..16: note = Description of Artificial Sequence: Synthetic polypeptide
SKTGADNNNSEYSWTG

SEQ ID NO: 2096 - protein, 16 aa, synthetic construct
  REGION 1..16: note = Description of Artificial Sequence: Synthetic polypeptide
SKTDADNNNSEYSWTG

SEQ ID NO: 2097 - protein, 16 aa, synthetic construct
  REGION 1..16: note = Description of Artificial Sequence: Synthetic polypeptide
SKTEADNNNSEYSWTG

SEQ ID NO: 2098 - protein, 16 aa, synthetic construct
  REGION 1..16: note = Description of Artificial Sequence: Synthetic polypeptide
SKTPADNNNSEYSWTG

SEQ ID NO: 2099 - protein, 16 aa, synthetic construct
  REGION 1..16: note = Description of Artificial Sequence: Synthetic polypeptide
SKTHADNNNSEYSWTG

SEQ ID NO: 2100 - protein, 16 aa, synthetic construct
  REGION 1..16: note = Description of Artificial Sequence: Synthetic polypeptide
SKTQADNNNSEYSWTG

SEQ ID NO: 2101 - protein, 16 aa, synthetic construct
  REGION 1..16: note = Description of Artificial Sequence: Synthetic polypeptide
SKTIADNNNSEYSWTG

SEQ ID NO: 2102 - protein, 16 aa, synthetic construct
  REGION 1..16: note = Description of Artificial Sequence: Synthetic polypeptide
SKTMADNNNSEYSWTG

SEQ ID NO: 2103 - protein, 16 aa, synthetic construct
  REGION 1..16: note = Description of Artificial Sequence: Synthetic polypeptide
SKTRADNNNSEYSWTG

SEQ ID NO: 2104 - protein, 16 aa, synthetic construct
  REGION 1..16: note = Description of Artificial Sequence: Synthetic polypeptide
SKTNADNNNSEYSWTG

SEQ ID NO: 2105 - protein, 16 aa, synthetic construct
  REGION 1..16: note = Description of Artificial Sequence: Synthetic polypeptide
SKTVGRNNNSEYSWTG

SEQ ID NO: 2106 - protein, 16 aa, synthetic construct
  REGION 1..16: note = Description of Artificial Sequence: Synthetic polypeptide
SKTADRNNNSEYSWTG

SEQ ID NO: 2107 - protein, 16 aa, synthetic construct
  REGION 1..16: note = Description of Artificial Sequence: Synthetic polypeptide
SKKLSQNNNSKYSWQG

SEQ ID NO: 2108 - protein, 16 aa, synthetic construct
  REGION 1..16: note = Description of Artificial Sequence: Synthetic polypeptide
SKPTTGNNNSDYSWPG

SEQ ID NO: 2109 - protein, 16 aa, synthetic construct
  REGION 1..16: note = Description of Artificial Sequence: Synthetic polypeptide
STQKNENNNSNYSWPG

SEQ ID NO: 2110 - protein, 8 aa, synthetic construct
  REGION 1..8: note = Description of Artificial Sequence: Synthetic polypeptide
HKDDEGKF

SEQ ID NO: 2111 - protein, 8 aa, synthetic construct
  REGION 1..8: note = Description of Artificial Sequence: Synthetic polypeptide
HKDDNRKF

SEQ ID NO: 2112 - protein, 8 aa, synthetic construct
  REGION 1..8: note = Description of Artificial Sequence: Synthetic polypeptide
HKDDTNKF

SEQ ID NO: 2113 - protein, 8 aa, synthetic construct
  REGION 1..8: note = Description of Artificial Sequence: Synthetic polypeptide
HEDSDKNF

SEQ ID NO: 2114 - protein, 8 aa, synthetic construct
  REGION 1..8: note = Description of Artificial Sequence: Synthetic polypeptide
HRDGADSF

SEQ ID NO: 2115 - protein, 8 aa, synthetic construct
  REGION 1..8: note = Description of Artificial Sequence: Synthetic polypeptide
HGDNKSRF

SEQ ID NO: 2116 - protein, 14 aa, synthetic construct
  REGION 1..14: note = Description of Artificial Sequence: Synthetic polypeptide
KQGSEKTNVDFEEV

SEQ ID NO: 2117 - protein, 14 aa, synthetic construct
  REGION 1..14: note = Description of Artificial Sequence: Synthetic polypeptide
KQGSEKTNVDSEEV

SEQ ID NO: 2118 - protein, 14 aa, synthetic construct
  REGION 1..14: note = Description of Artificial Sequence: Synthetic polypeptide
KQGSEKTNVDVEEV

SEQ ID NO: 2119 - protein, 14 aa, synthetic construct
  REGION 1..14: note = Description of Artificial Sequence: Synthetic polypeptide
KQGSDKTNVDDAGV

SEQ ID NO: 2120 - protein, 14 aa, synthetic construct
  REGION 1..14: note = Description of Artificial Sequence: Synthetic polypeptide
KQGSSKTNVDPREV

SEQ ID NO: 2121 - protein, 14 aa, synthetic construct
  REGION 1..14: note = Description of Artificial Sequence: Synthetic polypeptide
KQGSRKTNVDHKQV

SEQ ID NO: 2122 - protein, 14 aa, synthetic construct
  REGION 1..14: note = Description of Artificial Sequence: Synthetic polypeptide
KQGSKGGNVDTNRV

SEQ ID NO: 2123 - protein, 14 aa, synthetic construct
  REGION 1..14: note = Description of Artificial Sequence: Synthetic polypeptide
KQGSGEANVDNGDV

SEQ ID NO: 2124 - protein, 14 aa, synthetic construct
  REGION 1..14: note = Description of Artificial Sequence: Synthetic polypeptide
KQDAAADNIDYDHV

SEQ ID NO: 2125 - protein, 14 aa, synthetic construct
  REGION 1..14: note = Description of Artificial Sequence: Synthetic polypeptide
KQSGTRSNAAASSV

SEQ ID NO: 2126 - protein, 14 aa, synthetic construct
  REGION 1..14: note = Description of Artificial Sequence: Synthetic polypeptide
KENTNTNDTELTNV

SEQ ID NO: 2127 - protein, 14 aa, synthetic construct
  REGION 1..14: note = Description of Artificial Sequence: Synthetic polypeptide
QRGNNVAATADVNT

SEQ ID NO: 2128 - protein, 14 aa, synthetic construct
  REGION 1..14: note = Description of Artificial Sequence: Synthetic polypeptide
QRGNNEAATADVNT

SEQ ID NO: 2129 - protein, 14 aa, synthetic construct
  REGION 1..14: note = Description of Artificial Sequence: Synthetic polypeptide
QRGNNPAATADVNT

SEQ ID NO: 2130 - protein, 14 aa, synthetic construct
  REGION 1..14: note = Description of Artificial Sequence: Synthetic polypeptide
QRGNNHAATADVNT

SEQ ID NO: 2131 - protein, 14 aa, synthetic construct
  REGION 1..14: note = Description of Artificial Sequence: Synthetic polypeptide
QEENNIAATPGVNT

SEQ ID NO: 2132 - protein, 14 aa, synthetic construct
  REGION 1..14: note = Description of Artificial Sequence: Synthetic polypeptide
QPPNNMAATHEVNT

SEQ ID NO: 2133 - protein, 14 aa, synthetic construct
  REGION 1..14: note = Description of Artificial Sequence: Synthetic polypeptide
QHHNNSAATTIVNT

SEQ ID NO: 2134 - protein, 14 aa, synthetic construct
  REGION 1..14: note = Description of Artificial Sequence: Synthetic polypeptide
QTTNNRAAFNMVET

SEQ ID NO: 2135 - protein, 14 aa, synthetic construct
  REGION 1..14: note = Description of Artificial Sequence: Synthetic polypeptide
QKKNNNAASKKVAT

SEQ ID NO: 2136 - protein, 14 aa, synthetic construct
  REGION 1..14: note = Description of Artificial Sequence: Synthetic polypeptide
QGGNNKAADDAVKT

SEQ ID NO: 2137 - protein, 14 aa, synthetic construct
  REGION 1..14: note = Description of Artificial Sequence: Synthetic polypeptide
QAAKGGAADDAVKT

SEQ ID NO: 2138 - protein, 14 aa, synthetic construct
  REGION 1..14: note = Description of Artificial Sequence: Synthetic polypeptide
QDDRAAAANESVDT

SEQ ID NO: 2139 - protein, 14 aa, synthetic construct
  REGION 1..14: note = Description of Artificial Sequence: Synthetic polypeptide
QQQHDDAAYQRVHT

SEQ ID NO: 2140 - protein, 14 aa, synthetic construct
  REGION 1..14: note = Description of Artificial Sequence: Synthetic polypeptide
QSSSSLAAVSTVQT

SEQ ID NO: 2141 - protein, 14 aa, synthetic construct
  REGION 1..14: note = Description of Artificial Sequence: Synthetic polypeptide
QNNQTTAAIRNVTT

SEQ ID NO: 2142 - protein, 12 aa, synthetic construct
  REGION 1..12: note = Description of Artificial Sequence: Synthetic polypeptide
NYNKKSDNVDFT

SEQ ID NO: 2143 - protein, 12 aa, synthetic construct
  REGION 1..12: note = Description of Artificial Sequence: Synthetic polypeptide
NYNKKSENVDFT

SEQ ID NO: 2144 - protein, 12 aa, synthetic construct
  REGION 1..12: note = Description of Artificial Sequence: Synthetic polypeptide
NYNKKSLNVDFT

SEQ ID NO: 2145 - protein, 12 aa, synthetic construct
  REGION 1..12: note = Description of Artificial Sequence: Synthetic polypeptide
NYNKKSPNVDFT

SEQ ID NO: 2146 - protein, 12 aa, synthetic construct
  REGION 1..12: note = Description of Artificial Sequence: Synthetic polypeptide
NYSKKSHCVDFT

SEQ ID NO: 2147 - protein, 11 aa, synthetic construct
  REGION 1..11: note = Description of Artificial Sequence: Synthetic polypeptide
NYRKTIYVDFT

SEQ ID NO: 2148 - protein, 11 aa, synthetic construct
  REGION 1..11: note = Description of Artificial Sequence: Synthetic polypeptide
NYKEKKDVHFT

SEQ ID NO: 2149 - protein, 11 aa, synthetic construct
  REGION 1..11: note = Description of Artificial Sequence: Synthetic polypeptide
NYGHRAIVQFT

SEQ ID NO: 2150 - protein, 11 aa, synthetic construct
  REGION 1..11: note = Description of Artificial Sequence: Synthetic polypeptide
NYANHQFVVCT

SEQ ID NO: 2151 - protein, 12 aa, synthetic construct
  REGION 1..12: note = Description of Artificial Sequence: Synthetic polypeptide
NYDDDPTGVLLT

SEQ ID NO: 2152 - protein, 11 aa, synthetic construct
  REGION 1..11: note = Description of Artificial Sequence: Synthetic polypeptide
NYDDPTGVLLT

SEQ ID NO: 2153 - protein, 11 aa, synthetic construct
  REGION 1..11: note = Description of Artificial Sequence: Synthetic polypeptide
NFEQQNSVEWT

SEQ ID NO: 2154 - protein, 7 aa, synthetic construct
  REGION 1..7: note = Description of Artificial Sequence: Synthetic polypeptide
SQSGASN

SEQ ID NO: 2155 - protein, 6 aa, synthetic construct
  REGION 1..6: note = Description of Artificial Sequence: Synthetic polypeptide
NNGSQA

SEQ ID NO: 2156 - protein, 25 aa, synthetic construct
  REGION 1..25: note = Description of Artificial Sequence: Synthetic polypeptide
YYLSRTNTPSGTTTWSRLQFSQAGA

SEQ ID NO: 2157 - protein, 16 aa, synthetic construct
  REGION 1..16: note = Description of Artificial Sequence: Synthetic polypeptide
SKTSADNNNSEYSWTG

SEQ ID NO: 2158 - protein, 8 aa, synthetic construct
  REGION 1..8: note = Description of Artificial Sequence: Synthetic polypeptide
HKDDEEKF

SEQ ID NO: 2159 - protein, 14 aa, synthetic construct
  REGION 1..14: note = Description of Artificial Sequence: Synthetic polypeptide
KQGSEKTNVDIEEV

SEQ ID NO: 2160 - protein, 14 aa, synthetic construct
  REGION 1..14: note = Description of Artificial Sequence: Synthetic polypeptide
QRGNNQAATADVNT

SEQ ID NO: 2161 - protein, 12 aa, synthetic construct
  REGION 1..12: note = Description of Artificial Sequence: Synthetic polypeptide
NYNKKSVNVDFT

SEQ ID NO: 2162 - protein, 42 aa, synthetic construct
  REGION 1..42: note = Description of Artificial Sequence: Synthetic polypeptide
SQSGASNYNTPSGTTTQSRLQFSTSADNNNSEYSWTGATKYH

SEQ ID NO: 2163 - protein, 42 aa, synthetic construct
  REGION 1..42: note = Description of Artificial Sequence: Synthetic polypeptide
SASGASNFNSEGGSLTQSSLGFSTDGENNNSDFSWTGATKYH

SEQ ID NO: 2164 - protein, 42 aa, synthetic construct
  REGION 1..42: note = Description of Artificial Sequence: Synthetic polypeptide
SQSGASNYNTPSGTTTQSRLQFSTDGENNNSDFSWTGATKYH

SEQ ID NO: 2165 - protein, 42 aa, synthetic construct
  REGION 1..42: note = Description of Artificial Sequence: Synthetic polypeptide
SASGASNYNTPSGTTTQSRLQFSTSADNNNSEFSWPGATTYH

SEQ ID NO: 2166 - protein, 42 aa, synthetic construct
  REGION 1..42: note = Description of Artificial Sequence: Synthetic polypeptide
SQSGASNFNSEGGSLTQSSLGFSTDGENNNSDFSWTGATKYH

SEQ ID NO: 2167 - protein, 42 aa, synthetic construct
  REGION 1..42: note = Description of Artificial Sequence: Synthetic polypeptide
SASGASNYNTPSGSLTQSSLGFSTDGENNNSDFSWTGATKYH

SEQ ID NO: 2168 - protein, 42 aa, synthetic construct
  REGION 1..42: note = Description of Artificial Sequence: Synthetic polypeptide
SQSGASNYNTPSGTTTQSRLQFSTSADNNNSDFSWTGATKYH

SEQ ID NO: 2169 - protein, 42 aa, synthetic construct
  REGION 1..42: note = Description of Artificial Sequence: Synthetic polypeptide
SGAGASNFNSEGGSLTQSSLGFSTDGENNNSDFSWTGATKYH

SEQ ID NO: 2170 - protein, 7 aa, synthetic construct
  REGION 1..7: note = Description of Artificial Sequence: Synthetic polypeptide
SGAGASN

SEQ ID NO: 2171 - protein, 15 aa, synthetic construct
  REGION 1..15: note = Description of Artificial Sequence: Synthetic polypeptide
NSEGGSLTQSSLGFS

SEQ ID NO: 2172 - protein, 11 aa, synthetic construct
  REGION 1..11: note = Description of Artificial Sequence: Synthetic polypeptide
TDGENNNSDFS

SEQ ID NO: 2173 - protein, 10 aa, synthetic construct
  REGION 1..10: note = Description of Artificial Sequence: Synthetic polypeptide
SEFSWPGATT

SEQ ID NO: 2174 - protein, 13 aa, synthetic construct
  REGION 1..13: note = Description of Artificial Sequence: Synthetic polypeptide
TSADNNNSDFSWT

SEQ ID NO: 2175 - protein, 8 aa, synthetic construct
  REGION 1..8: note = Description of Artificial Sequence: Synthetic polypeptide
SQSGASNY

SEQ ID NO: 2176 - protein, 15 aa, synthetic construct
  REGION 1..15: note = Description of Artificial Sequence: Synthetic polypeptide
NTPSGTTTQSRLQFS

SEQ ID NO: 2177 - protein, 19 aa, synthetic construct
  REGION 1..19: note = Description of Artificial Sequence: Synthetic polypeptide
TSADNNNSEYSWTGATKYH

SEQ ID NO: 2178 - protein, 8 aa, synthetic construct
  REGION 1..8: note = Description of Artificial Sequence: Synthetic polypeptide
SASGASNF

SEQ ID NO: 2179 - protein, 19 aa, synthetic construct
  REGION 1..19: note = Description of Artificial Sequence: Synthetic polypeptide
TDGENNNSDFSWTGATKYH

SEQ ID NO: 2180 - protein, 8 aa, synthetic construct
  REGION 1..8: note = Description of Artificial Sequence: Synthetic polypeptide
SASGASNY

SEQ ID NO: 2181 - protein, 19 aa, synthetic construct
  REGION 1..19: note = Description of Artificial Sequence: Synthetic polypeptide
TSADNNNSEFSWPGATTYH

SEQ ID NO: 2182 - protein, 15 aa, synthetic construct
  REGION 1..15: note = Description of Artificial Sequence: Synthetic polypeptide
NTPSGSLTQSSLGFS

SEQ ID NO: 2183 - protein, 19 aa, synthetic construct
  REGION 1..19: note = Description of Artificial Sequence: Synthetic polypeptide
TSADNNNSDFSWTGATKYH

SEQ ID NO: 2184 - protein, 8 aa, synthetic construct
  REGION 1..8: note = Description of Artificial Sequence: Synthetic polypeptide
SGAGASNF

SEQ ID NO: 2185 - DNA, 48 bp, synthetic construct
  misc_feature 1..48: note = Description of Artificial Sequence: Synthetic oligonucleotide
  variation 20: note = n is a, c, g, or t
  variation 35: note = n is a, c, g, or t
  source 1..48: mol_type = other DNA
ctccagvvsvvsmrsrvcvnsgcagctdhcvvsrnsgtcvmsacacaa

SEQ ID NO: 2186 - DNA, 48 bp, synthetic construct
  misc_feature 1..48: note = Description of Artificial Sequence: Synthetic oligonucleotide
  source 1..48: mol_type = other DNA
ctccagagaggcaacagacaagcagctaccgcagatgtcaacacacaa

SEQ ID NO: 2187 - protein, 7 aa, synthetic construct
  REGION 1..7: note = Description of Artificial Sequence: Synthetic polypeptide
SAAGASN

SEQ ID NO: 2188 - protein, 24 aa, synthetic construct
  REGION 1..24: note = Description of Artificial Sequence: Synthetic polypeptide
YFLSRTNTESGSTTQSTLRFSQAG

SEQ ID NO: 2189 - protein, 13 aa, synthetic construct
  REGION 1..13: note = Description of Artificial Sequence: Synthetic polypeptide
SKTSADNNNSDFS

SEQ ID NO: 2190 - protein, 14 aa, synthetic construct
  REGION 1..14: note = Description of Artificial Sequence: Synthetic polypeptide
KQGSEKTDVDIDKV

SEQ ID NO: 2191 - protein, 7 aa, synthetic construct
  REGION 1..7: note = Description of Artificial Sequence: Synthetic polypeptide
STAGASN

SEQ ID NO: 2192 - protein, 24 aa, synthetic construct
  REGION 1..24: note = Description of Artificial Sequence: Synthetic polypeptide
YFLSRTNTTSGIETQSTLRFSQAG

SEQ ID NO: 2193 - protein, 13 aa, synthetic construct
  REGION 1..13: note = Description of Artificial Sequence: Synthetic polypeptide
SKTDGENNNSDFS

SEQ ID NO: 2194 - protein, 14 aa, synthetic construct
  REGION 1..14: note = Description of Artificial Sequence: Synthetic polypeptide
KQGAAADDVEIDGV

SEQ ID NO: 2195 - protein, 7 aa, synthetic construct
  REGION 1..7: note = Description of Artificial Sequence: Synthetic polypeptide
SEAGASN

SEQ ID NO: 2196 - protein, 24 aa, synthetic construct
  REGION 1..24: note = Description of Artificial Sequence: Synthetic polypeptide
YYLSRTNTPSGTTTQSRLQFSQAG

SEQ ID NO: 2197 - protein, 13 aa, synthetic construct
  REGION 1..13: note = Description of Artificial Sequence: Synthetic polypeptide
SKTSADNNNSEYS

SEQ ID NO: 2198 - protein, 14 aa, synthetic construct
  REGION 1..14: note = Description of Artificial Sequence: Synthetic polypeptide
KQGSEKTNVDIEKV

SEQ ID NO: 2199 - protein, 24 aa, synthetic construct
  REGION 1..24: note = Description of Artificial Sequence: Synthetic polypeptide
YFLSRTNDASGSDTKSTLLFSQAG

SEQ ID NO: 2200 - protein, 13 aa, synthetic construct
  REGION 1..13: note = Description of Artificial Sequence: Synthetic polypeptide
STTPSENNNSEYS

SEQ ID NO: 2201 - protein, 7 aa, synthetic construct
  REGION 1..7: note = Description of Artificial Sequence: Synthetic polypeptide
SAAGATN

SEQ ID NO: 2202 - protein, 24 aa, synthetic construct
  REGION 1..24: note = Description of Artificial Sequence: Synthetic polypeptide
YFLSRTNGEAGSATLSELRFSQAG

SEQ ID NO: 2203 - protein, 8 aa, synthetic construct
  REGION 1..8: note = Description of Artificial Sequence: Synthetic polypeptide
HGDDADRF

SEQ ID NO: 2204 - protein, 14 aa, synthetic construct
  REGION 1..14: note = Description of Artificial Sequence: Synthetic polypeptide
KQGAEKSDVEVDRV

SEQ ID NO: 2205 - protein, 14 aa, synthetic construct
  REGION 1..14: note = Description of Artificial Sequence: Synthetic polypeptide
KQDSGGDNIDIDQV

SEQ ID NO: 2206 - protein, 7 aa, synthetic construct
  REGION 1..7: note = Description of Artificial Sequence: Synthetic polypeptide
SDAGASN

SEQ ID NO: 2207 - protein, 24 aa, synthetic construct
  REGION 1..24: note = Description of Artificial Sequence: Synthetic polypeptide
YFLSRTNTEGGHDTQSTLRFSQAG

SEQ ID NO: 2208 - protein, 14 aa, synthetic construct
  REGION 1..14: note = Description of Artificial Sequence: Synthetic polypeptide
KEDGGGSDVAIDEV

SEQ ID NO: 2209 - protein, 7 aa, synthetic construct
  REGION 1..7: note = Description of Artificial Sequence: Synthetic polypeptide
SNAGASN

SEQ ID NO: 2210 - protein, 24 aa, synthetic construct
  REGION 1..24: note = Description of Artificial Sequence: Synthetic polypeptide
YFLSRTNGEAGSATLSELRFSQPG

SEQ ID NO: 2211 - DNA, 21 bp, synthetic construct
  misc_feature 1..21: note = Description of Artificial Sequence: Synthetic polynucleotide
  source 1..21: mol_type = other DNA
agcvvmdcaggarscascaac

SEQ ID NO: 2212 - DNA, 18 bp, synthetic construct
  misc_feature 1..18: note = Description of Artificial Sequence: Synthetic polynucleotide
  source 1..18: mol_type = other DNA
aacracrrsmrsmaggca

SEQ ID NO: 2213 - DNA, 24 bp, synthetic construct
  misc_feature 1..24: note = Description of Artificial Sequence: Synthetic polynucleotide
  source 1..24: mol_type = other DNA
cacrrggacrrcrmsrrsarsttt

SEQ ID NO: 2214 - DNA, 75 bp, synthetic construct
  misc_feature 1..75: note = Description of Artificial Sequence: Synthetic polynucleotide
  variation 35: note = n is a, c, g, or t
  source 1..75: mol_type = other DNA
tatttcttgagcagaacaaacrvcvvsrscggamncvhsacgmhstcavvscttvdsttttctcagsbcrgsgcg

SEQ ID NO: 2215 - DNA, 48 bp, synthetic construct
  misc_feature 1..48: note = Description of Artificial Sequence: Synthetic polynucleotide
  variation 31: note = n is a, c, g, or t
  source 1..48: mol_type = other DNA
tcaamammavnsrvcsrsaacaacaacagtrasttctcgtggmmagga

SEQ ID NO: 2216 - DNA, 42 bp, synthetic construct
  misc_feature 1..42: note = Description of Artificial Sequence: Synthetic polynucleotide
  variation 31: note = n is a, c, g, or t
  source 1..42: mol_type = other DNA
aagsaarrcrscrvsrvarvcratrycgmsnhcrvmvrsgtc

SEQ ID NO: 2217 - DNA, 42 bp, synthetic construct
  misc_feature 1..42: note = Description of Artificial Sequence: Synthetic polynucleotide
  variation 17: note = a, c, t, or g
  variation 32: note = a, c, t, or g
  source 1..42: mol_type = other DNA
cagvvsvvsmrsrvcvnsgcagctdhcvvsrnsgtcvmsaca

SEQ ID NO: 2218 - DNA, 33 bp, synthetic construct
  misc_feature 1..33: note = Description of Artificial Sequence: Synthetic polynucleotide
  source 1..33: mol_type = other DNA
aactwcrvsvasmvsvhsddtgtgswstksact

SEQ ID NO: 2219 - DNA, 30 bp, synthetic construct
  misc_feature 1..30: note = Description of Artificial Sequence: Synthetic polynucleotide
  source 1..30: mol_type = other DNA
ttgttgaacatcaccacgtgacgcacgttc

SEQ ID NO: 2220 - DNA, 30 bp, synthetic construct
  misc_feature 1..30: note = Description of Artificial Sequence: Synthetic polynucleotide
  source 1..30: mol_type = other DNA
tccccgtggttctactacataatgtggccg

SEQ ID NO: 2221 - DNA, 30 bp, synthetic construct
  misc_feature 1..30: note = Description of Artificial Sequence: Synthetic polynucleotide
  source 1..30: mol_type = other DNA
ttccacactccgttttggataatgttgaac

SEQ ID NO: 2222 - DNA, 30 bp, synthetic construct
  misc_feature 1..30: note = Description of Artificial Sequence: Synthetic polynucleotide
  source 1..30: mol_type = other DNA
agggacatccccagctccatgctgtggtcg

SEQ ID NO: 2223 - DNA, 30 bp, synthetic construct
  misc_feature 1..30: note = Description of Artificial Sequence: Synthetic polynucleotide
  source 1..30: mol_type = other DNA
agggacaacccctccgactcgccctaatcc

SEQ ID NO: 2224 - DNA, 30 bp, synthetic construct
  misc_feature 1..30: note = Description of Artificial Sequence: Synthetic polynucleotide
  source 1..30: mol_type = other DNA
tcctagtagaagacaccctctcactgcccg

SEQ ID NO: 2225 - DNA, 30 bp, synthetic construct
  misc_feature 1..30: note = Description of Artificial Sequence: Synthetic polynucleotide
  source 1..30: mol_type = other DNA
agtaccatgtacacccactctcccagtgcc

SEQ ID NO: 2226 - DNA, 30 bp, synthetic construct
  misc_feature 1..30: note = Description of Artificial Sequence: Synthetic polynucleotide
  source 1..30: mol_type = other DNA
atatggacgttcatgctgatcaccataccg

SEQ ID NO: 2227 - DNA, 30 bp, synthetic construct
  misc_feature 1..30: note = Description of Artificial Sequence: Synthetic polynucleotide
  source 1..30: mol_type = other DNA
agcaggagctccttggcctcagcgtgcgag

SEQ ID NO: 2228 - DNA, 30 bp, synthetic construct
  misc_feature 1..30: note = Description of Artificial Sequence: Synthetic polynucleotide
  source 1..30: mol_type = other DNA
acaagcagcttcactatgacaaccactgac

SEQ ID NO: 2229 - DNA, 284 bp, synthetic construct
  misc_feature 1..284: note = Description of Artificial Sequence: Synthetic polynucleotide
  variation 59: note = n is a, c, g, or t
  variation 244: note = n is a, c, g, or t
  source 1..284: mol_type = other DNA
cagcctaggaactggcttcctggaccctgttaccgccagcagagagtctcaamammavnsrvcsrsaacaacaacagtrasttctcctggmmaggagctaccaagtaccacctcaatggcagagactctctggtgaatcccggaccagctatggcaagccacrrggacrrcrmsrrsarsttttttcctcagagcggggttctcatctttgggaagsaarrcrscrvsrvarvcratrycgmsnhcrvmvrsgtcatgattacagacgaagaggagatctggac

SEQ ID NO: 2230 - DNA, 34 bp, synthetic construct
  misc_feature 1..34: note = Description of Artificial Sequence: Synthetic polynucleotide
  source 1..34: mol_type = other DNA
tgggacaatggcggtcgtctctcagagttktkkt

SEQ ID NO: 2231 - DNA, 35 bp, synthetic construct
  misc_feature 1..35: note = Description of Artificial Sequence: Synthetic polynucleotide
  source 1..35: mol_type = other DNA
agaggacckktcctcgatggttcatggtggagtta

SEQ ID NO: 2232 - DNA, 31 bp, synthetic construct
  misc_feature 1..31: note = Description of Artificial Sequence: Synthetic polynucleotide
  source 1..31: mol_type = other DNA
ccacttagggcctggtcgataccgttcggtg

SEQ ID NO: 2233 - DNA, 32 bp, synthetic construct
  misc_feature 1..32: note = Description of Artificial Sequence: Synthetic polynucleotide
  source 1..32: mol_type = other DNA
tctcgccccaagagtagaaacccttcsttyyg

SEQ ID NO: 2234 - protein, 735 aa, Adeno-associated virus 2 [sequence omitted]

SEQ ID NO: 2235 - protein, 736 aa, Adeno-associated virus 9; identical to SEQ ID NO: 123

SEQ ID NO: 2236 - protein, 7 aa, synthetic construct
  REGION 1..7: note = Description of Artificial Sequence: Synthetic polypeptide
GSTPPPM

SEQ ID NO: 2237 - protein, 7 aa, synthetic construct
  REGION 1..7: note = Description of Artificial Sequence: Synthetic polypeptide
GETRAPL

SEQ ID NO: 2238 - protein, 6 aa, synthetic construct
  REGION 1..6: note = Description of Artificial Sequence: Synthetic polypeptide
SPAKFA

SEQ ID NO: 2239 - protein, 6 aa, synthetic construct
  REGION 1..6: note = Description of Artificial Sequence: Synthetic polypeptide
NKDKLN

SEQ ID NO: 2240 - DNA, 2306 bp, synthetic construct
  misc_feature 1..2306: note = Description of Artificial Sequence: Synthetic polynucleotide
  source 1..2306: mol_type = other DNA
cctgcaggcagctgcgcgctcgctcgctcactgaggccgcccgggcaaagcccgggcgtcgggcgacctttggtcgcccggcctcagtgagcgagcgagcgcgcagagagggagtggccaactccatcactaggggttccttgtagttaatgattaacccgccatgctacttatctacgtagccatgcgtcgacataacgcgtgtttacaacatttgctgcccacttttcctaggtttcttgagacctctacaagagttggagttgacacttggggtactttcttggtgtaacgaactaatagcctgaaaaaaagaagtcatgtgttttcagcaaggcaagaaactgtctaacatagtagataaaacagagaacacttggccggaatcaactaagatgttgctatgttccattcatcatattatctccatctgcagagtagtgggttagtggagggtagaaaacattctcctgaacaactagttaaacttggctttgagttccacctgtaccacttgcataatcttgggaaagtgagttgcctaattcagtgacattaataaatttattaatttcttctttcaataaaacctggagagagcttcatatgtatcagcatatgctaaacttgaaagatacaagtagaaaatggaaggaaatatatctgactcaatagggatagttcaagggttaaattaaaagtagtaaagtattataattaatctgacatggtacctaatatataataatcatgtattaagaatgccagtcaccctctagcggccgcaattcgaacgctgacgtcatcaacccgctccaaggaatcgcgggcccagtgtcactaggcgggaacacccagcgcgcgtgcgccctggcaggaagatggctgtgagggacagggagtggcgccctgcaatatttgcatgtcgctatgtgttctgggaaatcaccataaacgtgaaatgtctttggatttgggaatcttataagttctgtatgagaccacaccggtgaagcaaagaaggggcagagggagcccgtgagctgagtgggccagggactgggagaaggagtgaggaggcagggccggcatgcctctgctgctggccagaccccttaactcatttgttcccgtctgcacctgtcactagtaacagatgagttaaggggtttggccgtgtagtgctacccagcgctggctgcctcctcagcattgcaattcctctcccatctgggcaccagtcagctaccctggtgggaatctgggtagccctcgagatagcggccgcccccgagatctttttccctctgccaaaaattatggggacatcatgaagccccttgagcatctgacttctggctaataaaggaaatttattttcattgcaatagtgtgttggaattttttgtgtctctcactcgactagatttaaatgtttgtttcttgatttgtctctccttctcagaaagtgtgcatatatctgcatggaaggtgaatgtttcagcattaaactctttgggaacgtatgtttcatcgacttccagagctgaaaagcatggtcgcctgttcaccaaggattctgtgcagcatttggtgactctgtcacttactggcgttttctcatgcaacacacataactggttcaggaccacggatagctaaagaacaggcaggagagcagaaattcaaaagaggtgaagctgaaaattttctactaaaaatacaaaaaattagccaggcatggtggcatgcacctgtagtcccagctacttgggaggctgaggcaggagaatggcttgaacctgggaggcggaggttgcagtgagccgagatggcaccactgcactccagcctggacaacaaagcgagactccgtctcaaaaaaaaaaaaaaaattatcatcctcggggccttgactgccaatatcacacatacacacacatgcatgcacacacacatgcacacaaacatgcacacacacacattacttccttctgcttatgaaagctagcattatcaatatctaaaggtaaaattttttcattattaatttattatatttttttaaagactcacatagtcttctgcacagggcattctttttgatttaaatagcatcgatgctacgtagataagtagcatggcgggttaatcattaactacagaggaacccctagtgatggagttggccactccctctctgcgcgctcgctcgctcactgaggccgggcgaccaaaggtcgcccgacgcccgggctttgcccgggcggcctcagtgagcgagcgagcgcgcagctgcctgcagg

SEQ ID NO: 2241 - DNA, 1537 bp, synthetic construct
  misc_feature 1..1537: note = Description of Artificial Sequence: Synthetic polynucleotide
  source 1..1537: mol_type = other DNA
ctgcgcgctcgctcgctcactgaggccgcccgggcaaagcccgggcgtcgggcgacctttggtcgcccggcctcagtgagcgagcgagcgcgcagagagggagtgtagccatgctctaggaagatcaattcaattcacgcgtccatggcttagaaggcaagaatcctggctgtggaaagatacctaaaggatcaacagctcctggggatttggggttgctctggaaaactcatttgcaccactgctgtgccttggaatgctagttggagtaataaatctctggaacagatttggaatcacacgacctggatggagtgggacagagaaattaacaattacacaagcttaatacactccttaattgaagaatcgcaaaaccagcaagaaaagaatgaacaagaattattggaattagataaatgggcaagtttgtggaattggtttaacataacaaattggctgtggtatataaaattattcataatgatagtaggaggcttggtaggtttaagaatagtttttgctgtactttctatagtgaatagagttaggcagggatattcaccattatcgtttcagacccacctcccaaccccgaggggacccgacaggcccgaaggaatagaagaagaaggtggagagagagacagagacagatccattcgattagtgaacggatctcgacggtatcgatcacgagactagcctcgagcggccgcaattcgaacgctgacgtcatcaacccgctccaaggaatcgcgggcccagtgtcactaggcgggaacacccagcgcgcgtgcgccctggcaggaagatggctgtgagggacagggagtggcgccctgcaatatttgcatgtcgctatgtgttctgggaaatcaccataaacgtgaaatgtctttggatttgggaatcttataagttctgtatgagaccacaccggtgaagcaaagaaggggcagagggagcccgtgagctgagtgggccagggactgggagaaggagtgaggaggcagggccggcatgcctctgctgctggccagaccccttaactcatttgttcccgtctgcacctgtcactagtaacagatgagttaaggggtttggccgtgtagtgctacccagcgctggctgcctcctcagcattgcaattcctctcccatctgggcaccagtcagctaccctggtgggaatctgggtagccctcgaggacggggtgaactacgcctgaggatccgatctttttccctctgccaaaaattatggggacatcatgaagccccttgagcatctgacttctggctaataaaggaaatttattttcattgcaatagtgtgttggaattttttgtgtctctcactcggcctaggtagataagtagcatggcgggttaatcattaactacaaggaacccctagtgatggagttggccactccctctctgcgcgctcgctcgctcactgaggccgggcgaccaaaggtcgcccgacgcccgggctttgcccgggcggcctcagtgagcgagcgagcgcgcag
